United States Patent Application Publication US 2026/0240958 A1 - sequence listing, part 18

SEQ ID NO: 15989 - RNA, 9485 nt, synthetic construct
  source 1..9485: mol_type = other RNA
aggaaataagagagaaaagaagagtaagaagaaatataagagccaccatggcccctaagaagaagcgtaaagtgagccggatggaacgcctcgtctacgaggtgcggcagaagtgcagaaacatcgaggacatctgcatctcctgcggatctctgaacgtgaccctggagcacccactgttcatcggcggcatgtgccagaactgtaaaaactgttttctggagtgtgcctatcaatacgacgatgacggctaccagagctactgcaccatctgttgcggcggaagagaggtgctgatgtgtggaaataacaactgctgccggtgcttctgcgtggaatgcgtggacctgctggtgggccccggcgccgcccaggccgctattaaggaagatccttggaactgctacatgtgcggccacaagggcacatacggcctgctgagacggagagaggactggcctagcagactgcagatgttcttcgccaataaccacgaccaggagttcgacccccctaaggtgtaccctcccgtccccgccgagaagagaaagcccatccgggtcctgagcctgttcgatggcatcgccaccggtctgctggtgctgaaggacctgggcatccaggtggataggtacattgcctccgaggtgtgcgaggactccatcaccgtgggaatggtgcgtcatcagggcaagatcatgtacgtgggcgacgtgcggagcgtgacacagaagcatatccaggagtggggccctttcgacctggtgatcggcggcagcccttgcaatgacctgagcatcgtgaacccagcccggaagggcctgtacgagggaaccggcagactgttcttcgagttttacagactgctgcacgacgcccggcctaaggaaggcgacgaccggcccttcttttggctgttcgagaatgtggtggccatgggagtcagcgacaagcgggatattagccggttcctggagagcaaccccgtgatgatcgatgccaaggaagtgagcgccgcccaccgggccagatacttctggggcaatctgcctggcatgaacagacccctggccagcaccgtgaacgacaagctggagctgcaggagtgcctggagcacggccggatcgccaagttcagcaaggtgagaaccatcaccacccgaagcaacagcatcaaacaaggcaaggaccagcactttcctgtgttcatgaacgagaaggaggacatcctgtggtgtaccgagatggagagagtgttcgggttcccagtccactacacagatgtcagcaacatgtctagactggccagacagagactgctgggaagaagctggtccgtccctgtgatcagacacctgttcgcccctctgaaggagtacttcgcctgcgtgagcagcggcaacagcaacgccaacagccggggccccagcttctctagcggcctggtgccactgtccctgagagggagccacatgggccccatggagatctacaaaaccgtgagcgcctggaagcggcagcctgtgcgcgtgctgagcctgtttcggaatatcgataaagtcctgaaaagcctgggattcctggagagcggctctggctccggcggtggcaccctgaagtacgtggaggatgtgacaaacgtggtcagacgggatgtggagaagtggggccccttcgatctggtgtacggcagcacccaacccctgggcagctcttgtgaccggtgccctggctggtacatgtttcagttccaccggatcctgcagtacgccctgccgagacaggagtcccagcggccattcttttggattttcatggacaacttgctgctgaccgaggatgaccaggaaactaccactcggttcctgcagaccgaagccgtgaccctgcaggacgtgagaggccgggactaccagaacgccatgcgggtgtggtccaacatccctggactgaaaagcaagcacgcacctctgacccctaaagaagaggagtacctgcaggcccaggtgcggagcagaagcaagctggacgcccctaaggtggatctgctggtgaagaattgcctcctgcccctgagagagtacttcaagtatttcagccagaatagtctgcccctgggaggcagcggcggcggcgccctggtgacatttgaggacgtcgccgtgcggttcacccaggaggaatgggctctgctggatccttctcagaaaatcctgtaccgggacgtgatgagagagacataccggaatctgacctccgtgggcatcaactgggaatgttgggaccttgaagcctgcttcagaagcctgggaagaaacctgagagtgcaggtggtgaagagaaagtgcgagctgaccaacagcggcccctgcgccgagggcggcccaagcagcggcgcccctcctcccagcggcggcagcccagccggctccccaacctctaccgaggagggcacctctgagtccgccacccccgagagcggccctggcacctccaccgagcccagcgagggcagcgcacccggcagccctgccggcagccccacctccacagaggagggaaccagcaccgagcccagcgaaggcagcgccccaggcaccagcaccgagcctagtgagcaggagattaaacggatcaacaagatcagaagaagacttgtgaaagacagcaacaccaagaaggccggcaagacaggccccatgaaaaccctgctggttagagtgatgacacccgatctgagagagcggctggaaaacctgagaaagaagcctgaaaatatcccccagcccatcagcaatacatctagagccaacctgaataagctgctgaccgattacaccgaaatgaagaaggcgatcctgcatgtgtactgggaagagttccagaaggaccctgtgggcctgatgagccgggtggcccagcctgccagcaagaagatcgatcagaacaagctgaaacctgagatggacgagaagggcaacctgaccaccgccggctttgcctgctctcagtgtggccagcccctgttcgtgtacaagctggagcaggtgtctgagaagggcaaggcttacaccaactacttcggacggtgcaatgtggccgagcacgaaaagctgatcctgctggcccagctgaagcccgagaaggatagcgacgaagccgtgacatatagcctgggaaagtttgggcagagggccctggatttctacagcattcatgtgaccaaggagtccacccaccccgtgaagcccctggcccagatcgccggaaacagatacgcctccggacctgtgggaaaggccctgagcgacgcatgtatgggcacaatcgcctccttcctgtctaagtaccaggacatcatcatcgaacaccagaaggtggtgaagggcaaccagaagagactggagagcctgcgggagctggccggcaaggaaaacctggaataccctagcgtgaccctgccacctcagcctcacaccaaggagggcgttgatgcctacaacgaagtgatcgcccgggtgcgaatgtgggtgaacctgaacctgtggcagaagctgaagctaagcagagatgatgccaagcctctgctgagactgaagggattcccttcctttcctctggtcgagagacaggccaacgaagtggactggtgggacatggtgtgtaacgtgaagaagctgatcaacgagaaaaaggaggatggcaaggtgttttggcagaatctggctggctacaagagacaggaagccctgagaccatacctgagcagcgaggaagatcggaagaagggaaagaaattcgctcggtaccagctgggcgacctgctgctgcacctggaaaagaagcacggcgaggactggggaaaggtgtacgacgaggcctgggagcggattgacaagaaagtggaaggcctgagcaagcacatcaagctggaagaggaacggagaagcgaggacgcccagagcaaggccgccctgaccgactggctgcgggctaaggccagcttcgtgatcgagggcctgaaggaggccgacaaggacgagttctgcagatgcgagctgaagctgcagaagtggtacggggacctgcggggaaagcccttcgccatcgaagccgagaacagcatcctggacatcagcggcttcagcaagcagtacaactgtgccttcatctggcagaaggacggcgtgaagaagctgaacctgtacctgatcatcaactacttcaagggcggcaagctgcggttcaagaagatcaaacctgaagccttcgaagccaacagattctacaccgtgatcaacaaaaagagcggcgagatcgtgcccatggaggtgaacttcaacttcgacgaccccaacctgatcatcctgcctctggcctttggcaagagacagggcagagaattcatctggaacgacctgctgtccctggaaaccggcagcctgaagctggccaacggaagagtgatcgagaagacactgtacaacagaagaacccggcaggatgagcctgccctgttcgtggccctgaccttcgagcggcgggaggtcctggactcctccaatatcaaaccaatgaacctgatcggcgtggcaagaggcgaaaacatccccgccgtgatcgccctgaccgaccccgagggctgcccactgagccggtttaaggatagcctgggaaacccaacccacatcctgagaatcggcgagagctataaggagaagcagcggaccatccaggccaagaaggaggtggagcagcggagagccggcggctacagccggaagtacgccagcaaagccaagaatctggcagacgatatggtgagaaacaccgctagagatctgctgtactacgccgtgacccaggatgccatgctgatcttcgccaacctgagccggggcttcggccggcagggcaagcggaccttcatggccgagagacagtacacacggatggaggactggctgaccgccaagctggcctacgagggcctgagcaagacctacctgtccaagacactggcccagtacacctccaagacatgcagcaactgtgggtttaccatcaccagcgccgactacgacagggtgctggagaagctgaagaagacagcaacaggctggatgaccacaattaacggcaaggagctgaaggtggagggccagattacctactacaacagatacaagagacagaacgtagtcaaggacctgtccgtcgagctggatagactgagcgaagaatctgtgaacaacgacatctcctcctggacaaagggcagaagcggagaagctctgagcctcctgaagaaaagattctcccatagacccgtgcaggagaagttcgtgtgcctgaactgcggcttcgagacacacgcagccgagcaagccgccctgaacatcgccagatcctggctgttcctgcggagccaggagtacaagaaataccagacaaacaagacaaccggcaacaccgataagagagccttcgtcgagacctggcagtccttttaccggaagaagcttaaggaggtgtggaaacctgccgtgcggtctggcggatctggcggaggctccggcaaggccctgctgagcttcgaggacgtggccatgtacttcaccagggaggagtggaaccacctggactgggcccagaaggacctgtacagggacgtgatgctggagaactacatgaacatggtgctgctgggcttccagttccccaagcccgaggtgatctgccagctggagaactgggacgagccctggatcctggacctgcccagggccggcaacaggaaggccagcagcagcgcctgcggcggcccaagcagcggcgcccctcctcccagcggcggcagcccagccggctccccaacctctaccgaggagggcacctctgagtccgccacccccgagagcggccctggcacctccaccgagcccagcgagggcagcgcacccggcagccctgccggcagccccacctccacagaggagggaaccagcaccgagcccagcgaaggcagcgccccaggcaccagcaccgagcctagtgagcaggagattaaacggatcaacaagatcagaagaagacttgtgaaagacagcaacaccaagaaggccggcaagacaggccccatgaaaaccctgctggttagagtgatgacacccgatctgagagagcggctggaaaacctgagaaagaagcctgaaaatatcccccagcccatcagcaatacatctagagccaacctgaataagctgctgaccgattacaccgaaatgaagaaggcgatcctgcatgtgtactgggaagagttccagaaggaccctgtgggcctgatgagccgggtggcccagcctgccagcaagaagatcgatcagaacaagctgaaacctgagatggacgagaagggcaacctgaccaccgccggctttgcctgctctcagtgtggccagcccctgttcgtgtacaagctggagcaggtgtctgagaagggcaaggcttacaccaactacttcggacggtgcaatgtggccgagcacgaaaagctgatcctgctggcccagctgaagcccgagaaggatagcgacgaagccgtgacatatagcctgggaaagtttgggcagagggccctggatttctacagcattcatgtgaccaaggagtccacccaccccgtgaagcccctggcccagatcgccggaaacagatacgcctccggacctgtgggaaaggccctgagcgacgcatgtatgggcacaatcgcctccttcctgtctaagtaccaggacatcatcatcgaacaccagaaggtggtgaagggcaaccagaagagactggagagcctgcgggagctggccggcaaggaaaacctggaataccctagcgtgaccctgccacctcagcctcacaccaaggagggcgttgatgcctacaacgaagtgatcgcccgggtgcgaatgtgggtgaacctgaacctgtggcagaagctgaagctaagcagagatgatgccaagcctctgctgagactgaagggattcccttcctttcctctggtcgagagacaggccaacgaagtggactggtgggacatggtgtgtaacgtgaagaagctgatcaacgagaaaaaggaggatggcaaggtgttttggcagaatctggctggctacaagagacaggaagccctgagaccatacctgagcagcgaggaagatcggaagaagggaaagaaattcgctcggtaccagctgggcgacctgctgctgcacctggaaaagaagcacggcgaggactggggaaaggtgtacgacgaggcctgggagcggattgacaagaaagtggaaggcctgagcaagcacatcaagctggaagaggaacggagaagcgaggacgcccagagcaaggccgccctgaccgactggctgcgggctaaggccagcttcgtgatcgagggcctgaaggaggccgacaaggacgagttctgcagatgcgagctgaagctgcagaagtggtacggggacctgcggggaaagcccttcgccatcgaagccgagaacagcatcctggacatcagcggcttcagcaagcagtacaactgtgccttcatctggcagaaggacggcgtgaagaagctgaacctgtacctgatcatcaactacttcaagggcggcaagctgcggttcaagaagatcaaacctgaagccttcgaagccaacagattctacaccgtgatcaacaaaaagagcggcgagatcgtgcccatggaggtgaacttcaacttcgacgaccccaacctgatcatcctgcctctggcctttggcaagagacagggcagagaattcatctggaacgacctgctgtccctggaaaccggcagcctgaagctggccaacggaagagtgatcgagaagacactgtacaacagaagaacccggcaggatgagcctgccctgttcgtggccctgaccttcgagcggcgggaggtcctggactcctccaatatcaaaccaatgaacctgatcggcgtggcaagaggcgaaaacatccccgccgtgatcgccctgaccgaccccgagggctgcccactgagccggtttaaggatagcctgggaaacccaacccacatcctgagaatcggcgagagctataaggagaagcagcggaccatccaggccaagaaggaggtggagcagcggagagccggcggctacagccggaagtacgccagcaaagccaagaatctggcagacgatatggtgagaaacaccgctagagatctgctgtactacgccgtgacccaggatgccatgctgatcttcgccaacctgagccggggcttcggccggcagggcaagcggaccttcatggccgagagacagtacacacggatggaggactggctgaccgccaagctggcctacgagggcctgagcaagacctacctgtccaagacactggcccagtacacctccaagacatgcagcaactgtgggtttaccatcaccagcgccgactacgacagggtgctggagaagctgaagaagacagcaacaggctggatgaccacaattaacggcaaggagctgaaggtggagggccagattacctactacaacagatacaagagacagaacgtagtcaaggacctgtccgtcgagctggatagactgagcgaagaatctgtgaacaacgacatctcctcctggacaaagggcagaagcggagaagctctgagcctcctgaagaaaagattctcccatagacccgtgcaggagaagttcgtgtgcctgaactgcggcttcgagacacacgcagccgagcaagccgccctgaacatcgccagatcctggctgttcctgcggagccaggagtacaagaaataccagacaaacaagacaaccggcaacaccgataagagagccttcgtcgagacctggcagtccttttaccggaagaagcttaaggaggtgtggaaacctgccgtgcggtctggcggatctggcggaggctcctggcaaggccctgctgagcttcgaggacgtggccatgtacttcaccagggaggagtggaaccacctggactgggcccagaaggacctgtacagggacgtgatgctggagaactacatgaacatggtgctgctgggcttccagttccccaagcccgaggtgatctgccagctggagaactgggacgagccctggatcctggacctgcccagggccggcaacaggaaggccagcagcagcgcctgcggatctggctccggcagcggccccaagaaaaagagaaaagtctaagctgccttctgcggggcttgccttctggccatgcccttcttctctcccttgcacctgtacctcttggtctttgaataaagcctgagtaggaaggctagcaaaaaaaaaaaaaaaaaaaaaaaaaaaaaaaaaaaaaaaaaaaaaaaaaaaaaaaaaaaaaaaaaaaaaaaaaaaaaaaa

SEQ ID NO: 15990 - RNA, 9485 nt, synthetic construct
  source 1..9485: mol_type = other RNA
aggaaataagagagaaaagaagagtaagaagaaatataagagccaccatggcccctaagaagaagcgtaaagtgagccggatggaacgcctcgtctacgaggtgcggcagaagtgcagaaacatcgaggacatctgcatctcctgcggatctctgaacgtgaccctggagcacccactgttcatcggcggcatgtgccagaactgtaaaaactgttttctggagtgtgcctatcaatacgacgatgacggctaccagagctactgcaccatctgttgcggcggaagagaggtgctgatgtgtggaaataacaactgctgccggtgcttctgcgtggaatgcgtggacctgctggtgggccccggcgccgcccaggccgctattaaggaagatccttggaactgctacatgtgcggccacaagggcacatacggcctgctgagacggagagaggactggcctagcagactgcagatgttcttcgccaataaccacgaccaggagttcgacccccctaaggtgtaccctcccgtccccgccgagaagagaaagcccatccgggtcctgagcctgttcgatggcatcgccaccggtctgctggtgctgaaggacctgggcatccaggtggataggtacattgcctccgaggtgtgcgaggactccatcaccgtgggaatggtgcgtcatcagggcaagatcatgtacgtgggcgacgtgcggagcgtgacacagaagcatatccaggagtggggccctttcgacctggtgatcggcggcagcccttgcaatgacctgagcatcgtgaacccagcccggaagggcctgtacgagggaaccggcagactgttcttcgagttttacagactgctgcacgacgcccggcctaaggaaggcgacgaccggcccttcttttggctgttcgagaatgtggtggccatgggagtcagcgacaagcgggatattagccggttcctggagagcaaccccgtgatgatcgatgccaaggaagtgagcgccgcccaccgggccagatacttctggggcaatctgcctggcatgaacagacccctggccagcaccgtgaacgacaagctggagctgcaggagtgcctggagcacggccggatcgccaagttcagcaaggtgagaaccatcaccacccgaagcaacagcatcaaacaaggcaaggaccagcactttcctgtgttcatgaacgagaaggaggacatcctgtggtgtaccgagatggagagagtgttcgggttcccagtccactacacagatgtcagcaacatgtctagactggccagacagagactgctgggaagaagctggtccgtccctgtgatcagacacctgttcgcccctctgaaggagtacttcgcctgcgtgagcagcggcaacagcaacgccaacagccggggccccagcttctctagcggcctggtgccactgtccctgagagggagccacatgggccccatggagatctacaaaaccgtgagcgcctggaagcggcagcctgtgcgcgtgctgagcctgtttcggaatatcgataaagtcctgaaaagcctgggattcctggagagcggctctggctccggcggtggcaccctgaagtacgtggaggatgtgacaaacgtggtcagacgggatgtggagaagtggggccccttcgatctggtgtacggcagcacccaacccctgggcagctcttgtgaccggtgccctggctggtacatgtttcagttccaccggatcctgcagtacgccctgccgagacaggagtcccagcggccattcttttggattttcatggacaacttgctgctgaccgaggatgaccaggaaactaccactcggttcctgcagaccgaagccgtgaccctgcaggacgtgagaggccgggactaccagaacgccatgcgggtgtggtccaacatccctggactgaaaagcaagcacgcacctctgacccctaaagaagaggagtacctgcaggcccaggtgcggagcagaagcaagctggacgcccctaaggtggatctgctggtgaagaattgcctcctgcccctgagagagtacttcaagtatttcagccagaatagtctgcccctgggaggcagcggcggcggcgccctggtgacatttgaggacgtcgccgtgcggttcacccaggaggaatgggctctgctggatccttctcagaaaatcctgtaccgggacgtgatgagagagacataccggaatctgacctccgtgggcatcaactgggaatgttgggaccttgaagcctgcttcagaagcctgggaagaaacctgagagtgcaggtggtgaagagaaagtgcgagctgaccaacagcggcccctgcgccgagggcggcccaagcagcggcgcccctcctcccagcggcggcagcccagccggctccccaacctctaccgaggagggcacctctgagtccgccacccccgagagcggccctggcacctccaccgagcccagcgagggcagcgcacccggcagccctgccggcagccccacctccacagaggagggaaccagcaccgagcccagcgaaggcagcgccccaggcaccagcaccgagcctagtgagcaggagattaaacggatcaacaagatcagaagaagacttgtgaaagacagcaacaccaagaaggccggcaagacaggccccatgaaaaccctgctggttagagtgatgacacccgatctgagagagcggctggaaaacctgagaaagaagcctgaaaatatcccccagcccatcagcaatacatctagagccaacctgaataagctgctgaccgattacaccgaaatgaagaaggcgatcctgcatgtgtactgggaagagttccagaaggaccctgtgggcctgatgagccgggtggcccagcctgccagcaagaagatcgatcagaacaagctgaaacctgagatggacgagaagggcaacctgaccaccgccggctttgcctgctctcagtgtggccagcccctgttcgtgtacaagctggagcaggtgtctgagaagggcaaggcttacaccaactacttcggacggtgcaatgtggccgagcacgaaaagctgatcctgctggcccagctgaagcccgagaaggatagcgacgaagccgtgacatatagcctgggaaagtttgggcagagggccctggatttctacagcattcatgtgaccaaggagtccacccaccccgtgaagcccctggcccagatcgccggaaacagatacgcctccggacctgtgggaaaggccctgagcgacgcatgtatgggcacaatcgcctccttcctgtctaagtaccaggacatcatcatcgaacaccagaaggtggtgaagggcaaccagaagagactggagagcctgcgggagctggccggcaaggaaaacctggaataccctagcgtgaccctgccacctcagcctcacaccaaggagggcgttgatgcctacaacgaagtgatcgcccgggtgcgaatgtgggtgaacctgaacctgtggcagaagctgaagctaagcagagatgatgccaagcctctgctgagactgaagggattcccttcctttcctctggtcgagagacaggccaacgaagtggactggtgggacatggtgtgtaacgtgaagaagctgatcaacgagaaaaaggaggatggcaaggtgttttggcagaatctggctggctacaagagacaggaagccctgagaccatacctgagcagcgaggaagatcggaagaagggaaagaaattcgctcggtaccagctgggcgacctgctgctgcacctggaaaagaagcacggcgaggactggggaaaggtgtacgacgaggcctgggagcggattgacaagaaagtggaaggcctgagcaagcacatcaagctggaagaggaacggagaagcgaggacgcccagagcaaggccgccctgaccgactggctgcgggctaaggccagcttcgtgatcgagggcctgaaggaggccgacaaggacgagttctgcagatgcgagctgaagctgcagaagtggtacggggacctgcggggaaagcccttcgccatcgaagccgagaacagcatcctggacatcagcggcttcagcaagcagtacaactgtgccttcatctggcagaaggacggcgtgaagaagctgaacctgtacctgatcatcaactacttcaagggcggcaagctgcggttcaagaagatcaaacctgaagccttcgaagccaacagattctacaccgtgatcaacaaaaagagcggcgagatcgtgcccatggaggtgaacttcaacttcgacgaccccaacctgatcatcctgcctctggcctttggcaagagacagggcagagaattcatctggaacgacctgctgtccctggaaaccggcagcctgaagctggccaacggaagagtgatcgagaagacactgtacaacagaagaacccggcaggatgagcctgccctgttcgtggccctgaccttcgagcggcgggaggtcctggactcctccaatatcaaaccaatgaacctgatcggcgtggcaagaggcgaaaacatccccgccgtgatcgccctgaccgaccccgagggctgcccactgagccggtttaaggatagcctgggaaacccaacccacatcctgagaatcggcgagagctataaggagaagcagcggaccatccaggccaagaaggaggtggagcagcggagagccggcggctacagccggaagtacgccagcaaagccaagaatctggcagacgatatggtgagaaacaccgctagagatctgctgtactacgccgtgacccaggatgccatgctgatcttcgccaacctgagccggggcttcggccggcagggcaagcggaccttcatggccgagagacagtacacacggatggaggactggctgaccgccaagctggcctacgagggcctgagcaagacctacctgtccaagacactggcccagtacacctccaagacatgcagcaactgtgggtttaccatcaccagcgccgactacgacagggtgctggagaagctgaagaagacagcaacaggctggatgaccacaattaacggcaaggagctgaaggtggagggccagattacctactacaacagatacaagagacagaacgtagtcaaggacctgtccgtcgagctggatagactgagcgaagaatctgtgaacaacgacatctcctcctggacaaagggcagaagcggagaagctctgagcctcctgaagaaaagattctcccatagacccgtgcaggagaagttcgtgtgcctgaactgcggcttcgagacacacgcagccgagcaagccgccctgaacatcgccagatcctggctgttcctgcggagccaggagtacaagaaataccagacaaacaagacaaccggcaacaccgataagagagccttcgtcgagacctggcagtccttttaccggaagaagcttaaggaggtgtggaaacctgccgtgcggtctggcggatctggcggaggctccacccaggtgagcgtgaccttcgacgacgtggccgtgaccttcacccaggaggagtggggccacctggaccccgcccagaggaccctgtacagggaggtgatgctggagacctgcaggctgctggtgagcctgggctgccccgtgcccaggcccgagctgatctacaggctggagcacggccaggagctgtggaccgtgaagagggacctgagcaggagcacctgcgccgtggacgagggcaagggcggcccaagcagcggcgcccctcctcccagcggcggcagcccagccggctccccaacctctaccgaggagggcacctctgagtccgccacccccgagagcggccctggcacctccaccgagcccagcgagggcagcgcacccggcagccctgccggcagccccacctccacagaggagggaaccagcaccgagcccagcgaaggcagcgccccaggcaccagcaccgagcctagtgagcaggagattaaacggatcaacaagatcagaagaagacttgtgaaagacagcaacaccaagaaggccggcaagacaggccccatgaaaaccctgctggttagagtgatgacacccgatctgagagagcggctggaaaacctgagaaagaagcctgaaaatatcccccagcccatcagcaatacatctagagccaacctgaataagctgctgaccgattacaccgaaatgaagaaggcgatcctgcatgtgtactgggaagagttccagaaggaccctgtgggcctgatgagccgggtggcccagcctgccagcaagaagatcgatcagaacaagctgaaacctgagatggacgagaagggcaacctgaccaccgccggctttgcctgctctcagtgtggccagcccctgttcgtgtacaagctggagcaggtgtctgagaagggcaaggcttacaccaactacttcggacggtgcaatgtggccgagcacgaaaagctgatcctgctggcccagctgaagcccgagaaggatagcgacgaagccgtgacatatagcctgggaaagtttgggcagagggccctggatttctacagcattcatgtgaccaaggagtccacccaccccgtgaagcccctggcccagatcgccggaaacagatacgcctccggacctgtgggaaaggccctgagcgacgcatgtatgggcacaatcgcctccttcctgtctaagtaccaggacatcatcatcgaacaccagaaggtggtgaagggcaaccagaagagactggagagcctgcgggagctggccggcaaggaaaacctggaataccctagcgtgaccctgccacctcagcctcacaccaaggagggcgttgatgcctacaacgaagtgatcgcccgggtgcgaatgtgggtgaacctgaacctgtggcagaagctgaagctaagcagagatgatgccaagcctctgctgagactgaagggattcccttcctttcctctggtcgagagacaggccaacgaagtggactggtgggacatggtgtgtaacgtgaagaagctgatcaacgagaaaaaggaggatggcaaggtgttttggcagaatctggctggctacaagagacaggaagccctgagaccatacctgagcagcgaggaagatcggaagaagggaaagaaattcgctcggtaccagctgggcgacctgctgctgcacctggaaaagaagcacggcgaggactggggaaaggtgtacgacgaggcctgggagcggattgacaagaaagtggaaggcctgagcaagcacatcaagctggaagaggaacggagaagcgaggacgcccagagcaaggccgccctgaccgactggctgcgggctaaggccagcttcgtgatcgagggcctgaaggaggccgacaaggacgagttctgcagatgcgagctgaagctgcagaagtggtacggggacctgcggggaaagcccttcgccatcgaagccgagaacagcatcctggacatcagcggcttcagcaagcagtacaactgtgccttcatctggcagaaggacggcgtgaagaagctgaacctgtacctgatcatcaactacttcaagggcggcaagctgcggttcaagaagatcaaacctgaagccttcgaagccaacagattctacaccgtgatcaacaaaaagagcggcgagatcgtgcccatggaggtgaacttcaacttcgacgaccccaacctgatcatcctgcctctggcctttggcaagagacagggcagagaattcatctggaacgacctgctgtccctggaaaccggcagcctgaagctggccaacggaagagtgatcgagaagacactgtacaacagaagaacccggcaggatgagcctgccctgttcgtggccctgaccttcgagcggcgggaggtcctggactcctccaatatcaaaccaatgaacctgatcggcgtggcaagaggcgaaaacatccccgccgtgatcgccctgaccgaccccgagggctgcccactgagccggtttaaggatagcctgggaaacccaacccacatcctgagaatcggcgagagctataaggagaagcagcggaccatccaggccaagaaggaggtggagcagcggagagccggcggctacagccggaagtacgccagcaaagccaagaatctggcagacgatatggtgagaaacaccgctagagatctgctgtactacgccgtgacccaggatgccatgctgatcttcgccaacctgagccggggcttcggccggcagggcaagcggaccttcatggccgagagacagtacacacggatggaggactggctgaccgccaagctggcctacgagggcctgagcaagacctacctgtccaagacactggcccagtacacctccaagacatgcagcaactgtgggtttaccatcaccagcgccgactacgacagggtgctggagaagctgaagaagacagcaacaggctggatgaccacaattaacggcaaggagctgaaggtggagggccagattacctactacaacagatacaagagacagaacgtagtcaaggacctgtccgtcgagctggatagactgagcgaagaatctgtgaacaacgacatctcctcctggacaaagggcagaagcggagaagctctgagcctcctgaagaaaagattctcccatagacccgtgcaggagaagttcgtgtgcctgaactgcggcttcgagacacacgcagccgagcaagccgccctgaacatcgccagatcctggctgttcctgcggagccaggagtacaagaaataccagacaaacaagacaaccggcaacaccgataagagagccttcgtcgagacctggcagtccttttaccggaagaagcttaaggaggtgtggaaacctgccgtgcggtctggcggatctggcggaggctcctacccaggtgagcgtgaccttcgacgacgtggccgtgaccttcacccaggaggagtggggccacctggaccccgcccagaggaccctgtacagggaggtgatgctggagacctgcaggctgctggtgagcctgggctgccccgtgcccaggcccgagctgatctacaggctggagcacggccaggagctgtggaccgtgaagagggacctgagcaggagcacctgcgccgtggacgagggcaagggatctggctccggcagcggccccaagaaaaagagaaaagtctaagctgccttctgcggggcttgccttctggccatgcccttcttctctcccttgcacctgtacctcttggtctttgaataaagcctgagtaggaaggctagcaaaaaaaaaaaaaaaaaaaaaaaaaaaaaaaaaaaaaaaaaaaaaaaaaaaaaaaaaaaaaaaaaaaaaaaaaaaaaaaa

SEQ ID NO: 15991 - RNA, 9485 nt, synthetic construct
  source 1..9485: mol_type = other RNA
aggaaataagagagaaaagaagagtaagaagaaatataagagccaccatggcccctaagaagaagcgtaaagtgagccggatggaacgcctcgtctacgaggtgcggcagaagtgcagaaacatcgaggacatctgcatctcctgcggatctctgaacgtgaccctggagcacccactgttcatcggcggcatgtgccagaactgtaaaaactgttttctggagtgtgcctatcaatacgacgatgacggctaccagagctactgcaccatctgttgcggcggaagagaggtgctgatgtgtggaaataacaactgctgccggtgcttctgcgtggaatgcgtggacctgctggtgggccccggcgccgcccaggccgctattaaggaagatccttggaactgctacatgtgcggccacaagggcacatacggcctgctgagacggagagaggactggcctagcagactgcagatgttcttcgccaataaccacgaccaggagttcgacccccctaaggtgtaccctcccgtccccgccgagaagagaaagcccatccgggtcctgagcctgttcgatggcatcgccaccggtctgctggtgctgaaggacctgggcatccaggtggataggtacattgcctccgaggtgtgcgaggactccatcaccgtgggaatggtgcgtcatcagggcaagatcatgtacgtgggcgacgtgcggagcgtgacacagaagcatatccaggagtggggccctttcgacctggtgatcggcggcagcccttgcaatgacctgagcatcgtgaacccagcccggaagggcctgtacgagggaaccggcagactgttcttcgagttttacagactgctgcacgacgcccggcctaaggaaggcgacgaccggcccttcttttggctgttcgagaatgtggtggccatgggagtcagcgacaagcgggatattagccggttcctggagagcaaccccgtgatgatcgatgccaaggaagtgagcgccgcccaccgggccagatacttctggggcaatctgcctggcatgaacagacccctggccagcaccgtgaacgacaagctggagctgcaggagtgcctggagcacggccggatcgccaagttcagcaaggtgagaaccatcaccacccgaagcaacagcatcaaacaaggcaaggaccagcactttcctgtgttcatgaacgagaaggaggacatcctgtggtgtaccgagatggagagagtgttcgggttcccagtccactacacagatgtcagcaacatgtctagactggccagacagagactgctgggaagaagctggtccgtccctgtgatcagacacctgttcgcccctctgaaggagtacttcgcctgcgtgagcagcggcaacagcaacgccaacagccggggccccagcttctctagcggcctggtgccactgtccctgagagggagccacatgggccccatggagatctacaaaaccgtgagcgcctggaagcggcagcctgtgcgcgtgctgagcctgtttcggaatatcgataaagtcctgaaaagcctgggattcctggagagcggctctggctccggcggtggcaccctgaagtacgtggaggatgtgacaaacgtggtcagacgggatgtggagaagtggggccccttcgatctggtgtacggcagcacccaacccctgggcagctcttgtgaccggtgccctggctggtacatgtttcagttccaccggatcctgcagtacgccctgccgagacaggagtcccagcggccattcttttggattttcatggacaacttgctgctgaccgaggatgaccaggaaactaccactcggttcctgcagaccgaagccgtgaccctgcaggacgtgagaggccgggactaccagaacgccatgcgggtgtggtccaacatccctggactgaaaagcaagcacgcacctctgacccctaaagaagaggagtacctgcaggcccaggtgcggagcagaagcaagctggacgcccctaaggtggatctgctggtgaagaattgcctcctgcccctgagagagtacttcaagtatttcagccagaatagtctgcccctgggaggcagcggcggcggcgccctggtgacatttgaggacgtcgccgtgcggttcacccaggaggaatgggctctgctggatccttctcagaaaatcctgtaccgggacgtgatgagagagacataccggaatctgacctccgtgggcatcaactgggaatgttgggaccttgaagcctgcttcagaagcctgggaagaaacctgagagtgcaggtggtgaagagaaagtgcgagctgaccaacagcggcccctgcgccgagggcggcccaagcagcggcgcccctcctcccagcggcggcagcccagccggctccccaacctctaccgaggagggcacctctgagtccgccacccccgagagcggccctggcacctccaccgagcccagcgagggcagcgcacccggcagccctgccggcagccccacctccacagaggagggaaccagcaccgagcccagcgaaggcagcgccccaggcaccagcaccgagcctagtgagcaggagattaaacggatcaacaagatcagaagaagacttgtgaaagacagcaacaccaagaaggccggcaagacaggccccatgaaaaccctgctggttagagtgatgacacccgatctgagagagcggctggaaaacctgagaaagaagcctgaaaatatcccccagcccatcagcaatacatctagagccaacctgaataagctgctgaccgattacaccgaaatgaagaaggcgatcctgcatgtgtactgggaagagttccagaaggaccctgtgggcctgatgagccgggtggcccagcctgccagcaagaagatcgatcagaacaagctgaaacctgagatggacgagaagggcaacctgaccaccgccggctttgcctgctctcagtgtggccagcccctgttcgtgtacaagctggagcaggtgtctgagaagggcaaggcttacaccaactacttcggacggtgcaatgtggccgagcacgaaaagctgatcctgctggcccagctgaagcccgagaaggatagcgacgaagccgtgacatatagcctgggaaagtttgggcagagggccctggatttctacagcattcatgtgaccaaggagtccacccaccccgtgaagcccctggcccagatcgccggaaacagatacgcctccggacctgtgggaaaggccctgagcgacgcatgtatgggcacaatcgcctccttcctgtctaagtaccaggacatcatcatcgaacaccagaaggtggtgaagggcaaccagaagagactggagagcctgcgggagctggccggcaaggaaaacctggaataccctagcgtgaccctgccacctcagcctcacaccaaggagggcgttgatgcctacaacgaagtgatcgcccgggtgcgaatgtgggtgaacctgaacctgtggcagaagctgaagctaagcagagatgatgccaagcctctgctgagactgaagggattcccttcctttcctctggtcgagagacaggccaacgaagtggactggtgggacatggtgtgtaacgtgaagaagctgatcaacgagaaaaaggaggatggcaaggtgttttggcagaatctggctggctacaagagacaggaagccctgagaccatacctgagcagcgaggaagatcggaagaagggaaagaaattcgctcggtaccagctgggcgacctgctgctgcacctggaaaagaagcacggcgaggactggggaaaggtgtacgacgaggcctgggagcggattgacaagaaagtggaaggcctgagcaagcacatcaagctggaagaggaacggagaagcgaggacgcccagagcaaggccgccctgaccgactggctgcgggctaaggccagcttcgtgatcgagggcctgaaggaggccgacaaggacgagttctgcagatgcgagctgaagctgcagaagtggtacggggacctgcggggaaagcccttcgccatcgaagccgagaacagcatcctggacatcagcggcttcagcaagcagtacaactgtgccttcatctggcagaaggacggcgtgaagaagctgaacctgtacctgatcatcaactacttcaagggcggcaagctgcggttcaagaagatcaaacctgaagccttcgaagccaacagattctacaccgtgatcaacaaaaagagcggcgagatcgtgcccatggaggtgaacttcaacttcgacgaccccaacctgatcatcctgcctctggcctttggcaagagacagggcagagaattcatctggaacgacctgctgtccctggaaaccggcagcctgaagctggccaacggaagagtgatcgagaagacactgtacaacagaagaacccggcaggatgagcctgccctgttcgtggccctgaccttcgagcggcgggaggtcctggactcctccaatatcaaaccaatgaacctgatcggcgtggcaagaggcgaaaacatccccgccgtgatcgccctgaccgaccccgagggctgcccactgagccggtttaaggatagcctgggaaacccaacccacatcctgagaatcggcgagagctataaggagaagcagcggaccatccaggccaagaaggaggtggagcagcggagagccggcggctacagccggaagtacgccagcaaagccaagaatctggcagacgatatggtgagaaacaccgctagagatctgctgtactacgccgtgacccaggatgccatgctgatcttcgccaacctgagccggggcttcggccggcagggcaagcggaccttcatggccgagagacagtacacacggatggaggactggctgaccgccaagctggcctacgagggcctgagcaagacctacctgtccaagacactggcccagtacacctccaagacatgcagcaactgtgggtttaccatcaccagcgccgactacgacagggtgctggagaagctgaagaagacagcaacaggctggatgaccacaattaacggcaaggagctgaaggtggagggccagattacctactacaacagatacaagagacagaacgtagtcaaggacctgtccgtcgagctggatagactgagcgaagaatctgtgaacaacgacatctcctcctggacaaagggcagaagcggagaagctctgagcctcctgaagaaaagattctcccatagacccgtgcaggagaagttcgtgtgcctgaactgcggcttcgagacacacgcagccgagcaagccgccctgaacatcgccagatcctggctgttcctgcggagccaggagtacaagaaataccagacaaacaagacaaccggcaacaccgataagagagccttcgtcgagacctggcagtccttttaccggaagaagcttaaggaggtgtggaaacctgccgtgcggtctggcggatctggcggaggctcctaccagggcctggtgagcttcgaggacgtggccgtgaacttcacctgggaggagtggcaggacctggacgccgcccagaggaccctgtacagggacgtgatgctggagaactacagcagcctggtgagcctgggccactgcatcaccaagcccgaggtgatcatcaagctggagcagggcgccgccccctggaccgtgaaggagacccccgaccagggcagccccgacgtgcagatcgtggacggcggcccaagcagcggcgcccctcctcccagcggcggcagcccagccggctccccaacctctaccgaggagggcacctctgagtccgccacccccgagagcggccctggcacctccaccgagcccagcgagggcagcgcacccggcagccctgccggcagccccacctccacagaggagggaaccagcaccgagcccagcgaaggcagcgccccaggcaccagcaccgagcctagtgagcaggagattaaacggatcaacaagatcagaagaagacttgtgaaagacagcaacaccaagaaggccggcaagacaggccccatgaaaaccctgctggttagagtgatgacacccgatctgagagagcggctggaaaacctgagaaagaagcctgaaaatatcccccagcccatcagcaatacatctagagccaacctgaataagctgctgaccgattacaccgaaatgaagaaggcgatcctgcatgtgtactgggaagagttccagaaggaccctgtgggcctgatgagccgggtggcccagcctgccagcaagaagatcgatcagaacaagctgaaacctgagatggacgagaagggcaacctgaccaccgccggctttgcctgctctcagtgtggccagcccctgttcgtgtacaagctggagcaggtgtctgagaagggcaaggcttacaccaactacttcggacggtgcaatgtggccgagcacgaaaagctgatcctgctggcccagctgaagcccgagaaggatagcgacgaagccgtgacatatagcctgggaaagtttgggcagagggccctggatttctacagcattcatgtgaccaaggagtccacccaccccgtgaagcccctggcccagatcgccggaaacagatacgcctccggacctgtgggaaaggccctgagcgacgcatgtatgggcacaatcgcctccttcctgtctaagtaccaggacatcatcatcgaacaccagaaggtggtgaagggcaaccagaagagactggagagcctgcgggagctggccggcaaggaaaacctggaataccctagcgtgaccctgccacctcagcctcacaccaaggagggcgttgatgcctacaacgaagtgatcgcccgggtgcgaatgtgggtgaacctgaacctgtggcagaagctgaagctaagcagagatgatgccaagcctctgctgagactgaagggattcccttcctttcctctggtcgagagacaggccaacgaagtggactggtgggacatggtgtgtaacgtgaagaagctgatcaacgagaaaaaggaggatggcaaggtgttttggcagaatctggctggctacaagagacaggaagccctgagaccatacctgagcagcgaggaagatcggaagaagggaaagaaattcgctcggtaccagctgggcgacctgctgctgcacctggaaaagaagcacggcgaggactggggaaaggtgtacgacgaggcctgggagcggattgacaagaaagtggaaggcctgagcaagcacatcaagctggaagaggaacggagaagcgaggacgcccagagcaaggccgccctgaccgactggctgcgggctaaggccagcttcgtgatcgagggcctgaaggaggccgacaaggacgagttctgcagatgcgagctgaagctgcagaagtggtacggggacctgcggggaaagcccttcgccatcgaagccgagaacagcatcctggacatcagcggcttcagcaagcagtacaactgtgccttcatctggcagaaggacggcgtgaagaagctgaacctgtacctgatcatcaactacttcaagggcggcaagctgcggttcaagaagatcaaacctgaagccttcgaagccaacagattctacaccgtgatcaacaaaaagagcggcgagatcgtgcccatggaggtgaacttcaacttcgacgaccccaacctgatcatcctgcctctggcctttggcaagagacagggcagagaattcatctggaacgacctgctgtccctggaaaccggcagcctgaagctggccaacggaagagtgatcgagaagacactgtacaacagaagaacccggcaggatgagcctgccctgttcgtggccctgaccttcgagcggcgggaggtcctggactcctccaatatcaaaccaatgaacctgatcggcgtggcaagaggcgaaaacatccccgccgtgatcgccctgaccgaccccgagggctgcccactgagccggtttaaggatagcctgggaaacccaacccacatcctgagaatcggcgagagctataaggagaagcagcggaccatccaggccaagaaggaggtggagcagcggagagccggcggctacagccggaagtacgccagcaaagccaagaatctggcagacgatatggtgagaaacaccgctagagatctgctgtactacgccgtgacccaggatgccatgctgatcttcgccaacctgagccggggcttcggccggcagggcaagcggaccttcatggccgagagacagtacacacggatggaggactggctgaccgccaagctggcctacgagggcctgagcaagacctacctgtccaagacactggcccagtacacctccaagacatgcagcaactgtgggtttaccatcaccagcgccgactacgacagggtgctggagaagctgaagaagacagcaacaggctggatgaccacaattaacggcaaggagctgaaggtggagggccagattacctactacaacagatacaagagacagaacgtagtcaaggacctgtccgtcgagctggatagactgagcgaagaatctgtgaacaacgacatctcctcctggacaaagggcagaagcggagaagctctgagcctcctgaagaaaagattctcccatagacccgtgcaggagaagttcgtgtgcctgaactgcggcttcgagacacacgcagccgagcaagccgccctgaacatcgccagatcctggctgttcctgcggagccaggagtacaagaaataccagacaaacaagacaaccggcaacaccgataagagagccttcgtcgagacctggcagtccttttaccggaagaagcttaaggaggtgtggaaacctgccgtgcggtctggcggatctggcggaggctccttaccagggcctggtgagcttcgaggacgtggccgtgaacttcacctgggaggagtggcaggacctggacgccgcccagaggaccctgtacagggacgtgatgctggagaactacagcagcctggtgagcctgggccactgcatcaccaagcccgaggtgatcatcaagctggagcagggcgccgccccctggaccgtgaaggagacccccgaccagggcagccccgacgtgcagatcgtggacggatctggctccggcagcggccccaagaaaaagagaaaagtctaagctgccttctgcggggcttgccttctggccatgcccttcttctctcccttgcacctgtacctcttggtctttgaataaagcctgagtaggaaggctagcaaaaaaaaaaaaaaaaaaaaaaaaaaaaaaaaaaaaaaaaaaaaaaaaaaaaaaaaaaaaaaaaaaaaaaaaaaaaaaaa

SEQ ID NO: 15992 - RNA, 9485 nt, synthetic construct
  source 1..9485: mol_type = other RNA
aggaaataagagagaaaagaagagtaagaagaaatataagagccaccatggcccctaagaagaagcgtaaagtgagccggatggaacgcctcgtctacgaggtgcggcagaagtgcagaaacatcgaggacatctgcatctcctgcggatctctgaacgtgaccctggagcacccactgttcatcggcggcatgtgccagaactgtaaaaactgttttctggagtgtgcctatcaatacgacgatgacggctaccagagctactgcaccatctgttgcggcggaagagaggtgctgatgtgtggaaataacaactgctgccggtgcttctgcgtggaatgcgtggacctgctggtgggccccggcgccgcccaggccgctattaaggaagatccttggaactgctacatgtgcggccacaagggcacatacggcctgctgagacggagagaggactggcctagcagactgcagatgttcttcgccaataaccacgaccaggagttcgacccccctaaggtgtaccctcccgtccccgccgagaagagaaagcccatccgggtcctgagcctgttcgatggcatcgccaccggtctgctggtgctgaaggacctgggcatccaggtggataggtacattgcctccgaggtgtgcgaggactccatcaccgtgggaatggtgcgtcatcagggcaagatcatgtacgtgggcgacgtgcggagcgtgacacagaagcatatccaggagtggggccctttcgacctggtgatcggcggcagcccttgcaatgacctgagcatcgtgaacccagcccggaagggcctgtacgagggaaccggcagactgttcttcgagttttacagactgctgcacgacgcccggcctaaggaaggcgacgaccggcccttcttttggctgttcgagaatgtggtggccatgggagtcagcgacaagcgggatattagccggttcctggagagcaaccccgtgatgatcgatgccaaggaagtgagcgccgcccaccgggccagatacttctggggcaatctgcctggcatgaacagacccctggccagcaccgtgaacgacaagctggagctgcaggagtgcctggagcacggccggatcgccaagttcagcaaggtgagaaccatcaccacccgaagcaacagcatcaaacaaggcaaggaccagcactttcctgtgttcatgaacgagaaggaggacatcctgtggtgtaccgagatggagagagtgttcgggttcccagtccactacacagatgtcagcaacatgtctagactggccagacagagactgctgggaagaagctggtccgtccctgtgatcagacacctgttcgcccctctgaaggagtacttcgcctgcgtgagcagcggcaacagcaacgccaacagccggggccccagcttctctagcggcctggtgccactgtccctgagagggagccacatgggccccatggagatctacaaaaccgtgagcgcctggaagcggcagcctgtgcgcgtgctgagcctgtttcggaatatcgataaagtcctgaaaagcctgggattcctggagagcggctctggctccggcggtggcaccctgaagtacgtggaggatgtgacaaacgtggtcagacgggatgtggagaagtggggccccttcgatctggtgtacggcagcacccaacccctgggcagctcttgtgaccggtgccctggctggtacatgtttcagttccaccggatcctgcagtacgccctgccgagacaggagtcccagcggccattcttttggattttcatggacaacttgctgctgaccgaggatgaccaggaaactaccactcggttcctgcagaccgaagccgtgaccctgcaggacgtgagaggccgggactaccagaacgccatgcgggtgtggtccaacatccctggactgaaaagcaagcacgcacctctgacccctaaagaagaggagtacctgcaggcccaggtgcggagcagaagcaagctggacgcccctaaggtggatctgctggtgaagaattgcctcctgcccctgagagagtacttcaagtatttcagccagaatagtctgcccctgggaggcagcggcggcggcgccctggtgacatttgaggacgtcgccgtgcggttcacccaggaggaatgggctctgctggatccttctcagaaaatcctgtaccgggacgtgatgagagagacataccggaatctgacctccgtgggcatcaactgggaatgttgggaccttgaagcctgcttcagaagcctgggaagaaacctgagagtgcaggtggtgaagagaaagtgcgagctgaccaacagcggcccctgcgccgagggcggcccaagcagcggcgcccctcctcccagcggcggcagcccagccggctccccaacctctaccgaggagggcacctctgagtccgccacccccgagagcggccctggcacctccaccgagcccagcgagggcagcgcacccggcagccctgccggcagccccacctccacagaggagggaaccagcaccgagcccagcgaaggcagcgccccaggcaccagcaccgagcctagtgagcaggagattaaacggatcaacaagatcagaagaagacttgtgaaagacagcaacaccaagaaggccggcaagacaggccccatgaaaaccctgctggttagagtgatgacacccgatctgagagagcggctggaaaacctgagaaagaagcctgaaaatatcccccagcccatcagcaatacatctagagccaacctgaataagctgctgaccgattacaccgaaatgaagaaggcgatcctgcatgtgtactgggaagagttccagaaggaccctgtgggcctgatgagccgggtggcccagcctgccagcaagaagatcgatcagaacaagctgaaacctgagatggacgagaagggcaacctgaccaccgccggctttgcctgctctcagtgtggccagcccctgttcgtgtacaagctggagcaggtgtctgagaagggcaaggcttacaccaactacttcggacggtgcaatgtggccgagcacgaaaagctgatcctgctggcccagctgaagcccgagaaggatagcgacgaagccgtgacatatagcctgggaaagtttgggcagagggccctggatttctacagcattcatgtgaccaaggagtccacccaccccgtgaagcccctggcccagatcgccggaaacagatacgcctccggacctgtgggaaaggccctgagcgacgcatgtatgggcacaatcgcctccttcctgtctaagtaccaggacatcatcatcgaacaccagaaggtggtgaagggcaaccagaagagactggagagcctgcgggagctggccggcaaggaaaacctggaataccctagcgtgaccctgccacctcagcctcacaccaaggagggcgttgatgcctacaacgaagtgatcgcccgggtgcgaatgtgggtgaacctgaacctgtggcagaagctgaagctaagcagagatgatgccaagcctctgctgagactgaagggattcccttcctttcctctggtcgagagacaggccaacgaagtggactggtgggacatggtgtgtaacgtgaagaagctgatcaacgagaaaaaggaggatggcaaggtgttttggcagaatctggctggctacaagagacaggaagccctgagaccatacctgagcagcgaggaagatcggaagaagggaaagaaattcgctcggtaccagctgggcgacctgctgctgcacctggaaaagaagcacggcgaggactggggaaaggtgtacgacgaggcctgggagcggattgacaagaaagtggaaggcctgagcaagcacatcaagctggaagaggaacggagaagcgaggacgcccagagcaaggccgccctgaccgactggctgcgggctaaggccagcttcgtgatcgagggcctgaaggaggccgacaaggacgagttctgcagatgcgagctgaagctgcagaagtggtacggggacctgcggggaaagcccttcgccatcgaagccgagaacagcatcctggacatcagcggcttcagcaagcagtacaactgtgccttcatctggcagaaggacggcgtgaagaagctgaacctgtacctgatcatcaactacttcaagggcggcaagctgcggttcaagaagatcaaacctgaagccttcgaagccaacagattctacaccgtgatcaacaaaaagagcggcgagatcgtgcccatggaggtgaacttcaacttcgacgaccccaacctgatcatcctgcctctggcctttggcaagagacagggcagagaattcatctggaacgacctgctgtccctggaaaccggcagcctgaagctggccaacggaagagtgatcgagaagacactgtacaacagaagaacccggcaggatgagcctgccctgttcgtggccctgaccttcgagcggcgggaggtcctggactcctccaatatcaaaccaatgaacctgatcggcgtggcaagaggcgaaaacatccccgccgtgatcgccctgaccgaccccgagggctgcccactgagccggtttaaggatagcctgggaaacccaacccacatcctgagaatcggcgagagctataaggagaagcagcggaccatccaggccaagaaggaggtggagcagcggagagccggcggctacagccggaagtacgccagcaaagccaagaatctggcagacgatatggtgagaaacaccgctagagatctgctgtactacgccgtgacccaggatgccatgctgatcttcgccaacctgagccggggcttcggccggcagggcaagcggaccttcatggccgagagacagtacacacggatggaggactggctgaccgccaagctggcctacgagggcctgagcaagacctacctgtccaagacactggcccagtacacctccaagacatgcagcaactgtgggtttaccatcaccagcgccgactacgacagggtgctggagaagctgaagaagacagcaacaggctggatgaccacaattaacggcaaggagctgaaggtggagggccagattacctactacaacagatacaagagacagaacgtagtcaaggacctgtccgtcgagctggatagactgagcgaagaatctgtgaacaacgacatctcctcctggacaaagggcagaagcggagaagctctgagcctcctgaagaaaagattctcccatagacccgtgcaggagaagttcgtgtgcctgaactgcggcttcgagacacacgcagccgagcaagccgccctgaacatcgccagatcctggctgttcctgcggagccaggagtacaagaaataccagacaaacaagacaaccggcaacaccgataagagagccttcgtcgagacctggcagtccttttaccggaagaagcttaaggaggtgtggaaacctgccgtgcggtctggcggatctggcggaggctccccccaggacagcgtgaccttcgaggaggtggccgtgagcttcagcagggaggagtgggccctgctgaccgactggcagaagaacctgtacaaggacgtgatgagggacaactacgagatgctgaacagcctggacctggccgcccacaagcccgacatcatcctgaggatcgagaggggccaggagccctgcgtgggcaggctgcagaggagcaaggccagggagaggcccaaccacgtgttcggcggcccaagcagcggcgcccctcctcccagcggcggcagcccagccggctccccaacctctaccgaggagggcacctctgagtccgccacccccgagagcggccctggcacctccaccgagcccagcgagggcagcgcacccggcagccctgccggcagccccacctccacagaggagggaaccagcaccgagcccagcgaaggcagcgccccaggcaccagcaccgagcctagtgagcaggagattaaacggatcaacaagatcagaagaagacttgtgaaagacagcaacaccaagaaggccggcaagacaggccccatgaaaaccctgctggttagagtgatgacacccgatctgagagagcggctggaaaacctgagaaagaagcctgaaaatatcccccagcccatcagcaatacatctagagccaacctgaataagctgctgaccgattacaccgaaatgaagaaggcgatcctgcatgtgtactgggaagagttccagaaggaccctgtgggcctgatgagccgggtggcccagcctgccagcaagaagatcgatcagaacaagctgaaacctgagatggacgagaagggcaacctgaccaccgccggctttgcctgctctcagtgtggccagcccctgttcgtgtacaagctggagcaggtgtctgagaagggcaaggcttacaccaactacttcggacggtgcaatgtggccgagcacgaaaagctgatcctgctggcccagctgaagcccgagaaggatagcgacgaagccgtgacatatagcctgggaaagtttgggcagagggccctggatttctacagcattcatgtgaccaaggagtccacccaccccgtgaagcccctggcccagatcgccggaaacagatacgcctccggacctgtgggaaaggccctgagcgacgcatgtatgggcacaatcgcctccttcctgtctaagtaccaggacatcatcatcgaacaccagaaggtggtgaagggcaaccagaagagactggagagcctgcgggagctggccggcaaggaaaacctggaataccctagcgtgaccctgccacctcagcctcacaccaaggagggcgttgatgcctacaacgaagtgatcgcccgggtgcgaatgtgggtgaacctgaacctgtggcagaagctgaagctaagcagagatgatgccaagcctctgctgagactgaagggattcccttcctttcctctggtcgagagacaggccaacgaagtggactggtgggacatggtgtgtaacgtgaagaagctgatcaacgagaaaaaggaggatggcaaggtgttttggcagaatctggctggctacaagagacaggaagccctgagaccatacctgagcagcgaggaagatcggaagaagggaaagaaattcgctcggtaccagctgggcgacctgctgctgcacctggaaaagaagcacggcgaggactggggaaaggtgtacgacgaggcctgggagcggattgacaagaaagtggaaggcctgagcaagcacatcaagctggaagaggaacggagaagcgaggacgcccagagcaaggccgccctgaccgactggctgcgggctaaggccagcttcgtgatcgagggcctgaaggaggccgacaaggacgagttctgcagatgcgagctgaagctgcagaagtggtacggggacctgcggggaaagcccttcgccatcgaagccgagaacagcatcctggacatcagcggcttcagcaagcagtacaactgtgccttcatctggcagaaggacggcgtgaagaagctgaacctgtacctgatcatcaactacttcaagggcggcaagctgcggttcaagaagatcaaacctgaagccttcgaagccaacagattctacaccgtgatcaacaaaaagagcggcgagatcgtgcccatggaggtgaacttcaacttcgacgaccccaacctgatcatcctgcctctggcctttggcaagagacagggcagagaattcatctggaacgacctgctgtccctggaaaccggcagcctgaagctggccaacggaagagtgatcgagaagacactgtacaacagaagaacccggcaggatgagcctgccctgttcgtggccctgaccttcgagcggcgggaggtcctggactcctccaatatcaaaccaatgaacctgatcggcgtggcaagaggcgaaaacatccccgccgtgatcgccctgaccgaccccgagggctgcccactgagccggtttaaggatagcctgggaaacccaacccacatcctgagaatcggcgagagctataaggagaagcagcggaccatccaggccaagaaggaggtggagcagcggagagccggcggctacagccggaagtacgccagcaaagccaagaatctggcagacgatatggtgagaaacaccgctagagatctgctgtactacgccgtgacccaggatgccatgctgatcttcgccaacctgagccggggcttcggccggcagggcaagcggaccttcatggccgagagacagtacacacggatggaggactggctgaccgccaagctggcctacgagggcctgagcaagacctacctgtccaagacactggcccagtacacctccaagacatgcagcaactgtgggtttaccatcaccagcgccgactacgacagggtgctggagaagctgaagaagacagcaacaggctggatgaccacaattaacggcaaggagctgaaggtggagggccagattacctactacaacagatacaagagacagaacgtagtcaaggacctgtccgtcgagctggatagactgagcgaagaatctgtgaacaacgacatctcctcctggacaaagggcagaagcggagaagctctgagcctcctgaagaaaagattctcccatagacccgtgcaggagaagttcgtgtgcctgaactgcggcttcgagacacacgcagccgagcaagccgccctgaacatcgccagatcctggctgttcctgcggagccaggagtacaagaaataccagacaaacaagacaaccggcaacaccgataagagagccttcgtcgagacctggcagtccttttaccggaagaagcttaaggaggtgtggaaacctgccgtgcggtctggcggatctggcggaggctcctccccaggacagcgtgaccttcgaggaggtggccgtgagcttcagcagggaggagtgggccctgctgaccgactggcagaagaacctgtacaaggacgtgatgagggacaactacgagatgctgaacagcctggacctggccgcccacaagcccgacatcatcctgaggatcgagaggggccaggagccctgcgtgggcaggctgcagaggagcaaggccagggagaggcccaaccacgtgttcggatctggctccggcagcggccccaagaaaaagagaaaagtctaagctgccttctgcggggcttgccttctggccatgcccttcttctctcccttgcacctgtacctcttggtctttgaataaagcctgagtaggaaggctagcaaaaaaaaaaaaaaaaaaaaaaaaaaaaaaaaaaaaaaaaaaaaaaaaaaaaaaaaaaaaaaaaaaaaaaaaaaaaaaaa

SEQ ID NO: 15993 - RNA, 9485 nt, synthetic construct
  source 1..9485: mol_type = other RNA
aggaaataagagagaaaagaagagtaagaagaaatataagagccaccatggcccctaagaagaagcgtaaagtgagccggatggaacgcctcgtctacgaggtgcggcagaagtgcagaaacatcgaggacatctgcatctcctgcggatctctgaacgtgaccctggagcacccactgttcatcggcggcatgtgccagaactgtaaaaactgttttctggagtgtgcctatcaatacgacgatgacggctaccagagctactgcaccatctgttgcggcggaagagaggtgctgatgtgtggaaataacaactgctgccggtgcttctgcgtggaatgcgtggacctgctggtgggccccggcgccgcccaggccgctattaaggaagatccttggaactgctacatgtgcggccacaagggcacatacggcctgctgagacggagagaggactggcctagcagactgcagatgttcttcgccaataaccacgaccaggagttcgacccccctaaggtgtaccctcccgtccccgccgagaagagaaagcccatccgggtcctgagcctgttcgatggcatcgccaccggtctgctggtgctgaaggacctgggcatccaggtggataggtacattgcctccgaggtgtgcgaggactccatcaccgtgggaatggtgcgtcatcagggcaagatcatgtacgtgggcgacgtgcggagcgtgacacagaagcatatccaggagtggggccctttcgacctggtgatcggcggcagcccttgcaatgacctgagcatcgtgaacccagcccggaagggcctgtacgagggaaccggcagactgttcttcgagttttacagactgctgcacgacgcccggcctaaggaaggcgacgaccggcccttcttttggctgttcgagaatgtggtggccatgggagtcagcgacaagcgggatattagccggttcctggagagcaaccccgtgatgatcgatgccaaggaagtgagcgccgcccaccgggccagatacttctggggcaatctgcctggcatgaacagacccctggccagcaccgtgaacgacaagctggagctgcaggagtgcctggagcacggccggatcgccaagttcagcaaggtgagaaccatcaccacccgaagcaacagcatcaaacaaggcaaggaccagcactttcctgtgttcatgaacgagaaggaggacatcctgtggtgtaccgagatggagagagtgttcgggttcccagtccactacacagatgtcagcaacatgtctagactggccagacagagactgctgggaagaagctggtccgtccctgtgatcagacacctgttcgcccctctgaaggagtacttcgcctgcgtgagcagcggcaacagcaacgccaacagccggggccccagcttctctagcggcctggtgccactgtccctgagagggagccacatgggccccatggagatctacaaaaccgtgagcgcctggaagcggcagcctgtgcgcgtgctgagcctgtttcggaatatcgataaagtcctgaaaagcctgggattcctggagagcggctctggctccggcggtggcaccctgaagtacgtggaggatgtgacaaacgtggtcagacgggatgtggagaagtggggccccttcgatctggtgtacggcagcacccaacccctgggcagctcttgtgaccggtgccctggctggtacatgtttcagttccaccggatcctgcagtacgccctgccgagacaggagtcccagcggccattcttttggattttcatggacaacttgctgctgaccgaggatgaccaggaaactaccactcggttcctgcagaccgaagccgtgaccctgcaggacgtgagaggccgggactaccagaacgccatgcgggtgtggtccaacatccctggactgaaaagcaagcacgcacctctgacccctaaagaagaggagtacctgcaggcccaggtgcggagcagaagcaagctggacgcccctaaggtggatctgctggtgaagaattgcctcctgcccctgagagagtacttcaagtatttcagccagaatagtctgcccctgggaggcagcggcggcggcgccctggtgacatttgaggacgtcgccgtgcggttcacccaggaggaatgggctctgctggatccttctcagaaaatcctgtaccgggacgtgatgagagagacataccggaatctgacctccgtgggcatcaactgggaatgttgggaccttgaagcctgcttcagaagcctgggaagaaacctgagagtgcaggtggtgaagagaaagtgcgagctgaccaacagcggcccctgcgccgagggcggcccaagcagcggcgcccctcctcccagcggcggcagcccagccggctccccaacctctaccgaggagggcacctctgagtccgccacccccgagagcggccctggcacctccaccgagcccagcgagggcagcgcacccggcagccctgccggcagccccacctccacagaggagggaaccagcaccgagcccagcgaaggcagcgccccaggcaccagcaccgagcctagtgagcaggagattaaacggatcaacaagatcagaagaagacttgtgaaagacagcaacaccaagaaggccggcaagacaggccccatgaaaaccctgctggttagagtgatgacacccgatctgagagagcggctggaaaacctgagaaagaagcctgaaaatatcccccagcccatcagcaatacatctagagccaacctgaataagctgctgaccgattacaccgaaatgaagaaggcgatcctgcatgtgtactgggaagagttccagaaggaccctgtgggcctgatgagccgggtggcccagcctgccagcaagaagatcgatcagaacaagctgaaacctgagatggacgagaagggcaacctgaccaccgccggctttgcctgctctcagtgtggccagcccctgttcgtgtacaagctggagcaggtgtctgagaagggcaaggcttacaccaactacttcggacggtgcaatgtggccgagcacgaaaagctgatcctgctggcccagctgaagcccgagaaggatagcgacgaagccgtgacatatagcctgggaaagtttgggcagagggccctggatttctacagcattcatgtgaccaaggagtccacccaccccgtgaagcccctggcccagatcgccggaaacagatacgcctccggacctgtgggaaaggccctgagcgacgcatgtatgggcacaatcgcctccttcctgtctaagtaccaggacatcatcatcgaacaccagaaggtggtgaagggcaaccagaagagactggagagcctgcgggagctggccggcaaggaaaacctggaataccctagcgtgaccctgccacctcagcctcacaccaaggagggcgttgatgcctacaacgaagtgatcgcccgggtgcgaatgtgggtgaacctgaacctgtggcagaagctgaagctaagcagagatgatgccaagcctctgctgagactgaagggattcccttcctttcctctggtcgagagacaggccaacgaagtggactggtgggacatggtgtgtaacgtgaagaagctgatcaacgagaaaaaggaggatggcaaggtgttttggcagaatctggctggctacaagagacaggaagccctgagaccatacctgagcagcgaggaagatcggaagaagggaaagaaattcgctcggtaccagctgggcgacctgctgctgcacctggaaaagaagcacggcgaggactggggaaaggtgtacgacgaggcctgggagcggattgacaagaaagtggaaggcctgagcaagcacatcaagctggaagaggaacggagaagcgaggacgcccagagcaaggccgccctgaccgactggctgcgggctaaggccagcttcgtgatcgagggcctgaaggaggccgacaaggacgagttctgcagatgcgagctgaagctgcagaagtggtacggggacctgcggggaaagcccttcgccatcgaagccgagaacagcatcctggacatcagcggcttcagcaagcagtacaactgtgccttcatctggcagaaggacggcgtgaagaagctgaacctgtacctgatcatcaactacttcaagggcggcaagctgcggttcaagaagatcaaacctgaagccttcgaagccaacagattctacaccgtgatcaacaaaaagagcggcgagatcgtgcccatggaggtgaacttcaacttcgacgaccccaacctgatcatcctgcctctggcctttggcaagagacagggcagagaattcatctggaacgacctgctgtccctggaaaccggcagcctgaagctggccaacggaagagtgatcgagaagacactgtacaacagaagaacccggcaggatgagcctgccctgttcgtggccctgaccttcgagcggcgggaggtcctggactcctccaatatcaaaccaatgaacctgatcggcgtggcaagaggcgaaaacatccccgccgtgatcgccctgaccgaccccgagggctgcccactgagccggtttaaggatagcctgggaaacccaacccacatcctgagaatcggcgagagctataaggagaagcagcggaccatccaggccaagaaggaggtggagcagcggagagccggcggctacagccggaagtacgccagcaaagccaagaatctggcagacgatatggtgagaaacaccgctagagatctgctgtactacgccgtgacccaggatgccatgctgatcttcgccaacctgagccggggcttcggccggcagggcaagcggaccttcatggccgagagacagtacacacggatggaggactggctgaccgccaagctggcctacgagggcctgagcaagacctacctgtccaagacactggcccagtacacctccaagacatgcagcaactgtgggtttaccatcaccagcgccgactacgacagggtgctggagaagctgaagaagacagcaacaggctggatgaccacaattaacggcaaggagctgaaggtggagggccagattacctactacaacagatacaagagacagaacgtagtcaaggacctgtccgtcgagctggatagactgagcgaagaatctgtgaacaacgacatctcctcctggacaaagggcagaagcggagaagctctgagcctcctgaagaaaagattctcccatagacccgtgcaggagaagttcgtgtgcctgaactgcggcttcgagacacacgcagccgagcaagccgccctgaacatcgccagatcctggctgttcctgcggagccaggagtacaagaaataccagacaaacaagacaaccggcaacaccgataagagagccttcgtcgagacctggcagtccttttaccggaagaagcttaaggaggtgtggaaacctgccgtgcggtctggcggatctggcggaggctccaggatgaagagcgtgaccttcgaggacgtggccgtgtacttcacccagaccgagtgggacagcctgagcaccgcccagagggccctgtacagggacgtgatgctggagaactacggcaacgtggccagcctgggcttccccctgctgaagcccgccgtgatcagccagctggagggcggcggcgagctggagggccccagccccctggccagcggcgccggcaccggcccccagggcctgtggggcggcccaagcagcggcgcccctcctcccagcggcggcagcccagccggctccccaacctctaccgaggagggcacctctgagtccgccacccccgagagcggccctggcacctccaccgagcccagcgagggcagcgcacccggcagccctgccggcagccccacctccacagaggagggaaccagcaccgagcccagcgaaggcagcgccccaggcaccagcaccgagcctagtgagcaggagattaaacggatcaacaagatcagaagaagacttgtgaaagacagcaacaccaagaaggccggcaagacaggccccatgaaaaccctgctggttagagtgatgacacccgatctgagagagcggctggaaaacctgagaaagaagcctgaaaatatcccccagcccatcagcaatacatctagagccaacctgaataagctgctgaccgattacaccgaaatgaagaaggcgatcctgcatgtgtactgggaagagttccagaaggaccctgtgggcctgatgagccgggtggcccagcctgccagcaagaagatcgatcagaacaagctgaaacctgagatggacgagaagggcaacctgaccaccgccggctttgcctgctctcagtgtggccagcccctgttcgtgtacaagctggagcaggtgtctgagaagggcaaggcttacaccaactacttcggacggtgcaatgtggccgagcacgaaaagctgatcctgctggcccagctgaagcccgagaaggatagcgacgaagccgtgacatatagcctgggaaagtttgggcagagggccctggatttctacagcattcatgtgaccaaggagtccacccaccccgtgaagcccctggcccagatcgccggaaacagatacgcctccggacctgtgggaaaggccctgagcgacgcatgtatgggcacaatcgcctccttcctgtctaagtaccaggacatcatcatcgaacaccagaaggtggtgaagggcaaccagaagagactggagagcctgcgggagctggccggcaaggaaaacctggaataccctagcgtgaccctgccacctcagcctcacaccaaggagggcgttgatgcctacaacgaagtgatcgcccgggtgcgaatgtgggtgaacctgaacctgtggcagaagctgaagctaagcagagatgatgccaagcctctgctgagactgaagggattcccttcctttcctctggtcgagagacaggccaacgaagtggactggtgggacatggtgtgtaacgtgaagaagctgatcaacgagaaaaaggaggatggcaaggtgttttggcagaatctggctggctacaagagacaggaagccctgagaccatacctgagcagcgaggaagatcggaagaagggaaagaaattcgctcggtaccagctgggcgacctgctgctgcacctggaaaagaagcacggcgaggactggggaaaggtgtacgacgaggcctgggagcggattgacaagaaagtggaaggcctgagcaagcacatcaagctggaagaggaacggagaagcgaggacgcccagagcaaggccgccctgaccgactggctgcgggctaaggccagcttcgtgatcgagggcctgaaggaggccgacaaggacgagttctgcagatgcgagctgaagctgcagaagtggtacggggacctgcggggaaagcccttcgccatcgaagccgagaacagcatcctggacatcagcggcttcagcaagcagtacaactgtgccttcatctggcagaaggacggcgtgaagaagctgaacctgtacctgatcatcaactacttcaagggcggcaagctgcggttcaagaagatcaaacctgaagccttcgaagccaacagattctacaccgtgatcaacaaaaagagcggcgagatcgtgcccatggaggtgaacttcaacttcgacgaccccaacctgatcatcctgcctctggcctttggcaagagacagggcagagaattcatctggaacgacctgctgtccctggaaaccggcagcctgaagctggccaacggaagagtgatcgagaagacactgtacaacagaagaacccggcaggatgagcctgccctgttcgtggccctgaccttcgagcggcgggaggtcctggactcctccaatatcaaaccaatgaacctgatcggcgtggcaagaggcgaaaacatccccgccgtgatcgccctgaccgaccccgagggctgcccactgagccggtttaaggatagcctgggaaacccaacccacatcctgagaatcggcgagagctataaggagaagcagcggaccatccaggccaagaaggaggtggagcagcggagagccggcggctacagccggaagtacgccagcaaagccaagaatctggcagacgatatggtgagaaacaccgctagagatctgctgtactacgccgtgacccaggatgccatgctgatcttcgccaacctgagccggggcttcggccggcagggcaagcggaccttcatggccgagagacagtacacacggatggaggactggctgaccgccaagctggcctacgagggcctgagcaagacctacctgtccaagacactggcccagtacacctccaagacatgcagcaactgtgggtttaccatcaccagcgccgactacgacagggtgctggagaagctgaagaagacagcaacaggctggatgaccacaattaacggcaaggagctgaaggtggagggccagattacctactacaacagatacaagagacagaacgtagtcaaggacctgtccgtcgagctggatagactgagcgaagaatctgtgaacaacgacatctcctcctggacaaagggcagaagcggagaagctctgagcctcctgaagaaaagattctcccatagacccgtgcaggagaagttcgtgtgcctgaactgcggcttcgagacacacgcagccgagcaagccgccctgaacatcgccagatcctggctgttcctgcggagccaggagtacaagaaataccagacaaacaagacaaccggcaacaccgataagagagccttcgtcgagacctggcagtccttttaccggaagaagcttaaggaggtgtggaaacctgccgtgcggtctggcggatctggcggaggctcctaggatgaagagcgtgaccttcgaggacgtggccgtgtacttcacccagaccgagtgggacagcctgagcaccgcccagagggccctgtacagggacgtgatgctggagaactacggcaacgtggccagcctgggcttccccctgctgaagcccgccgtgatcagccagctggagggcggcggcgagctggagggccccagccccctggccagcggcgccggcaccggcccccagggcctgtggggatctggctccggcagcggccccaagaaaaagagaaaagtctaagctgccttctgcggggcttgccttctggccatgcccttcttctctcccttgcacctgtacctcttggtctttgaataaagcctgagtaggaaggctagcaaaaaaaaaaaaaaaaaaaaaaaaaaaaaaaaaaaaaaaaaaaaaaaaaaaaaaaaaaaaaaaaaaaaaaaaaaaaaaaa

SEQ ID NO: 15994 - RNA, 9485 nt, synthetic construct
  source 1..9485: mol_type = other RNA
aggaaataagagagaaaagaagagtaagaagaaatataagagccaccatggcccctaagaagaagcgtaaagtgagccggatggaacgcctcgtctacgaggtgcggcagaagtgcagaaacatcgaggacatctgcatctcctgcggatctctgaacgtgaccctggagcacccactgttcatcggcggcatgtgccagaactgtaaaaactgttttctggagtgtgcctatcaatacgacgatgacggctaccagagctactgcaccatctgttgcggcggaagagaggtgctgatgtgtggaaataacaactgctgccggtgcttctgcgtggaatgcgtggacctgctggtgggccccggcgccgcccaggccgctattaaggaagatccttggaactgctacatgtgcggccacaagggcacatacggcctgctgagacggagagaggactggcctagcagactgcagatgttcttcgccaataaccacgaccaggagttcgacccccctaaggtgtaccctcccgtccccgccgagaagagaaagcccatccgggtcctgagcctgttcgatggcatcgccaccggtctgctggtgctgaaggacctgggcatccaggtggataggtacattgcctccgaggtgtgcgaggactccatcaccgtgggaatggtgcgtcatcagggcaagatcatgtacgtgggcgacgtgcggagcgtgacacagaagcatatccaggagtggggccctttcgacctggtgatcggcggcagcccttgcaatgacctgagcatcgtgaacccagcccggaagggcctgtacgagggaaccggcagactgttcttcgagttttacagactgctgcacgacgcccggcctaaggaaggcgacgaccggcccttcttttggctgttcgagaatgtggtggccatgggagtcagcgacaagcgggatattagccggttcctggagagcaaccccgtgatgatcgatgccaaggaagtgagcgccgcccaccgggccagatacttctggggcaatctgcctggcatgaacagacccctggccagcaccgtgaacgacaagctggagctgcaggagtgcctggagcacggccggatcgccaagttcagcaaggtgagaaccatcaccacccgaagcaacagcatcaaacaaggcaaggaccagcactttcctgtgttcatgaacgagaaggaggacatcctgtggtgtaccgagatggagagagtgttcgggttcccagtccactacacagatgtcagcaacatgtctagactggccagacagagactgctgggaagaagctggtccgtccctgtgatcagacacctgttcgcccctctgaaggagtacttcgcctgcgtgagcagcggcaacagcaacgccaacagccggggccccagcttctctagcggcctggtgccactgtccctgagagggagccacatgggccccatggagatctacaaaaccgtgagcgcctggaagcggcagcctgtgcgcgtgctgagcctgtttcggaatatcgataaagtcctgaaaagcctgggattcctggagagcggctctggctccggcggtggcaccctgaagtacgtggaggatgtgacaaacgtggtcagacgggatgtggagaagtggggccccttcgatctggtgtacggcagcacccaacccctgggcagctcttgtgaccggtgccctggctggtacatgtttcagttccaccggatcctgcagtacgccctgccgagacaggagtcccagcggccattcttttggattttcatggacaacttgctgctgaccgaggatgaccaggaaactaccactcggttcctgcagaccgaagccgtgaccctgcaggacgtgagaggccgggactaccagaacgccatgcgggtgtggtccaacatccctggactgaaaagcaagcacgcacctctgacccctaaagaagaggagtacctgcaggcccaggtgcggagcagaagcaagctggacgcccctaaggtggatctgctggtgaagaattgcctcctgcccctgagagagtacttcaagtatttcagccagaatagtctgcccctgggaggcagcggcggcggcgccctggtgacatttgaggacgtcgccgtgcggttcacccaggaggaatgggctctgctggatccttctcagaaaatcctgtaccgggacgtgatgagagagacataccggaatctgacctccgtgggcatcaactgggaatgttgggaccttgaagcctgcttcagaagcctgggaagaaacctgagagtgcaggtggtgaagagaaagtgcgagctgaccaacagcggcccctgcgccgagggcggcccaagcagcggcgcccctcctcccagcggcggcagcccagccggctccccaacctctaccgaggagggcacctctgagtccgccacccccgagagcggccctggcacctccaccgagcccagcgagggcagcgcacccggcagccctgccggcagccccacctccacagaggagggaaccagcaccgagcccagcgaaggcagcgccccaggcaccagcaccgagcctagtgagcaggagattaaacggatcaacaagatcagaagaagacttgtgaaagacagcaacaccaagaaggccggcaagacaggccccatgaaaaccctgctggttagagtgatgacacccgatctgagagagcggctggaaaacctgagaaagaagcctgaaaatatcccccagcccatcagcaatacatctagagccaacctgaataagctgctgaccgattacaccgaaatgaagaaggcgatcctgcatgtgtactgggaagagttccagaaggaccctgtgggcctgatgagccgggtggcccagcctgccagcaagaagatcgatcagaacaagctgaaacctgagatggacgagaagggcaacctgaccaccgccggctttgcctgctctcagtgtggccagcccctgttcgtgtacaagctggagcaggtgtctgagaagggcaaggcttacaccaactacttcggacggtgcaatgtggccgagcacgaaaagctgatcctgctggcccagctgaagcccgagaaggatagcgacgaagccgtgacatatagcctgggaaagtttgggcagagggccctggatttctacagcattcatgtgaccaaggagtccacccaccccgtgaagcccctggcccagatcgccggaaacagatacgcctccggacctgtgggaaaggccctgagcgacgcatgtatgggcacaatcgcctccttcctgtctaagtaccaggacatcatcatcgaacaccagaaggtggtgaagggcaaccagaagagactggagagcctgcgggagctggccggcaaggaaaacctggaataccctagcgtgaccctgccacctcagcctcacaccaaggagggcgttgatgcctacaacgaagtgatcgcccgggtgcgaatgtgggtgaacctgaacctgtggcagaagctgaagctaagcagagatgatgccaagcctctgctgagactgaagggattcccttcctttcctctggtcgagagacaggccaacgaagtggactggtgggacatggtgtgtaacgtgaagaagctgatcaacgagaaaaaggaggatggcaaggtgttttggcagaatctggctggctacaagagacaggaagccctgagaccatacctgagcagcgaggaagatcggaagaagggaaagaaattcgctcggtaccagctgggcgacctgctgctgcacctggaaaagaagcacggcgaggactggggaaaggtgtacgacgaggcctgggagcggattgacaagaaagtggaaggcctgagcaagcacatcaagctggaagaggaacggagaagcgaggacgcccagagcaaggccgccctgaccgactggctgcgggctaaggccagcttcgtgatcgagggcctgaaggaggccgacaaggacgagttctgcagatgcgagctgaagctgcagaagtggtacggggacctgcggggaaagcccttcgccatcgaagccgagaacagcatcctggacatcagcggcttcagcaagcagtacaactgtgccttcatctggcagaaggacggcgtgaagaagctgaacctgtacctgatcatcaactacttcaagggcggcaagctgcggttcaagaagatcaaacctgaagccttcgaagccaacagattctacaccgtgatcaacaaaaagagcggcgagatcgtgcccatggaggtgaacttcaacttcgacgaccccaacctgatcatcctgcctctggcctttggcaagagacagggcagagaattcatctggaacgacctgctgtccctggaaaccggcagcctgaagctggccaacggaagagtgatcgagaagacactgtacaacagaagaacccggcaggatgagcctgccctgttcgtggccctgaccttcgagcggcgggaggtcctggactcctccaatatcaaaccaatgaacctgatcggcgtggcaagaggcgaaaacatccccgccgtgatcgccctgaccgaccccgagggctgcccactgagccggtttaaggatagcctgggaaacccaacccacatcctgagaatcggcgagagctataaggagaagcagcggaccatccaggccaagaaggaggtggagcagcggagagccggcggctacagccggaagtacgccagcaaagccaagaatctggcagacgatatggtgagaaacaccgctagagatctgctgtactacgccgtgacccaggatgccatgctgatcttcgccaacctgagccggggcttcggccggcagggcaagcggaccttcatggccgagagacagtacacacggatggaggactggctgaccgccaagctggcctacgagggcctgagcaagacctacctgtccaagacactggcccagtacacctccaagacatgcagcaactgtgggtttaccatcaccagcgccgactacgacagggtgctggagaagctgaagaagacagcaacaggctggatgaccacaattaacggcaaggagctgaaggtggagggccagattacctactacaacagatacaagagacagaacgtagtcaaggacctgtccgtcgagctggatagactgagcgaagaatctgtgaacaacgacatctcctcctggacaaagggcagaagcggagaagctctgagcctcctgaagaaaagattctcccatagacccgtgcaggagaagttcgtgtgcctgaactgcggcttcgagacacacgcagccgagcaagccgccctgaacatcgccagatcctggctgttcctgcggagccaggagtacaagaaataccagacaaacaagacaaccggcaacaccgataagagagccttcgtcgagacctggcagtccttttaccggaagaagcttaaggaggtgtggaaacctgccgtgcggtctggcggatctggcggaggctccatccagggcagcctgaccttcaaggacgtggccgtggacttcacccaggaggagtggtgcctgctggaccacagccagaaggagctgtacctggaggtgatgctggagaacgtgcagaacctgctgagcgtgggcctgcccgtgcccagggagtactgcaccagctacttccagcaggagaaggccaggtggctgctggagcagaagtgccccaggagcagcagccccgaggccgagaccaacggcggcccaagcagcggcgcccctcctcccagcggcggcagcccagccggctccccaacctctaccgaggagggcacctctgagtccgccacccccgagagcggccctggcacctccaccgagcccagcgagggcagcgcacccggcagccctgccggcagccccacctccacagaggagggaaccagcaccgagcccagcgaaggcagcgccccaggcaccagcaccgagcctagtgagcaggagattaaacggatcaacaagatcagaagaagacttgtgaaagacagcaacaccaagaaggccggcaagacaggccccatgaaaaccctgctggttagagtgatgacacccgatctgagagagcggctggaaaacctgagaaagaagcctgaaaatatcccccagcccatcagcaatacatctagagccaacctgaataagctgctgaccgattacaccgaaatgaagaaggcgatcctgcatgtgtactgggaagagttccagaaggaccctgtgggcctgatgagccgggtggcccagcctgccagcaagaagatcgatcagaacaagctgaaacctgagatggacgagaagggcaacctgaccaccgccggctttgcctgctctcagtgtggccagcccctgttcgtgtacaagctggagcaggtgtctgagaagggcaaggcttacaccaactacttcggacggtgcaatgtggccgagcacgaaaagctgatcctgctggcccagctgaagcccgagaaggatagcgacgaagccgtgacatatagcctgggaaagtttgggcagagggccctggatttctacagcattcatgtgaccaaggagtccacccaccccgtgaagcccctggcccagatcgccggaaacagatacgcctccggacctgtgggaaaggccctgagcgacgcatgtatgggcacaatcgcctccttcctgtctaagtaccaggacatcatcatcgaacaccagaaggtggtgaagggcaaccagaagagactggagagcctgcgggagctggccggcaaggaaaacctggaataccctagcgtgaccctgccacctcagcctcacaccaaggagggcgttgatgcctacaacgaagtgatcgcccgggtgcgaatgtgggtgaacctgaacctgtggcagaagctgaagctaagcagagatgatgccaagcctctgctgagactgaagggattcccttcctttcctctggtcgagagacaggccaacgaagtggactggtgggacatggtgtgtaacgtgaagaagctgatcaacgagaaaaaggaggatggcaaggtgttttggcagaatctggctggctacaagagacaggaagccctgagaccatacctgagcagcgaggaagatcggaagaagggaaagaaattcgctcggtaccagctgggcgacctgctgctgcacctggaaaagaagcacggcgaggactggggaaaggtgtacgacgaggcctgggagcggattgacaagaaagtggaaggcctgagcaagcacatcaagctggaagaggaacggagaagcgaggacgcccagagcaaggccgccctgaccgactggctgcgggctaaggccagcttcgtgatcgagggcctgaaggaggccgacaaggacgagttctgcagatgcgagctgaagctgcagaagtggtacggggacctgcggggaaagcccttcgccatcgaagccgagaacagcatcctggacatcagcggcttcagcaagcagtacaactgtgccttcatctggcagaaggacggcgtgaagaagctgaacctgtacctgatcatcaactacttcaagggcggcaagctgcggttcaagaagatcaaacctgaagccttcgaagccaacagattctacaccgtgatcaacaaaaagagcggcgagatcgtgcccatggaggtgaacttcaacttcgacgaccccaacctgatcatcctgcctctggcctttggcaagagacagggcagagaattcatctggaacgacctgctgtccctggaaaccggcagcctgaagctggccaacggaagagtgatcgagaagacactgtacaacagaagaacccggcaggatgagcctgccctgttcgtggccctgaccttcgagcggcgggaggtcctggactcctccaatatcaaaccaatgaacctgatcggcgtggcaagaggcgaaaacatccccgccgtgatcgccctgaccgaccccgagggctgcccactgagccggtttaaggatagcctgggaaacccaacccacatcctgagaatcggcgagagctataaggagaagcagcggaccatccaggccaagaaggaggtggagcagcggagagccggcggctacagccggaagtacgccagcaaagccaagaatctggcagacgatatggtgagaaacaccgctagagatctgctgtactacgccgtgacccaggatgccatgctgatcttcgccaacctgagccggggcttcggccggcagggcaagcggaccttcatggccgagagacagtacacacggatggaggactggctgaccgccaagctggcctacgagggcctgagcaagacctacctgtccaagacactggcccagtacacctccaagacatgcagcaactgtgggtttaccatcaccagcgccgactacgacagggtgctggagaagctgaagaagacagcaacaggctggatgaccacaattaacggcaaggagctgaaggtggagggccagattacctactacaacagatacaagagacagaacgtagtcaaggacctgtccgtcgagctggatagactgagcgaagaatctgtgaacaacgacatctcctcctggacaaagggcagaagcggagaagctctgagcctcctgaagaaaagattctcccatagacccgtgcaggagaagttcgtgtgcctgaactgcggcttcgagacacacgcagccgagcaagccgccctgaacatcgccagatcctggctgttcctgcggagccaggagtacaagaaataccagacaaacaagacaaccggcaacaccgataagagagccttcgtcgagacctggcagtccttttaccggaagaagcttaaggaggtgtggaaacctgccgtgcggtctggcggatctggcggaggctcctatccagggcagcctgaccttcaaggacgtggccgtggacttcacccaggaggagtggtgcctgctggaccacagccagaaggagctgtacctggaggtgatgctggagaacgtgcagaacctgctgagcgtgggcctgcccgtgcccagggagtactgcaccagctacttccagcaggagaaggccaggtggctgctggagcagaagtgccccaggagcagcagccccgaggccgagaccaacggatctggctccggcagcggccccaagaaaaagagaaaagtctaagctgccttctgcggggcttgccttctggccatgcccttcttctctcccttgcacctgtacctcttggtctttgaataaagcctgagtaggaaggctagcaaaaaaaaaaaaaaaaaaaaaaaaaaaaaaaaaaaaaaaaaaaaaaaaaaaaaaaaaaaaaaaaaaaaaaaaaaaaaaaa

SEQ ID NO: 15995 - RNA, 9485 nt, synthetic construct
  source 1..9485: mol_type = other RNA
aggaaataagagagaaaagaagagtaagaagaaatataagagccaccatggcccctaagaagaagcgtaaagtgagccggatggaacgcctcgtctacgaggtgcggcagaagtgcagaaacatcgaggacatctgcatctcctgcggatctctgaacgtgaccctggagcacccactgttcatcggcggcatgtgccagaactgtaaaaactgttttctggagtgtgcctatcaatacgacgatgacggctaccagagctactgcaccatctgttgcggcggaagagaggtgctgatgtgtggaaataacaactgctgccggtgcttctgcgtggaatgcgtggacctgctggtgggccccggcgccgcccaggccgctattaaggaagatccttggaactgctacatgtgcggccacaagggcacatacggcctgctgagacggagagaggactggcctagcagactgcagatgttcttcgccaataaccacgaccaggagttcgacccccctaaggtgtaccctcccgtccccgccgagaagagaaagcccatccgggtcctgagcctgttcgatggcatcgccaccggtctgctggtgctgaaggacctgggcatccaggtggataggtacattgcctccgaggtgtgcgaggactccatcaccgtgggaatggtgcgtcatcagggcaagatcatgtacgtgggcgacgtgcggagcgtgacacagaagcatatccaggagtggggccctttcgacctggtgatcggcggcagcccttgcaatgacctgagcatcgtgaacccagcccggaagggcctgtacgagggaaccggcagactgttcttcgagttttacagactgctgcacgacgcccggcctaaggaaggcgacgaccggcccttcttttggctgttcgagaatgtggtggccatgggagtcagcgacaagcgggatattagccggttcctggagagcaaccccgtgatgatcgatgccaaggaagtgagcgccgcccaccgggccagatacttctggggcaatctgcctggcatgaacagacccctggccagcaccgtgaacgacaagctggagctgcaggagtgcctggagcacggccggatcgccaagttcagcaaggtgagaaccatcaccacccgaagcaacagcatcaaacaaggcaaggaccagcactttcctgtgttcatgaacgagaaggaggacatcctgtggtgtaccgagatggagagagtgttcgggttcccagtccactacacagatgtcagcaacatgtctagactggccagacagagactgctgggaagaagctggtccgtccctgtgatcagacacctgttcgcccctctgaaggagtacttcgcctgcgtgagcagcggcaacagcaacgccaacagccggggccccagcttctctagcggcctggtgccactgtccctgagagggagccacatgggccccatggagatctacaaaaccgtgagcgcctggaagcggcagcctgtgcgcgtgctgagcctgtttcggaatatcgataaagtcctgaaaagcctgggattcctggagagcggctctggctccggcggtggcaccctgaagtacgtggaggatgtgacaaacgtggtcagacgggatgtggagaagtggggccccttcgatctggtgtacggcagcacccaacccctgggcagctcttgtgaccggtgccctggctggtacatgtttcagttccaccggatcctgcagtacgccctgccgagacaggagtcccagcggccattcttttggattttcatggacaacttgctgctgaccgaggatgaccaggaaactaccactcggttcctgcagaccgaagccgtgaccctgcaggacgtgagaggccgggactaccagaacgccatgcgggtgtggtccaacatccctggactgaaaagcaagcacgcacctctgacccctaaagaagaggagtacctgcaggcccaggtgcggagcagaagcaagctggacgcccctaaggtggatctgctggtgaagaattgcctcctgcccctgagagagtacttcaagtatttcagccagaatagtctgcccctgggaggcagcggcggcggcgccctggtgacatttgaggacgtcgccgtgcggttcacccaggaggaatgggctctgctggatccttctcagaaaatcctgtaccgggacgtgatgagagagacataccggaatctgacctccgtgggcatcaactgggaatgttgggaccttgaagcctgcttcagaagcctgggaagaaacctgagagtgcaggtggtgaagagaaagtgcgagctgaccaacagcggcccctgcgccgagggcggcccaagcagcggcgcccctcctcccagcggcggcagcccagccggctccccaacctctaccgaggagggcacctctgagtccgccacccccgagagcggccctggcacctccaccgagcccagcgagggcagcgcacccggcagccctgccggcagccccacctccacagaggagggaaccagcaccgagcccagcgaaggcagcgccccaggcaccagcaccgagcctagtgagcaggagattaaacggatcaacaagatcagaagaagacttgtgaaagacagcaacaccaagaaggccggcaagacaggccccatgaaaaccctgctggttagagtgatgacacccgatctgagagagcggctggaaaacctgagaaagaagcctgaaaatatcccccagcccatcagcaatacatctagagccaacctgaataagctgctgaccgattacaccgaaatgaagaaggcgatcctgcatgtgtactgggaagagttccagaaggaccctgtgggcctgatgagccgggtggcccagcctgccagcaagaagatcgatcagaacaagctgaaacctgagatggacgagaagggcaacctgaccaccgccggctttgcctgctctcagtgtggccagcccctgttcgtgtacaagctggagcaggtgtctgagaagggcaaggcttacaccaactacttcggacggtgcaatgtggccgagcacgaaaagctgatcctgctggcccagctgaagcccgagaaggatagcgacgaagccgtgacatatagcctgggaaagtttgggcagagggccctggatttctacagcattcatgtgaccaaggagtccacccaccccgtgaagcccctggcccagatcgccggaaacagatacgcctccggacctgtgggaaaggccctgagcgacgcatgtatgggcacaatcgcctccttcctgtctaagtaccaggacatcatcatcgaacaccagaaggtggtgaagggcaaccagaagagactggagagcctgcgggagctggccggcaaggaaaacctggaataccctagcgtgaccctgccacctcagcctcacaccaaggagggcgttgatgcctacaacgaagtgatcgcccgggtgcgaatgtgggtgaacctgaacctgtggcagaagctgaagctaagcagagatgatgccaagcctctgctgagactgaagggattcccttcctttcctctggtcgagagacaggccaacgaagtggactggtgggacatggtgtgtaacgtgaagaagctgatcaacgagaaaaaggaggatggcaaggtgttttggcagaatctggctggctacaagagacaggaagccctgagaccatacctgagcagcgaggaagatcggaagaagggaaagaaattcgctcggtaccagctgggcgacctgctgctgcacctggaaaagaagcacggcgaggactggggaaaggtgtacgacgaggcctgggagcggattgacaagaaagtggaaggcctgagcaagcacatcaagctggaagaggaacggagaagcgaggacgcccagagcaaggccgccctgaccgactggctgcgggctaaggccagcttcgtgatcgagggcctgaaggaggccgacaaggacgagttctgcagatgcgagctgaagctgcagaagtggtacggggacctgcggggaaagcccttcgccatcgaagccgagaacagcatcctggacatcagcggcttcagcaagcagtacaactgtgccttcatctggcagaaggacggcgtgaagaagctgaacctgtacctgatcatcaactacttcaagggcggcaagctgcggttcaagaagatcaaacctgaagccttcgaagccaacagattctacaccgtgatcaacaaaaagagcggcgagatcgtgcccatggaggtgaacttcaacttcgacgaccccaacctgatcatcctgcctctggcctttggcaagagacagggcagagaattcatctggaacgacctgctgtccctggaaaccggcagcctgaagctggccaacggaagagtgatcgagaagacactgtacaacagaagaacccggcaggatgagcctgccctgttcgtggccctgaccttcgagcggcgggaggtcctggactcctccaatatcaaaccaatgaacctgatcggcgtggcaagaggcgaaaacatccccgccgtgatcgccctgaccgaccccgagggctgcccactgagccggtttaaggatagcctgggaaacccaacccacatcctgagaatcggcgagagctataaggagaagcagcggaccatccaggccaagaaggaggtggagcagcggagagccggcggctacagccggaagtacgccagcaaagccaagaatctggcagacgatatggtgagaaacaccgctagagatctgctgtactacgccgtgacccaggatgccatgctgatcttcgccaacctgagccggggcttcggccggcagggcaagcggaccttcatggccgagagacagtacacacggatggaggactggctgaccgccaagctggcctacgagggcctgagcaagacctacctgtccaagacactggcccagtacacctccaagacatgcagcaactgtgggtttaccatcaccagcgccgactacgacagggtgctggagaagctgaagaagacagcaacaggctggatgaccacaattaacggcaaggagctgaaggtggagggccagattacctactacaacagatacaagagacagaacgtagtcaaggacctgtccgtcgagctggatagactgagcgaagaatctgtgaacaacgacatctcctcctggacaaagggcagaagcggagaagctctgagcctcctgaagaaaagattctcccatagacccgtgcaggagaagttcgtgtgcctgaactgcggcttcgagacacacgcagccgagcaagccgccctgaacatcgccagatcctggctgttcctgcggagccaggagtacaagaaataccagacaaacaagacaaccggcaacaccgataagagagccttcgtcgagacctggcagtccttttaccggaagaagcttaaggaggtgtggaaacctgccgtgcggtctggcggatctggcggaggctccggcaccgtggtgttcagcgacgtgagcgtggacttcagccaggaggagtgggagtgcctggaccccgtgcagagggacctgtacagggaggtgatgctggagaactacagcaacctggtgagcgtgggcgccggcccctacatccccaagccccaggtgatcagcctgctggagcagggcaaggagccctggatggtgggcagggagctgaccaggggcctgtgcagcgacctggagagcatgggcggcccaagcagcggcgcccctcctcccagcggcggcagcccagccggctccccaacctctaccgaggagggcacctctgagtccgccacccccgagagcggccctggcacctccaccgagcccagcgagggcagcgcacccggcagccctgccggcagccccacctccacagaggagggaaccagcaccgagcccagcgaaggcagcgccccaggcaccagcaccgagcctagtgagcaggagattaaacggatcaacaagatcagaagaagacttgtgaaagacagcaacaccaagaaggccggcaagacaggccccatgaaaaccctgctggttagagtgatgacacccgatctgagagagcggctggaaaacctgagaaagaagcctgaaaatatcccccagcccatcagcaatacatctagagccaacctgaataagctgctgaccgattacaccgaaatgaagaaggcgatcctgcatgtgtactgggaagagttccagaaggaccctgtgggcctgatgagccgggtggcccagcctgccagcaagaagatcgatcagaacaagctgaaacctgagatggacgagaagggcaacctgaccaccgccggctttgcctgctctcagtgtggccagcccctgttcgtgtacaagctggagcaggtgtctgagaagggcaaggcttacaccaactacttcggacggtgcaatgtggccgagcacgaaaagctgatcctgctggcccagctgaagcccgagaaggatagcgacgaagccgtgacatatagcctgggaaagtttgggcagagggccctggatttctacagcattcatgtgaccaaggagtccacccaccccgtgaagcccctggcccagatcgccggaaacagatacgcctccggacctgtgggaaaggccctgagcgacgcatgtatgggcacaatcgcctccttcctgtctaagtaccaggacatcatcatcgaacaccagaaggtggtgaagggcaaccagaagagactggagagcctgcgggagctggccggcaaggaaaacctggaataccctagcgtgaccctgccacctcagcctcacaccaaggagggcgttgatgcctacaacgaagtgatcgcccgggtgcgaatgtgggtgaacctgaacctgtggcagaagctgaagctaagcagagatgatgccaagcctctgctgagactgaagggattcccttcctttcctctggtcgagagacaggccaacgaagtggactggtgggacatggtgtgtaacgtgaagaagctgatcaacgagaaaaaggaggatggcaaggtgttttggcagaatctggctggctacaagagacaggaagccctgagaccatacctgagcagcgaggaagatcggaagaagggaaagaaattcgctcggtaccagctgggcgacctgctgctgcacctggaaaagaagcacggcgaggactggggaaaggtgtacgacgaggcctgggagcggattgacaagaaagtggaaggcctgagcaagcacatcaagctggaagaggaacggagaagcgaggacgcccagagcaaggccgccctgaccgactggctgcgggctaaggccagcttcgtgatcgagggcctgaaggaggccgacaaggacgagttctgcagatgcgagctgaagctgcagaagtggtacggggacctgcggggaaagcccttcgccatcgaagccgagaacagcatcctggacatcagcggcttcagcaagcagtacaactgtgccttcatctggcagaaggacggcgtgaagaagctgaacctgtacctgatcatcaactacttcaagggcggcaagctgcggttcaagaagatcaaacctgaagccttcgaagccaacagattctacaccgtgatcaacaaaaagagcggcgagatcgtgcccatggaggtgaacttcaacttcgacgaccccaacctgatcatcctgcctctggcctttggcaagagacagggcagagaattcatctggaacgacctgctgtccctggaaaccggcagcctgaagctggccaacggaagagtgatcgagaagacactgtacaacagaagaacccggcaggatgagcctgccctgttcgtggccctgaccttcgagcggcgggaggtcctggactcctccaatatcaaaccaatgaacctgatcggcgtggcaagaggcgaaaacatccccgccgtgatcgccctgaccgaccccgagggctgcccactgagccggtttaaggatagcctgggaaacccaacccacatcctgagaatcggcgagagctataaggagaagcagcggaccatccaggccaagaaggaggtggagcagcggagagccggcggctacagccggaagtacgccagcaaagccaagaatctggcagacgatatggtgagaaacaccgctagagatctgctgtactacgccgtgacccaggatgccatgctgatcttcgccaacctgagccggggcttcggccggcagggcaagcggaccttcatggccgagagacagtacacacggatggaggactggctgaccgccaagctggcctacgagggcctgagcaagacctacctgtccaagacactggcccagtacacctccaagacatgcagcaactgtgggtttaccatcaccagcgccgactacgacagggtgctggagaagctgaagaagacagcaacaggctggatgaccacaattaacggcaaggagctgaaggtggagggccagattacctactacaacagatacaagagacagaacgtagtcaaggacctgtccgtcgagctggatagactgagcgaagaatctgtgaacaacgacatctcctcctggacaaagggcagaagcggagaagctctgagcctcctgaagaaaagattctcccatagacccgtgcaggagaagttcgtgtgcctgaactgcggcttcgagacacacgcagccgagcaagccgccctgaacatcgccagatcctggctgttcctgcggagccaggagtacaagaaataccagacaaacaagacaaccggcaacaccgataagagagccttcgtcgagacctggcagtccttttaccggaagaagcttaaggaggtgtggaaacctgccgtgcggtctggcggatctggcggaggctcctggcaccgtggtgttcagcgacgtgagcgtggacttcagccaggaggagtgggagtgcctggaccccgtgcagagggacctgtacagggaggtgatgctggagaactacagcaacctggtgagcgtgggcgccggcccctacatccccaagccccaggtgatcagcctgctggagcagggcaaggagccctggatggtgggcagggagctgaccaggggcctgtgcagcgacctggagagcatgggatctggctccggcagcggccccaagaaaaagagaaaagtctaagctgccttctgcggggcttgccttctggccatgcccttcttctctcccttgcacctgtacctcttggtctttgaataaagcctgagtaggaaggctagcaaaaaaaaaaaaaaaaaaaaaaaaaaaaaaaaaaaaaaaaaaaaaaaaaaaaaaaaaaaaaaaaaaaaaaaaaaaaaaaa

SEQ ID NO: 15996 - RNA, 9485 nt, synthetic construct
  source 1..9485: mol_type = other RNA
aggaaataagagagaaaagaagagtaagaagaaatataagagccaccatggcccctaagaagaagcgtaaagtgagccggatggaacgcctcgtctacgaggtgcggcagaagtgcagaaacatcgaggacatctgcatctcctgcggatctctgaacgtgaccctggagcacccactgttcatcggcggcatgtgccagaactgtaaaaactgttttctggagtgtgcctatcaatacgacgatgacggctaccagagctactgcaccatctgttgcggcggaagagaggtgctgatgtgtggaaataacaactgctgccggtgcttctgcgtggaatgcgtggacctgctggtgggccccggcgccgcccaggccgctattaaggaagatccttggaactgctacatgtgcggccacaagggcacatacggcctgctgagacggagagaggactggcctagcagactgcagatgttcttcgccaataaccacgaccaggagttcgacccccctaaggtgtaccctcccgtccccgccgagaagagaaagcccatccgggtcctgagcctgttcgatggcatcgccaccggtctgctggtgctgaaggacctgggcatccaggtggataggtacattgcctccgaggtgtgcgaggactccatcaccgtgggaatggtgcgtcatcagggcaagatcatgtacgtgggcgacgtgcggagcgtgacacagaagcatatccaggagtggggccctttcgacctggtgatcggcggcagcccttgcaatgacctgagcatcgtgaacccagcccggaagggcctgtacgagggaaccggcagactgttcttcgagttttacagactgctgcacgacgcccggcctaaggaaggcgacgaccggcccttcttttggctgttcgagaatgtggtggccatgggagtcagcgacaagcgggatattagccggttcctggagagcaaccccgtgatgatcgatgccaaggaagtgagcgccgcccaccgggccagatacttctggggcaatctgcctggcatgaacagacccctggccagcaccgtgaacgacaagctggagctgcaggagtgcctggagcacggccggatcgccaagttcagcaaggtgagaaccatcaccacccgaagcaacagcatcaaacaaggcaaggaccagcactttcctgtgttcatgaacgagaaggaggacatcctgtggtgtaccgagatggagagagtgttcgggttcccagtccactacacagatgtcagcaacatgtctagactggccagacagagactgctgggaagaagctggtccgtccctgtgatcagacacctgttcgcccctctgaaggagtacttcgcctgcgtgagcagcggcaacagcaacgccaacagccggggccccagcttctctagcggcctggtgccactgtccctgagagggagccacatgggccccatggagatctacaaaaccgtgagcgcctggaagcggcagcctgtgcgcgtgctgagcctgtttcggaatatcgataaagtcctgaaaagcctgggattcctggagagcggctctggctccggcggtggcaccctgaagtacgtggaggatgtgacaaacgtggtcagacgggatgtggagaagtggggccccttcgatctggtgtacggcagcacccaacccctgggcagctcttgtgaccggtgccctggctggtacatgtttcagttccaccggatcctgcagtacgccctgccgagacaggagtcccagcggccattcttttggattttcatggacaacttgctgctgaccgaggatgaccaggaaactaccactcggttcctgcagaccgaagccgtgaccctgcaggacgtgagaggccgggactaccagaacgccatgcgggtgtggtccaacatccctggactgaaaagcaagcacgcacctctgacccctaaagaagaggagtacctgcaggcccaggtgcggagcagaagcaagctggacgcccctaaggtggatctgctggtgaagaattgcctcctgcccctgagagagtacttcaagtatttcagccagaatagtctgcccctgggaggcagcggcggcggcgccctggtgacatttgaggacgtcgccgtgcggttcacccaggaggaatgggctctgctggatccttctcagaaaatcctgtaccgggacgtgatgagagagacataccggaatctgacctccgtgggcatcaactgggaatgttgggaccttgaagcctgcttcagaagcctgggaagaaacctgagagtgcaggtggtgaagagaaagtgcgagctgaccaacagcggcccctgcgccgagggcggcccaagcagcggcgcccctcctcccagcggcggcagcccagccggctccccaacctctaccgaggagggcacctctgagtccgccacccccgagagcggccctggcacctccaccgagcccagcgagggcagcgcacccggcagccctgccggcagccccacctccacagaggagggaaccagcaccgagcccagcgaaggcagcgccccaggcaccagcaccgagcctagtgagcaggagattaaacggatcaacaagatcagaagaagacttgtgaaagacagcaacaccaagaaggccggcaagacaggccccatgaaaaccctgctggttagagtgatgacacccgatctgagagagcggctggaaaacctgagaaagaagcctgaaaatatcccccagcccatcagcaatacatctagagccaacctgaataagctgctgaccgattacaccgaaatgaagaaggcgatcctgcatgtgtactgggaagagttccagaaggaccctgtgggcctgatgagccgggtggcccagcctgccagcaagaagatcgatcagaacaagctgaaacctgagatggacgagaagggcaacctgaccaccgccggctttgcctgctctcagtgtggccagcccctgttcgtgtacaagctggagcaggtgtctgagaagggcaaggcttacaccaactacttcggacggtgcaatgtggccgagcacgaaaagctgatcctgctggcccagctgaagcccgagaaggatagcgacgaagccgtgacatatagcctgggaaagtttgggcagagggccctggatttctacagcattcatgtgaccaaggagtccacccaccccgtgaagcccctggcccagatcgccggaaacagatacgcctccggacctgtgggaaaggccctgagcgacgcatgtatgggcacaatcgcctccttcctgtctaagtaccaggacatcatcatcgaacaccagaaggtggtgaagggcaaccagaagagactggagagcctgcgggagctggccggcaaggaaaacctggaataccctagcgtgaccctgccacctcagcctcacaccaaggagggcgttgatgcctacaacgaagtgatcgcccgggtgcgaatgtgggtgaacctgaacctgtggcagaagctgaagctaagcagagatgatgccaagcctctgctgagactgaagggattcccttcctttcctctggtcgagagacaggccaacgaagtggactggtgggacatggtgtgtaacgtgaagaagctgatcaacgagaaaaaggaggatggcaaggtgttttggcagaatctggctggctacaagagacaggaagccctgagaccatacctgagcagcgaggaagatcggaagaagggaaagaaattcgctcggtaccagctgggcgacctgctgctgcacctggaaaagaagcacggcgaggactggggaaaggtgtacgacgaggcctgggagcggattgacaagaaagtggaaggcctgagcaagcacatcaagctggaagaggaacggagaagcgaggacgcccagagcaaggccgccctgaccgactggctgcgggctaaggccagcttcgtgatcgagggcctgaaggaggccgacaaggacgagttctgcagatgcgagctgaagctgcagaagtggtacggggacctgcggggaaagcccttcgccatcgaagccgagaacagcatcctggacatcagcggcttcagcaagcagtacaactgtgccttcatctggcagaaggacggcgtgaagaagctgaacctgtacctgatcatcaactacttcaagggcggcaagctgcggttcaagaagatcaaacctgaagccttcgaagccaacagattctacaccgtgatcaacaaaaagagcggcgagatcgtgcccatggaggtgaacttcaacttcgacgaccccaacctgatcatcctgcctctggcctttggcaagagacagggcagagaattcatctggaacgacctgctgtccctggaaaccggcagcctgaagctggccaacggaagagtgatcgagaagacactgtacaacagaagaacccggcaggatgagcctgccctgttcgtggccctgaccttcgagcggcgggaggtcctggactcctccaatatcaaaccaatgaacctgatcggcgtggcaagaggcgaaaacatccccgccgtgatcgccctgaccgaccccgagggctgcccactgagccggtttaaggatagcctgggaaacccaacccacatcctgagaatcggcgagagctataaggagaagcagcggaccatccaggccaagaaggaggtggagcagcggagagccggcggctacagccggaagtacgccagcaaagccaagaatctggcagacgatatggtgagaaacaccgctagagatctgctgtactacgccgtgacccaggatgccatgctgatcttcgccaacctgagccggggcttcggccggcagggcaagcggaccttcatggccgagagacagtacacacggatggaggactggctgaccgccaagctggcctacgagggcctgagcaagacctacctgtccaagacactggcccagtacacctccaagacatgcagcaactgtgggtttaccatcaccagcgccgactacgacagggtgctggagaagctgaagaagacagcaacaggctggatgaccacaattaacggcaaggagctgaaggtggagggccagattacctactacaacagatacaagagacagaacgtagtcaaggacctgtccgtcgagctggatagactgagcgaagaatctgtgaacaacgacatctcctcctggacaaagggcagaagcggagaagctctgagcctcctgaagaaaagattctcccatagacccgtgcaggagaagttcgtgtgcctgaactgcggcttcgagacacacgcagccgagcaagccgccctgaacatcgccagatcctggctgttcctgcggagccaggagtacaagaaataccagacaaacaagacaaccggcaacaccgataagagagccttcgtcgagacctggcagtccttttaccggaagaagcttaaggaggtgtggaaacctgccgtgcggtctggcggatctggcggaggctccgagatgggcctgctgaccttcagggacatcgccatcgagttcagcctggaggagtggcagtgcctggactgcgcccagaggaacctgtacagggacgtgatgctggagaactacaggaacctggtgagcctgggcatcgccgtgagcaagcccgacctgatcacctgcctggagcagaacaaggagagccagaacatcaagaggaacgagatggtggccaagcaccccgtgaccaggagccacggcggcccaagcagcggcgcccctcctcccagcggcggcagcccagccggctccccaacctctaccgaggagggcacctctgagtccgccacccccgagagcggccctggcacctccaccgagcccagcgagggcagcgcacccggcagccctgccggcagccccacctccacagaggagggaaccagcaccgagcccagcgaaggcagcgccccaggcaccagcaccgagcctagtgagcaggagattaaacggatcaacaagatcagaagaagacttgtgaaagacagcaacaccaagaaggccggcaagacaggccccatgaaaaccctgctggttagagtgatgacacccgatctgagagagcggctggaaaacctgagaaagaagcctgaaaatatcccccagcccatcagcaatacatctagagccaacctgaataagctgctgaccgattacaccgaaatgaagaaggcgatcctgcatgtgtactgggaagagttccagaaggaccctgtgggcctgatgagccgggtggcccagcctgccagcaagaagatcgatcagaacaagctgaaacctgagatggacgagaagggcaacctgaccaccgccggctttgcctgctctcagtgtggccagcccctgttcgtgtacaagctggagcaggtgtctgagaagggcaaggcttacaccaactacttcggacggtgcaatgtggccgagcacgaaaagctgatcctgctggcccagctgaagcccgagaaggatagcgacgaagccgtgacatatagcctgggaaagtttgggcagagggccctggatttctacagcattcatgtgaccaaggagtccacccaccccgtgaagcccctggcccagatcgccggaaacagatacgcctccggacctgtgggaaaggccctgagcgacgcatgtatgggcacaatcgcctccttcctgtctaagtaccaggacatcatcatcgaacaccagaaggtggtgaagggcaaccagaagagactggagagcctgcgggagctggccggcaaggaaaacctggaataccctagcgtgaccctgccacctcagcctcacaccaaggagggcgttgatgcctacaacgaagtgatcgcccgggtgcgaatgtgggtgaacctgaacctgtggcagaagctgaagctaagcagagatgatgccaagcctctgctgagactgaagggattcccttcctttcctctggtcgagagacaggccaacgaagtggactggtgggacatggtgtgtaacgtgaagaagctgatcaacgagaaaaaggaggatggcaaggtgttttggcagaatctggctggctacaagagacaggaagccctgagaccatacctgagcagcgaggaagatcggaagaagggaaagaaattcgctcggtaccagctgggcgacctgctgctgcacctggaaaagaagcacggcgaggactggggaaaggtgtacgacgaggcctgggagcggattgacaagaaagtggaaggcctgagcaagcacatcaagctggaagaggaacggagaagcgaggacgcccagagcaaggccgccctgaccgactggctgcgggctaaggccagcttcgtgatcgagggcctgaaggaggccgacaaggacgagttctgcagatgcgagctgaagctgcagaagtggtacggggacctgcggggaaagcccttcgccatcgaagccgagaacagcatcctggacatcagcggcttcagcaagcagtacaactgtgccttcatctggcagaaggacggcgtgaagaagctgaacctgtacctgatcatcaactacttcaagggcggcaagctgcggttcaagaagatcaaacctgaagccttcgaagccaacagattctacaccgtgatcaacaaaaagagcggcgagatcgtgcccatggaggtgaacttcaacttcgacgaccccaacctgatcatcctgcctctggcctttggcaagagacagggcagagaattcatctggaacgacctgctgtccctggaaaccggcagcctgaagctggccaacggaagagtgatcgagaagacactgtacaacagaagaacccggcaggatgagcctgccctgttcgtggccctgaccttcgagcggcgggaggtcctggactcctccaatatcaaaccaatgaacctgatcggcgtggcaagaggcgaaaacatccccgccgtgatcgccctgaccgaccccgagggctgcccactgagccggtttaaggatagcctgggaaacccaacccacatcctgagaatcggcgagagctataaggagaagcagcggaccatccaggccaagaaggaggtggagcagcggagagccggcggctacagccggaagtacgccagcaaagccaagaatctggcagacgatatggtgagaaacaccgctagagatctgctgtactacgccgtgacccaggatgccatgctgatcttcgccaacctgagccggggcttcggccggcagggcaagcggaccttcatggccgagagacagtacacacggatggaggactggctgaccgccaagctggcctacgagggcctgagcaagacctacctgtccaagacactggcccagtacacctccaagacatgcagcaactgtgggtttaccatcaccagcgccgactacgacagggtgctggagaagctgaagaagacagcaacaggctggatgaccacaattaacggcaaggagctgaaggtggagggccagattacctactacaacagatacaagagacagaacgtagtcaaggacctgtccgtcgagctggatagactgagcgaagaatctgtgaacaacgacatctcctcctggacaaagggcagaagcggagaagctctgagcctcctgaagaaaagattctcccatagacccgtgcaggagaagttcgtgtgcctgaactgcggcttcgagacacacgcagccgagcaagccgccctgaacatcgccagatcctggctgttcctgcggagccaggagtacaagaaataccagacaaacaagacaaccggcaacaccgataagagagccttcgtcgagacctggcagtccttttaccggaagaagcttaaggaggtgtggaaacctgccgtgcggtctggcggatctggcggaggctcctgagatgggcctgctgaccttcagggacatcgccatcgagttcagcctggaggagtggcagtgcctggactgcgcccagaggaacctgtacagggacgtgatgctggagaactacaggaacctggtgagcctgggcatcgccgtgagcaagcccgacctgatcacctgcctggagcagaacaaggagagccagaacatcaagaggaacgagatggtggccaagcaccccgtgaccaggagccacggatctggctccggcagcggccccaagaaaaagagaaaagtctaagctgccttctgcggggcttgccttctggccatgcccttcttctctcccttgcacctgtacctcttggtctttgaataaagcctgagtaggaaggctagcaaaaaaaaaaaaaaaaaaaaaaaaaaaaaaaaaaaaaaaaaaaaaaaaaaaaaaaaaaaaaaaaaaaaaaaaaaaaaaaa

SEQ ID NO: 15997 - RNA, 9485 nt, synthetic construct
  source 1..9485: mol_type = other RNA
aggaaataagagagaaaagaagagtaagaagaaatataagagccaccatggcccctaagaagaagcgtaaagtgagccggatggaacgcctcgtctacgaggtgcggcagaagtgcagaaacatcgaggacatctgcatctcctgcggatctctgaacgtgaccctggagcacccactgttcatcggcggcatgtgccagaactgtaaaaactgttttctggagtgtgcctatcaatacgacgatgacggctaccagagctactgcaccatctgttgcggcggaagagaggtgctgatgtgtggaaataacaactgctgccggtgcttctgcgtggaatgcgtggacctgctggtgggccccggcgccgcccaggccgctattaaggaagatccttggaactgctacatgtgcggccacaagggcacatacggcctgctgagacggagagaggactggcctagcagactgcagatgttcttcgccaataaccacgaccaggagttcgacccccctaaggtgtaccctcccgtccccgccgagaagagaaagcccatccgggtcctgagcctgttcgatggcatcgccaccggtctgctggtgctgaaggacctgggcatccaggtggataggtacattgcctccgaggtgtgcgaggactccatcaccgtgggaatggtgcgtcatcagggcaagatcatgtacgtgggcgacgtgcggagcgtgacacagaagcatatccaggagtggggccctttcgacctggtgatcggcggcagcccttgcaatgacctgagcatcgtgaacccagcccggaagggcctgtacgagggaaccggcagactgttcttcgagttttacagactgctgcacgacgcccggcctaaggaaggcgacgaccggcccttcttttggctgttcgagaatgtggtggccatgggagtcagcgacaagcgggatattagccggttcctggagagcaaccccgtgatgatcgatgccaaggaagtgagcgccgcccaccgggccagatacttctggggcaatctgcctggcatgaacagacccctggccagcaccgtgaacgacaagctggagctgcaggagtgcctggagcacggccggatcgccaagttcagcaaggtgagaaccatcaccacccgaagcaacagcatcaaacaaggcaaggaccagcactttcctgtgttcatgaacgagaaggaggacatcctgtggtgtaccgagatggagagagtgttcgggttcccagtccactacacagatgtcagcaacatgtctagactggccagacagagactgctgggaagaagctggtccgtccctgtgatcagacacctgttcgcccctctgaaggagtacttcgcctgcgtgagcagcggcaacagcaacgccaacagccggggccccagcttctctagcggcctggtgccactgtccctgagagggagccacatgggccccatggagatctacaaaaccgtgagcgcctggaagcggcagcctgtgcgcgtgctgagcctgtttcggaatatcgataaagtcctgaaaagcctgggattcctggagagcggctctggctccggcggtggcaccctgaagtacgtggaggatgtgacaaacgtggtcagacgggatgtggagaagtggggccccttcgatctggtgtacggcagcacccaacccctgggcagctcttgtgaccggtgccctggctggtacatgtttcagttccaccggatcctgcagtacgccctgccgagacaggagtcccagcggccattcttttggattttcatggacaacttgctgctgaccgaggatgaccaggaaactaccactcggttcctgcagaccgaagccgtgaccctgcaggacgtgagaggccgggactaccagaacgccatgcgggtgtggtccaacatccctggactgaaaagcaagcacgcacctctgacccctaaagaagaggagtacctgcaggcccaggtgcggagcagaagcaagctggacgcccctaaggtggatctgctggtgaagaattgcctcctgcccctgagagagtacttcaagtatttcagccagaatagtctgcccctgggaggcagcggcggcggcgccctggtgacatttgaggacgtcgccgtgcggttcacccaggaggaatgggctctgctggatccttctcagaaaatcctgtaccgggacgtgatgagagagacataccggaatctgacctccgtgggcatcaactgggaatgttgggaccttgaagcctgcttcagaagcctgggaagaaacctgagagtgcaggtggtgaagagaaagtgcgagctgaccaacagcggcccctgcgccgagggcggcccaagcagcggcgcccctcctcccagcggcggcagcccagccggctccccaacctctaccgaggagggcacctctgagtccgccacccccgagagcggccctggcacctccaccgagcccagcgagggcagcgcacccggcagccctgccggcagccccacctccacagaggagggaaccagcaccgagcccagcgaaggcagcgccccaggcaccagcaccgagcctagtgagcaggagattaaacggatcaacaagatcagaagaagacttgtgaaagacagcaacaccaagaaggccggcaagacaggccccatgaaaaccctgctggttagagtgatgacacccgatctgagagagcggctggaaaacctgagaaagaagcctgaaaatatcccccagcccatcagcaatacatctagagccaacctgaataagctgctgaccgattacaccgaaatgaagaaggcgatcctgcatgtgtactgggaagagttccagaaggaccctgtgggcctgatgagccgggtggcccagcctgccagcaagaagatcgatcagaacaagctgaaacctgagatggacgagaagggcaacctgaccaccgccggctttgcctgctctcagtgtggccagcccctgttcgtgtacaagctggagcaggtgtctgagaagggcaaggcttacaccaactacttcggacggtgcaatgtggccgagcacgaaaagctgatcctgctggcccagctgaagcccgagaaggatagcgacgaagccgtgacatatagcctgggaaagtttgggcagagggccctggatttctacagcattcatgtgaccaaggagtccacccaccccgtgaagcccctggcccagatcgccggaaacagatacgcctccggacctgtgggaaaggccctgagcgacgcatgtatgggcacaatcgcctccttcctgtctaagtaccaggacatcatcatcgaacaccagaaggtggtgaagggcaaccagaagagactggagagcctgcgggagctggccggcaaggaaaacctggaataccctagcgtgaccctgccacctcagcctcacaccaaggagggcgttgatgcctacaacgaagtgatcgcccgggtgcgaatgtgggtgaacctgaacctgtggcagaagctgaagctaagcagagatgatgccaagcctctgctgagactgaagggattcccttcctttcctctggtcgagagacaggccaacgaagtggactggtgggacatggtgtgtaacgtgaagaagctgatcaacgagaaaaaggaggatggcaaggtgttttggcagaatctggctggctacaagagacaggaagccctgagaccatacctgagcagcgaggaagatcggaagaagggaaagaaattcgctcggtaccagctgggcgacctgctgctgcacctggaaaagaagcacggcgaggactggggaaaggtgtacgacgaggcctgggagcggattgacaagaaagtggaaggcctgagcaagcacatcaagctggaagaggaacggagaagcgaggacgcccagagcaaggccgccctgaccgactggctgcgggctaaggccagcttcgtgatcgagggcctgaaggaggccgacaaggacgagttctgcagatgcgagctgaagctgcagaagtggtacggggacctgcggggaaagcccttcgccatcgaagccgagaacagcatcctggacatcagcggcttcagcaagcagtacaactgtgccttcatctggcagaaggacggcgtgaagaagctgaacctgtacctgatcatcaactacttcaagggcggcaagctgcggttcaagaagatcaaacctgaagccttcgaagccaacagattctacaccgtgatcaacaaaaagagcggcgagatcgtgcccatggaggtgaacttcaacttcgacgaccccaacctgatcatcctgcctctggcctttggcaagagacagggcagagaattcatctggaacgacctgctgtccctggaaaccggcagcctgaagctggccaacggaagagtgatcgagaagacactgtacaacagaagaacccggcaggatgagcctgccctgttcgtggccctgaccttcgagcggcgggaggtcctggactcctccaatatcaaaccaatgaacctgatcggcgtggcaagaggcgaaaacatccccgccgtgatcgccctgaccgaccccgagggctgcccactgagccggtttaaggatagcctgggaaacccaacccacatcctgagaatcggcgagagctataaggagaagcagcggaccatccaggccaagaaggaggtggagcagcggagagccggcggctacagccggaagtacgccagcaaagccaagaatctggcagacgatatggtgagaaacaccgctagagatctgctgtactacgccgtgacccaggatgccatgctgatcttcgccaacctgagccggggcttcggccggcagggcaagcggaccttcatggccgagagacagtacacacggatggaggactggctgaccgccaagctggcctacgagggcctgagcaagacctacctgtccaagacactggcccagtacacctccaagacatgcagcaactgtgggtttaccatcaccagcgccgactacgacagggtgctggagaagctgaagaagacagcaacaggctggatgaccacaattaacggcaaggagctgaaggtggagggccagattacctactacaacagatacaagagacagaacgtagtcaaggacctgtccgtcgagctggatagactgagcgaagaatctgtgaacaacgacatctcctcctggacaaagggcagaagcggagaagctctgagcctcctgaagaaaagattctcccatagacccgtgcaggagaagttcgtgtgcctgaactgcggcttcgagacacacgcagccgagcaagccgccctgaacatcgccagatcctggctgttcctgcggagccaggagtacaagaaataccagacaaacaagacaaccggcaacaccgataagagagccttcgtcgagacctggcagtccttttaccggaagaagcttaaggaggtgtggaaacctgccgtgcggtctggcggatctggcggaggctccaccagcgcccccgtgaccttcggcgacctggccatctacttcagccaggaggagtgggagtggctgagccccgtgcagaaggccctgtacgaggacgtgatgctggagaactaccagaccctggccagcctgggcctgagcttcaggaggcccaacgtgatcaccctgctggagaagggcaaggccccctggatggtggagcccgtgaggaggaggaggggcctggacagcggcagcaagtgcggcggcccaagcagcggcgcccctcctcccagcggcggcagcccagccggctccccaacctctaccgaggagggcacctctgagtccgccacccccgagagcggccctggcacctccaccgagcccagcgagggcagcgcacccggcagccctgccggcagccccacctccacagaggagggaaccagcaccgagcccagcgaaggcagcgccccaggcaccagcaccgagcctagtgagcaggagattaaacggatcaacaagatcagaagaagacttgtgaaagacagcaacaccaagaaggccggcaagacaggccccatgaaaaccctgctggttagagtgatgacacccgatctgagagagcggctggaaaacctgagaaagaagcctgaaaatatcccccagcccatcagcaatacatctagagccaacctgaataagctgctgaccgattacaccgaaatgaagaaggcgatcctgcatgtgtactgggaagagttccagaaggaccctgtgggcctgatgagccgggtggcccagcctgccagcaagaagatcgatcagaacaagctgaaacctgagatggacgagaagggcaacctgaccaccgccggctttgcctgctctcagtgtggccagcccctgttcgtgtacaagctggagcaggtgtctgagaagggcaaggcttacaccaactacttcggacggtgcaatgtggccgagcacgaaaagctgatcctgctggcccagctgaagcccgagaaggatagcgacgaagccgtgacatatagcctgggaaagtttgggcagagggccctggatttctacagcattcatgtgaccaaggagtccacccaccccgtgaagcccctggcccagatcgccggaaacagatacgcctccggacctgtgggaaaggccctgagcgacgcatgtatgggcacaatcgcctccttcctgtctaagtaccaggacatcatcatcgaacaccagaaggtggtgaagggcaaccagaagagactggagagcctgcgggagctggccggcaaggaaaacctggaataccctagcgtgaccctgccacctcagcctcacaccaaggagggcgttgatgcctacaacgaagtgatcgcccgggtgcgaatgtgggtgaacctgaacctgtggcagaagctgaagctaagcagagatgatgccaagcctctgctgagactgaagggattcccttcctttcctctggtcgagagacaggccaacgaagtggactggtgggacatggtgtgtaacgtgaagaagctgatcaacgagaaaaaggaggatggcaaggtgttttggcagaatctggctggctacaagagacaggaagccctgagaccatacctgagcagcgaggaagatcggaagaagggaaagaaattcgctcggtaccagctgggcgacctgctgctgcacctggaaaagaagcacggcgaggactggggaaaggtgtacgacgaggcctgggagcggattgacaagaaagtggaaggcctgagcaagcacatcaagctggaagaggaacggagaagcgaggacgcccagagcaaggccgccctgaccgactggctgcgggctaaggccagcttcgtgatcgagggcctgaaggaggccgacaaggacgagttctgcagatgcgagctgaagctgcagaagtggtacggggacctgcggggaaagcccttcgccatcgaagccgagaacagcatcctggacatcagcggcttcagcaagcagtacaactgtgccttcatctggcagaaggacggcgtgaagaagctgaacctgtacctgatcatcaactacttcaagggcggcaagctgcggttcaagaagatcaaacctgaagccttcgaagccaacagattctacaccgtgatcaacaaaaagagcggcgagatcgtgcccatggaggtgaacttcaacttcgacgaccccaacctgatcatcctgcctctggcctttggcaagagacagggcagagaattcatctggaacgacctgctgtccctggaaaccggcagcctgaagctggccaacggaagagtgatcgagaagacactgtacaacagaagaacccggcaggatgagcctgccctgttcgtggccctgaccttcgagcggcgggaggtcctggactcctccaatatcaaaccaatgaacctgatcggcgtggcaagaggcgaaaacatccccgccgtgatcgccctgaccgaccccgagggctgcccactgagccggtttaaggatagcctgggaaacccaacccacatcctgagaatcggcgagagctataaggagaagcagcggaccatccaggccaagaaggaggtggagcagcggagagccggcggctacagccggaagtacgccagcaaagccaagaatctggcagacgatatggtgagaaacaccgctagagatctgctgtactacgccgtgacccaggatgccatgctgatcttcgccaacctgagccggggcttcggccggcagggcaagcggaccttcatggccgagagacagtacacacggatggaggactggctgaccgccaagctggcctacgagggcctgagcaagacctacctgtccaagacactggcccagtacacctccaagacatgcagcaactgtgggtttaccatcaccagcgccgactacgacagggtgctggagaagctgaagaagacagcaacaggctggatgaccacaattaacggcaaggagctgaaggtggagggccagattacctactacaacagatacaagagacagaacgtagtcaaggacctgtccgtcgagctggatagactgagcgaagaatctgtgaacaacgacatctcctcctggacaaagggcagaagcggagaagctctgagcctcctgaagaaaagattctcccatagacccgtgcaggagaagttcgtgtgcctgaactgcggcttcgagacacacgcagccgagcaagccgccctgaacatcgccagatcctggctgttcctgcggagccaggagtacaagaaataccagacaaacaagacaaccggcaacaccgataagagagccttcgtcgagacctggcagtccttttaccggaagaagcttaaggaggtgtggaaacctgccgtgcggtctggcggatctggcggaggctcctaccagcgcccccgtgaccttcggcgacctggccatctacttcagccaggaggagtgggagtggctgagccccgtgcagaaggccctgtacgaggacgtgatgctggagaactaccagaccctggccagcctgggcctgagcttcaggaggcccaacgtgatcaccctgctggagaagggcaaggccccctggatggtggagcccgtgaggaggaggaggggcctggacagcggcagcaagtgcggatctggctccggcagcggccccaagaaaaagagaaaagtctaagctgccttctgcggggcttgccttctggccatgcccttcttctctcccttgcacctgtacctcttggtctttgaataaagcctgagtaggaaggctagcaaaaaaaaaaaaaaaaaaaaaaaaaaaaaaaaaaaaaaaaaaaaaaaaaaaaaaaaaaaaaaaaaaaaaaaaaaaaaaaa

SEQ ID NO: 15998 - RNA, 9485 nt, synthetic construct
  source 1..9485: mol_type = other RNA
aggaaataagagagaaaagaagagtaagaagaaatataagagccaccatggcccctaagaagaagcgtaaagtgagccggatggaacgcctcgtctacgaggtgcggcagaagtgcagaaacatcgaggacatctgcatctcctgcggatctctgaacgtgaccctggagcacccactgttcatcggcggcatgtgccagaactgtaaaaactgttttctggagtgtgcctatcaatacgacgatgacggctaccagagctactgcaccatctgttgcggcggaagagaggtgctgatgtgtggaaataacaactgctgccggtgcttctgcgtggaatgcgtggacctgctggtgggccccggcgccgcccaggccgctattaaggaagatccttggaactgctacatgtgcggccacaagggcacatacggcctgctgagacggagagaggactggcctagcagactgcagatgttcttcgccaataaccacgaccaggagttcgacccccctaaggtgtaccctcccgtccccgccgagaagagaaagcccatccgggtcctgagcctgttcgatggcatcgccaccggtctgctggtgctgaaggacctgggcatccaggtggataggtacattgcctccgaggtgtgcgaggactccatcaccgtgggaatggtgcgtcatcagggcaagatcatgtacgtgggcgacgtgcggagcgtgacacagaagcatatccaggagtggggccctttcgacctggtgatcggcggcagcccttgcaatgacctgagcatcgtgaacccagcccggaagggcctgtacgagggaaccggcagactgttcttcgagttttacagactgctgcacgacgcccggcctaaggaaggcgacgaccggcccttcttttggctgttcgagaatgtggtggccatgggagtcagcgacaagcgggatattagccggttcctggagagcaaccccgtgatgatcgatgccaaggaagtgagcgccgcccaccgggccagatacttctggggcaatctgcctggcatgaacagacccctggccagcaccgtgaacgacaagctggagctgcaggagtgcctggagcacggccggatcgccaagttcagcaaggtgagaaccatcaccacccgaagcaacagcatcaaacaaggcaaggaccagcactttcctgtgttcatgaacgagaaggaggacatcctgtggtgtaccgagatggagagagtgttcgggttcccagtccactacacagatgtcagcaacatgtctagactggccagacagagactgctgggaagaagctggtccgtccctgtgatcagacacctgttcgcccctctgaaggagtacttcgcctgcgtgagcagcggcaacagcaacgccaacagccggggccccagcttctctagcggcctggtgccactgtccctgagagggagccacatgggccccatggagatctacaaaaccgtgagcgcctggaagcggcagcctgtgcgcgtgctgagcctgtttcggaatatcgataaagtcctgaaaagcctgggattcctggagagcggctctggctccggcggtggcaccctgaagtacgtggaggatgtgacaaacgtggtcagacgggatgtggagaagtggggccccttcgatctggtgtacggcagcacccaacccctgggcagctcttgtgaccggtgccctggctggtacatgtttcagttccaccggatcctgcagtacgccctgccgagacaggagtcccagcggccattcttttggattttcatggacaacttgctgctgaccgaggatgaccaggaaactaccactcggttcctgcagaccgaagccgtgaccctgcaggacgtgagaggccgggactaccagaacgccatgcgggtgtggtccaacatccctggactgaaaagcaagcacgcacctctgacccctaaagaagaggagtacctgcaggcccaggtgcggagcagaagcaagctggacgcccctaaggtggatctgctggtgaagaattgcctcctgcccctgagagagtacttcaagtatttcagccagaatagtctgcccctgggaggcagcggcggcggcgccctggtgacatttgaggacgtcgccgtgcggttcacccaggaggaatgggctctgctggatccttctcagaaaatcctgtaccgggacgtgatgagagagacataccggaatctgacctccgtgggcatcaactgggaatgttgggaccttgaagcctgcttcagaagcctgggaagaaacctgagagtgcaggtggtgaagagaaagtgcgagctgaccaacagcggcccctgcgccgagggcggcccaagcagcggcgcccctcctcccagcggcggcagcccagccggctccccaacctctaccgaggagggcacctctgagtccgccacccccgagagcggccctggcacctccaccgagcccagcgagggcagcgcacccggcagccctgccggcagccccacctccacagaggagggaaccagcaccgagcccagcgaaggcagcgccccaggcaccagcaccgagcctagtgagcaggagattaaacggatcaacaagatcagaagaagacttgtgaaagacagcaacaccaagaaggccggcaagacaggccccatgaaaaccctgctggttagagtgatgacacccgatctgagagagcggctggaaaacctgagaaagaagcctgaaaatatcccccagcccatcagcaatacatctagagccaacctgaataagctgctgaccgattacaccgaaatgaagaaggcgatcctgcatgtgtactgggaagagttccagaaggaccctgtgggcctgatgagccgggtggcccagcctgccagcaagaagatcgatcagaacaagctgaaacctgagatggacgagaagggcaacctgaccaccgccggctttgcctgctctcagtgtggccagcccctgttcgtgtacaagctggagcaggtgtctgagaagggcaaggcttacaccaactacttcggacggtgcaatgtggccgagcacgaaaagctgatcctgctggcccagctgaagcccgagaaggatagcgacgaagccgtgacatatagcctgggaaagtttgggcagagggccctggatttctacagcattcatgtgaccaaggagtccacccaccccgtgaagcccctggcccagatcgccggaaacagatacgcctccggacctgtgggaaaggccctgagcgacgcatgtatgggcacaatcgcctccttcctgtctaagtaccaggacatcatcatcgaacaccagaaggtggtgaagggcaaccagaagagactggagagcctgcgggagctggccggcaaggaaaacctggaataccctagcgtgaccctgccacctcagcctcacaccaaggagggcgttgatgcctacaacgaagtgatcgcccgggtgcgaatgtgggtgaacctgaacctgtggcagaagctgaagctaagcagagatgatgccaagcctctgctgagactgaagggattcccttcctttcctctggtcgagagacaggccaacgaagtggactggtgggacatggtgtgtaacgtgaagaagctgatcaacgagaaaaaggaggatggcaaggtgttttggcagaatctggctggctacaagagacaggaagccctgagaccatacctgagcagcgaggaagatcggaagaagggaaagaaattcgctcggtaccagctgggcgacctgctgctgcacctggaaaagaagcacggcgaggactggggaaaggtgtacgacgaggcctgggagcggattgacaagaaagtggaaggcctgagcaagcacatcaagctggaagaggaacggagaagcgaggacgcccagagcaaggccgccctgaccgactggctgcgggctaaggccagcttcgtgatcgagggcctgaaggaggccgacaaggacgagttctgcagatgcgagctgaagctgcagaagtggtacggggacctgcggggaaagcccttcgccatcgaagccgagaacagcatcctggacatcagcggcttcagcaagcagtacaactgtgccttcatctggcagaaggacggcgtgaagaagctgaacctgtacctgatcatcaactacttcaagggcggcaagctgcggttcaagaagatcaaacctgaagccttcgaagccaacagattctacaccgtgatcaacaaaaagagcggcgagatcgtgcccatggaggtgaacttcaacttcgacgaccccaacctgatcatcctgcctctggcctttggcaagagacagggcagagaattcatctggaacgacctgctgtccctggaaaccggcagcctgaagctggccaacggaagagtgatcgagaagacactgtacaacagaagaacccggcaggatgagcctgccctgttcgtggccctgaccttcgagcggcgggaggtcctggactcctccaatatcaaaccaatgaacctgatcggcgtggcaagaggcgaaaacatccccgccgtgatcgccctgaccgaccccgagggctgcccactgagccggtttaaggatagcctgggaaacccaacccacatcctgagaatcggcgagagctataaggagaagcagcggaccatccaggccaagaaggaggtggagcagcggagagccggcggctacagccggaagtacgccagcaaagccaagaatctggcagacgatatggtgagaaacaccgctagagatctgctgtactacgccgtgacccaggatgccatgctgatcttcgccaacctgagccggggcttcggccggcagggcaagcggaccttcatggccgagagacagtacacacggatggaggactggctgaccgccaagctggcctacgagggcctgagcaagacctacctgtccaagacactggcccagtacacctccaagacatgcagcaactgtgggtttaccatcaccagcgccgactacgacagggtgctggagaagctgaagaagacagcaacaggctggatgaccacaattaacggcaaggagctgaaggtggagggccagattacctactacaacagatacaagagacagaacgtagtcaaggacctgtccgtcgagctggatagactgagcgaagaatctgtgaacaacgacatctcctcctggacaaagggcagaagcggagaagctctgagcctcctgaagaaaagattctcccatagacccgtgcaggagaagttcgtgtgcctgaactgcggcttcgagacacacgcagccgagcaagccgccctgaacatcgccagatcctggctgttcctgcggagccaggagtacaagaaataccagacaaacaagacaaccggcaacaccgataagagagccttcgtcgagacctggcagtccttttaccggaagaagcttaaggaggtgtggaaacctgccgtgcggtctggcggatctggcggaggctccgacagcgtgaccttcgaggacgtggccatcagcttcaccgtggaggagtgggccctgctggaccccagccagaagaagctgcacagggacgtgatggaggagaccttcaggaacctggccgccatcggcaggacccaggacgaccagcacatcgacaacgaccacaggtacagcaggaggaaccagaggaacgaggtggtggagaggctgctggagaggaacaagagcagcgagtgcaaggagggcggcccaagcagcggcgcccctcctcccagcggcggcagcccagccggctccccaacctctaccgaggagggcacctctgagtccgccacccccgagagcggccctggcacctccaccgagcccagcgagggcagcgcacccggcagccctgccggcagccccacctccacagaggagggaaccagcaccgagcccagcgaaggcagcgccccaggcaccagcaccgagcctagtgagcaggagattaaacggatcaacaagatcagaagaagacttgtgaaagacagcaacaccaagaaggccggcaagacaggccccatgaaaaccctgctggttagagtgatgacacccgatctgagagagcggctggaaaacctgagaaagaagcctgaaaatatcccccagcccatcagcaatacatctagagccaacctgaataagctgctgaccgattacaccgaaatgaagaaggcgatcctgcatgtgtactgggaagagttccagaaggaccctgtgggcctgatgagccgggtggcccagcctgccagcaagaagatcgatcagaacaagctgaaacctgagatggacgagaagggcaacctgaccaccgccggctttgcctgctctcagtgtggccagcccctgttcgtgtacaagctggagcaggtgtctgagaagggcaaggcttacaccaactacttcggacggtgcaatgtggccgagcacgaaaagctgatcctgctggcccagctgaagcccgagaaggatagcgacgaagccgtgacatatagcctgggaaagtttgggcagagggccctggatttctacagcattcatgtgaccaaggagtccacccaccccgtgaagcccctggcccagatcgccggaaacagatacgcctccggacctgtgggaaaggccctgagcgacgcatgtatgggcacaatcgcctccttcctgtctaagtaccaggacatcatcatcgaacaccagaaggtggtgaagggcaaccagaagagactggagagcctgcgggagctggccggcaaggaaaacctggaataccctagcgtgaccctgccacctcagcctcacaccaaggagggcgttgatgcctacaacgaagtgatcgcccgggtgcgaatgtgggtgaacctgaacctgtggcagaagctgaagctaagcagagatgatgccaagcctctgctgagactgaagggattcccttcctttcctctggtcgagagacaggccaacgaagtggactggtgggacatggtgtgtaacgtgaagaagctgatcaacgagaaaaaggaggatggcaaggtgttttggcagaatctggctggctacaagagacaggaagccctgagaccatacctgagcagcgaggaagatcggaagaagggaaagaaattcgctcggtaccagctgggcgacctgctgctgcacctggaaaagaagcacggcgaggactggggaaaggtgtacgacgaggcctgggagcggattgacaagaaagtggaaggcctgagcaagcacatcaagctggaagaggaacggagaagcgaggacgcccagagcaaggccgccctgaccgactggctgcgggctaaggccagcttcgtgatcgagggcctgaaggaggccgacaaggacgagttctgcagatgcgagctgaagctgcagaagtggtacggggacctgcggggaaagcccttcgccatcgaagccgagaacagcatcctggacatcagcggcttcagcaagcagtacaactgtgccttcatctggcagaaggacggcgtgaagaagctgaacctgtacctgatcatcaactacttcaagggcggcaagctgcggttcaagaagatcaaacctgaagccttcgaagccaacagattctacaccgtgatcaacaaaaagagcggcgagatcgtgcccatggaggtgaacttcaacttcgacgaccccaacctgatcatcctgcctctggcctttggcaagagacagggcagagaattcatctggaacgacctgctgtccctggaaaccggcagcctgaagctggccaacggaagagtgatcgagaagacactgtacaacagaagaacccggcaggatgagcctgccctgttcgtggccctgaccttcgagcggcgggaggtcctggactcctccaatatcaaaccaatgaacctgatcggcgtggcaagaggcgaaaacatccccgccgtgatcgccctgaccgaccccgagggctgcccactgagccggtttaaggatagcctgggaaacccaacccacatcctgagaatcggcgagagctataaggagaagcagcggaccatccaggccaagaaggaggtggagcagcggagagccggcggctacagccggaagtacgccagcaaagccaagaatctggcagacgatatggtgagaaacaccgctagagatctgctgtactacgccgtgacccaggatgccatgctgatcttcgccaacctgagccggggcttcggccggcagggcaagcggaccttcatggccgagagacagtacacacggatggaggactggctgaccgccaagctggcctacgagggcctgagcaagacctacctgtccaagacactggcccagtacacctccaagacatgcagcaactgtgggtttaccatcaccagcgccgactacgacagggtgctggagaagctgaagaagacagcaacaggctggatgaccacaattaacggcaaggagctgaaggtggagggccagattacctactacaacagatacaagagacagaacgtagtcaaggacctgtccgtcgagctggatagactgagcgaagaatctgtgaacaacgacatctcctcctggacaaagggcagaagcggagaagctctgagcctcctgaagaaaagattctcccatagacccgtgcaggagaagttcgtgtgcctgaactgcggcttcgagacacacgcagccgagcaagccgccctgaacatcgccagatcctggctgttcctgcggagccaggagtacaagaaataccagacaaacaagacaaccggcaacaccgataagagagccttcgtcgagacctggcagtccttttaccggaagaagcttaaggaggtgtggaaacctgccgtgcggtctggcggatctggcggaggctcctgacagcgtgaccttcgaggacgtggccatcagcttcaccgtggaggagtgggccctgctggaccccagccagaagaagctgcacagggacgtgatggaggagaccttcaggaacctggccgccatcggcaggacccaggacgaccagcacatcgacaacgaccacaggtacagcaggaggaaccagaggaacgaggtggtggagaggctgctggagaggaacaagagcagcgagtgcaaggagggatctggctccggcagcggccccaagaaaaagagaaaagtctaagctgccttctgcggggcttgccttctggccatgcccttcttctctcccttgcacctgtacctcttggtctttgaataaagcctgagtaggaaggctagcaaaaaaaaaaaaaaaaaaaaaaaaaaaaaaaaaaaaaaaaaaaaaaaaaaaaaaaaaaaaaaaaaaaaaaaaaaaaaaaa

SEQ ID NO: 15999 - RNA, 9485 nt, synthetic construct
  source 1..9485: mol_type = other RNA
aggaaataagagagaaaagaagagtaagaagaaatataagagccaccatggcccctaagaagaagcgtaaagtgagccggatggaacgcctcgtctacgaggtgcggcagaagtgcagaaacatcgaggacatctgcatctcctgcggatctctgaacgtgaccctggagcacccactgttcatcggcggcatgtgccagaactgtaaaaactgttttctggagtgtgcctatcaatacgacgatgacggctaccagagctactgcaccatctgttgcggcggaagagaggtgctgatgtgtggaaataacaactgctgccggtgcttctgcgtggaatgcgtggacctgctggtgggccccggcgccgcccaggccgctattaaggaagatccttggaactgctacatgtgcggccacaagggcacatacggcctgctgagacggagagaggactggcctagcagactgcagatgttcttcgccaataaccacgaccaggagttcgacccccctaaggtgtaccctcccgtccccgccgagaagagaaagcccatccgggtcctgagcctgttcgatggcatcgccaccggtctgctggtgctgaaggacctgggcatccaggtggataggtacattgcctccgaggtgtgcgaggactccatcaccgtgggaatggtgcgtcatcagggcaagatcatgtacgtgggcgacgtgcggagcgtgacacagaagcatatccaggagtggggccctttcgacctggtgatcggcggcagcccttgcaatgacctgagcatcgtgaacccagcccggaagggcctgtacgagggaaccggcagactgttcttcgagttttacagactgctgcacgacgcccggcctaaggaaggcgacgaccggcccttcttttggctgttcgagaatgtggtggccatgggagtcagcgacaagcgggatattagccggttcctggagagcaaccccgtgatgatcgatgccaaggaagtgagcgccgcccaccgggccagatacttctggggcaatctgcctggcatgaacagacccctggccagcaccgtgaacgacaagctggagctgcaggagtgcctggagcacggccggatcgccaagttcagcaaggtgagaaccatcaccacccgaagcaacagcatcaaacaaggcaaggaccagcactttcctgtgttcatgaacgagaaggaggacatcctgtggtgtaccgagatggagagagtgttcgggttcccagtccactacacagatgtcagcaacatgtctagactggccagacagagactgctgggaagaagctggtccgtccctgtgatcagacacctgttcgcccctctgaaggagtacttcgcctgcgtgagcagcggcaacagcaacgccaacagccggggccccagcttctctagcggcctggtgccactgtccctgagagggagccacatgggccccatggagatctacaaaaccgtgagcgcctggaagcggcagcctgtgcgcgtgctgagcctgtttcggaatatcgataaagtcctgaaaagcctgggattcctggagagcggctctggctccggcggtggcaccctgaagtacgtggaggatgtgacaaacgtggtcagacgggatgtggagaagtggggccccttcgatctggtgtacggcagcacccaacccctgggcagctcttgtgaccggtgccctggctggtacatgtttcagttccaccggatcctgcagtacgccctgccgagacaggagtcccagcggccattcttttggattttcatggacaacttgctgctgaccgaggatgaccaggaaactaccactcggttcctgcagaccgaagccgtgaccctgcaggacgtgagaggccgggactaccagaacgccatgcgggtgtggtccaacatccctggactgaaaagcaagcacgcacctctgacccctaaagaagaggagtacctgcaggcccaggtgcggagcagaagcaagctggacgcccctaaggtggatctgctggtgaagaattgcctcctgcccctgagagagtacttcaagtatttcagccagaatagtctgcccctgggaggcagcggcggcggcgccctggtgacatttgaggacgtcgccgtgcggttcacccaggaggaatgggctctgctggatccttctcagaaaatcctgtaccgggacgtgatgagagagacataccggaatctgacctccgtgggcatcaactgggaatgttgggaccttgaagcctgcttcagaagcctgggaagaaacctgagagtgcaggtggtgaagagaaagtgcgagctgaccaacagcggcccctgcgccgagggcggcccaagcagcggcgcccctcctcccagcggcggcagcccagccggctccccaacctctaccgaggagggcacctctgagtccgccacccccgagagcggccctggcacctccaccgagcccagcgagggcagcgcacccggcagccctgccggcagccccacctccacagaggagggaaccagcaccgagcccagcgaaggcagcgccccaggcaccagcaccgagcctagtgagcaggagattaaacggatcaacaagatcagaagaagacttgtgaaagacagcaacaccaagaaggccggcaagacaggccccatgaaaaccctgctggttagagtgatgacacccgatctgagagagcggctggaaaacctgagaaagaagcctgaaaatatcccccagcccatcagcaatacatctagagccaacctgaataagctgctgaccgattacaccgaaatgaagaaggcgatcctgcatgtgtactgggaagagttccagaaggaccctgtgggcctgatgagccgggtggcccagcctgccagcaagaagatcgatcagaacaagctgaaacctgagatggacgagaagggcaacctgaccaccgccggctttgcctgctctcagtgtggccagcccctgttcgtgtacaagctggagcaggtgtctgagaagggcaaggcttacaccaactacttcggacggtgcaatgtggccgagcacgaaaagctgatcctgctggcccagctgaagcccgagaaggatagcgacgaagccgtgacatatagcctgggaaagtttgggcagagggccctggatttctacagcattcatgtgaccaaggagtccacccaccccgtgaagcccctggcccagatcgccggaaacagatacgcctccggacctgtgggaaaggccctgagcgacgcatgtatgggcacaatcgcctccttcctgtctaagtaccaggacatcatcatcgaacaccagaaggtggtgaagggcaaccagaagagactggagagcctgcgggagctggccggcaaggaaaacctggaataccctagcgtgaccctgccacctcagcctcacaccaaggagggcgttgatgcctacaacgaagtgatcgcccgggtgcgaatgtgggtgaacctgaacctgtggcagaagctgaagctaagcagagatgatgccaagcctctgctgagactgaagggattcccttcctttcctctggtcgagagacaggccaacgaagtggactggtgggacatggtgtgtaacgtgaagaagctgatcaacgagaaaaaggaggatggcaaggtgttttggcagaatctggctggctacaagagacaggaagccctgagaccatacctgagcagcgaggaagatcggaagaagggaaagaaattcgctcggtaccagctgggcgacctgctgctgcacctggaaaagaagcacggcgaggactggggaaaggtgtacgacgaggcctgggagcggattgacaagaaagtggaaggcctgagcaagcacatcaagctggaagaggaacggagaagcgaggacgcccagagcaaggccgccctgaccgactggctgcgggctaaggccagcttcgtgatcgagggcctgaaggaggccgacaaggacgagttctgcagatgcgagctgaagctgcagaagtggtacggggacctgcggggaaagcccttcgccatcgaagccgagaacagcatcctggacatcagcggcttcagcaagcagtacaactgtgccttcatctggcagaaggacggcgtgaagaagctgaacctgtacctgatcatcaactacttcaagggcggcaagctgcggttcaagaagatcaaacctgaagccttcgaagccaacagattctacaccgtgatcaacaaaaagagcggcgagatcgtgcccatggaggtgaacttcaacttcgacgaccccaacctgatcatcctgcctctggcctttggcaagagacagggcagagaattcatctggaacgacctgctgtccctggaaaccggcagcctgaagctggccaacggaagagtgatcgagaagacactgtacaacagaagaacccggcaggatgagcctgccctgttcgtggccctgaccttcgagcggcgggaggtcctggactcctccaatatcaaaccaatgaacctgatcggcgtggcaagaggcgaaaacatccccgccgtgatcgccctgaccgaccccgagggctgcccactgagccggtttaaggatagcctgggaaacccaacccacatcctgagaatcggcgagagctataaggagaagcagcggaccatccaggccaagaaggaggtggagcagcggagagccggcggctacagccggaagtacgccagcaaagccaagaatctggcagacgatatggtgagaaacaccgctagagatctgctgtactacgccgtgacccaggatgccatgctgatcttcgccaacctgagccggggcttcggccggcagggcaagcggaccttcatggccgagagacagtacacacggatggaggactggctgaccgccaagctggcctacgagggcctgagcaagacctacctgtccaagacactggcccagtacacctccaagacatgcagcaactgtgggtttaccatcaccagcgccgactacgacagggtgctggagaagctgaagaagacagcaacaggctggatgaccacaattaacggcaaggagctgaaggtggagggccagattacctactacaacagatacaagagacagaacgtagtcaaggacctgtccgtcgagctggatagactgagcgaagaatctgtgaacaacgacatctcctcctggacaaagggcagaagcggagaagctctgagcctcctgaagaaaagattctcccatagacccgtgcaggagaagttcgtgtgcctgaactgcggcttcgagacacacgcagccgagcaagccgccctgaacatcgccagatcctggctgttcctgcggagccaggagtacaagaaataccagacaaacaagacaaccggcaacaccgataagagagccttcgtcgagacctggcagtccttttaccggaagaagcttaaggaggtgtggaaacctgccgtgcggtctggcggatctggcggaggctccggcgagaacctggagagcagggtgaccctgggcagccccgccgccgagagccaggagctgctgaccttcaaggacgtgagcgtggacttcacccaggaggagtggggccagctggcccccgcccacaggaacctgtacagggaggtgatgctggagaactacggcaacctggtgagcgtgggctaccagctgagcaagcccggcctgatcagccagctggagaagggcgaggagccctggctgggcggcccaagcagcggcgcccctcctcccagcggcggcagcccagccggctccccaacctctaccgaggagggcacctctgagtccgccacccccgagagcggccctggcacctccaccgagcccagcgagggcagcgcacccggcagccctgccggcagccccacctccacagaggagggaaccagcaccgagcccagcgaaggcagcgccccaggcaccagcaccgagcctagtgagcaggagattaaacggatcaacaagatcagaagaagacttgtgaaagacagcaacaccaagaaggccggcaagacaggccccatgaaaaccctgctggttagagtgatgacacccgatctgagagagcggctggaaaacctgagaaagaagcctgaaaatatcccccagcccatcagcaatacatctagagccaacctgaataagctgctgaccgattacaccgaaatgaagaaggcgatcctgcatgtgtactgggaagagttccagaaggaccctgtgggcctgatgagccgggtggcccagcctgccagcaagaagatcgatcagaacaagctgaaacctgagatggacgagaagggcaacctgaccaccgccggctttgcctgctctcagtgtggccagcccctgttcgtgtacaagctggagcaggtgtctgagaagggcaaggcttacaccaactacttcggacggtgcaatgtggccgagcacgaaaagctgatcctgctggcccagctgaagcccgagaaggatagcgacgaagccgtgacatatagcctgggaaagtttgggcagagggccctggatttctacagcattcatgtgaccaaggagtccacccaccccgtgaagcccctggcccagatcgccggaaacagatacgcctccggacctgtgggaaaggccctgagcgacgcatgtatgggcacaatcgcctccttcctgtctaagtaccaggacatcatcatcgaacaccagaaggtggtgaagggcaaccagaagagactggagagcctgcgggagctggccggcaaggaaaacctggaataccctagcgtgaccctgccacctcagcctcacaccaaggagggcgttgatgcctacaacgaagtgatcgcccgggtgcgaatgtgggtgaacctgaacctgtggcagaagctgaagctaagcagagatgatgccaagcctctgctgagactgaagggattcccttcctttcctctggtcgagagacaggccaacgaagtggactggtgggacatggtgtgtaacgtgaagaagctgatcaacgagaaaaaggaggatggcaaggtgttttggcagaatctggctggctacaagagacaggaagccctgagaccatacctgagcagcgaggaagatcggaagaagggaaagaaattcgctcggtaccagctgggcgacctgctgctgcacctggaaaagaagcacggcgaggactggggaaaggtgtacgacgaggcctgggagcggattgacaagaaagtggaaggcctgagcaagcacatcaagctggaagaggaacggagaagcgaggacgcccagagcaaggccgccctgaccgactggctgcgggctaaggccagcttcgtgatcgagggcctgaaggaggccgacaaggacgagttctgcagatgcgagctgaagctgcagaagtggtacggggacctgcggggaaagcccttcgccatcgaagccgagaacagcatcctggacatcagcggcttcagcaagcagtacaactgtgccttcatctggcagaaggacggcgtgaagaagctgaacctgtacctgatcatcaactacttcaagggcggcaagctgcggttcaagaagatcaaacctgaagccttcgaagccaacagattctacaccgtgatcaacaaaaagagcggcgagatcgtgcccatggaggtgaacttcaacttcgacgaccccaacctgatcatcctgcctctggcctttggcaagagacagggcagagaattcatctggaacgacctgctgtccctggaaaccggcagcctgaagctggccaacggaagagtgatcgagaagacactgtacaacagaagaacccggcaggatgagcctgccctgttcgtggccctgaccttcgagcggcgggaggtcctggactcctccaatatcaaaccaatgaacctgatcggcgtggcaagaggcgaaaacatccccgccgtgatcgccctgaccgaccccgagggctgcccactgagccggtttaaggatagcctgggaaacccaacccacatcctgagaatcggcgagagctataaggagaagcagcggaccatccaggccaagaaggaggtggagcagcggagagccggcggctacagccggaagtacgccagcaaagccaagaatctggcagacgatatggtgagaaacaccgctagagatctgctgtactacgccgtgacccaggatgccatgctgatcttcgccaacctgagccggggcttcggccggcagggcaagcggaccttcatggccgagagacagtacacacggatggaggactggctgaccgccaagctggcctacgagggcctgagcaagacctacctgtccaagacactggcccagtacacctccaagacatgcagcaactgtgggtttaccatcaccagcgccgactacgacagggtgctggagaagctgaagaagacagcaacaggctggatgaccacaattaacggcaaggagctgaaggtggagggccagattacctactacaacagatacaagagacagaacgtagtcaaggacctgtccgtcgagctggatagactgagcgaagaatctgtgaacaacgacatctcctcctggacaaagggcagaagcggagaagctctgagcctcctgaagaaaagattctcccatagacccgtgcaggagaagttcgtgtgcctgaactgcggcttcgagacacacgcagccgagcaagccgccctgaacatcgccagatcctggctgttcctgcggagccaggagtacaagaaataccagacaaacaagacaaccggcaacaccgataagagagccttcgtcgagacctggcagtccttttaccggaagaagcttaaggaggtgtggaaacctgccgtgcggtctggcggatctggcggaggctcctggcgagaacctggagagcagggtgaccctgggcagccccgccgccgagagccaggagctgctgaccttcaaggacgtgagcgtggacttcacccaggaggagtggggccagctggcccccgcccacaggaacctgtacagggaggtgatgctggagaactacggcaacctggtgagcgtgggctaccagctgagcaagcccggcctgatcagccagctggagaagggcgaggagccctggctgggatctggctccggcagcggccccaagaaaaagagaaaagtctaagctgccttctgcggggcttgccttctggccatgcccttcttctctcccttgcacctgtacctcttggtctttgaataaagcctgagtaggaaggctagcaaaaaaaaaaaaaaaaaaaaaaaaaaaaaaaaaaaaaaaaaaaaaaaaaaaaaaaaaaaaaaaaaaaaaaaaaaaaaaaa

SEQ ID NO: 16000 - RNA, 9485 nt, synthetic construct
  source 1..9485: mol_type = other RNA
aggaaataagagagaaaagaagagtaagaagaaatataagagccaccatggcccctaagaagaagcgtaaagtgagccggatggaacgcctcgtctacgaggtgcggcagaagtgcagaaacatcgaggacatctgcatctcctgcggatctctgaacgtgaccctggagcacccactgttcatcggcggcatgtgccagaactgtaaaaactgttttctggagtgtgcctatcaatacgacgatgacggctaccagagctactgcaccatctgttgcggcggaagagaggtgctgatgtgtggaaataacaactgctgccggtgcttctgcgtggaatgcgtggacctgctggtgggccccggcgccgcccaggccgctattaaggaagatccttggaactgctacatgtgcggccacaagggcacatacggcctgctgagacggagagaggactggcctagcagactgcagatgttcttcgccaataaccacgaccaggagttcgacccccctaaggtgtaccctcccgtccccgccgagaagagaaagcccatccgggtcctgagcctgttcgatggcatcgccaccggtctgctggtgctgaaggacctgggcatccaggtggataggtacattgcctccgaggtgtgcgaggactccatcaccgtgggaatggtgcgtcatcagggcaagatcatgtacgtgggcgacgtgcggagcgtgacacagaagcatatccaggagtggggccctttcgacctggtgatcggcggcagcccttgcaatgacctgagcatcgtgaacccagcccggaagggcctgtacgagggaaccggcagactgttcttcgagttttacagactgctgcacgacgcccggcctaaggaaggcgacgaccggcccttcttttggctgttcgagaatgtggtggccatgggagtcagcgacaagcgggatattagccggttcctggagagcaaccccgtgatgatcgatgccaaggaagtgagcgccgcccaccgggccagatacttctggggcaatctgcctggcatgaacagacccctggccagcaccgtgaacgacaagctggagctgcaggagtgcctggagcacggccggatcgccaagttcagcaaggtgagaaccatcaccacccgaagcaacagcatcaaacaaggcaaggaccagcactttcctgtgttcatgaacgagaaggaggacatcctgtggtgtaccgagatggagagagtgttcgggttcccagtccactacacagatgtcagcaacatgtctagactggccagacagagactgctgggaagaagctggtccgtccctgtgatcagacacctgttcgcccctctgaaggagtacttcgcctgcgtgagcagcggcaacagcaacgccaacagccggggccccagcttctctagcggcctggtgccactgtccctgagagggagccacatgggccccatggagatctacaaaaccgtgagcgcctggaagcggcagcctgtgcgcgtgctgagcctgtttcggaatatcgataaagtcctgaaaagcctgggattcctggagagcggctctggctccggcggtggcaccctgaagtacgtggaggatgtgacaaacgtggtcagacgggatgtggagaagtggggccccttcgatctggtgtacggcagcacccaacccctgggcagctcttgtgaccggtgccctggctggtacatgtttcagttccaccggatcctgcagtacgccctgccgagacaggagtcccagcggccattcttttggattttcatggacaacttgctgctgaccgaggatgaccaggaaactaccactcggttcctgcagaccgaagccgtgaccctgcaggacgtgagaggccgggactaccagaacgccatgcgggtgtggtccaacatccctggactgaaaagcaagcacgcacctctgacccctaaagaagaggagtacctgcaggcccaggtgcggagcagaagcaagctggacgcccctaaggtggatctgctggtgaagaattgcctcctgcccctgagagagtacttcaagtatttcagccagaatagtctgcccctgggaggcagcggcggcggcgccctggtgacatttgaggacgtcgccgtgcggttcacccaggaggaatgggctctgctggatccttctcagaaaatcctgtaccgggacgtgatgagagagacataccggaatctgacctccgtgggcatcaactgggaatgttgggaccttgaagcctgcttcagaagcctgggaagaaacctgagagtgcaggtggtgaagagaaagtgcgagctgaccaacagcggcccctgcgccgagggcggcccaagcagcggcgcccctcctcccagcggcggcagcccagccggctccccaacctctaccgaggagggcacctctgagtccgccacccccgagagcggccctggcacctccaccgagcccagcgagggcagcgcacccggcagccctgccggcagccccacctccacagaggagggaaccagcaccgagcccagcgaaggcagcgccccaggcaccagcaccgagcctagtgagcaggagattaaacggatcaacaagatcagaagaagacttgtgaaagacagcaacaccaagaaggccggcaagacaggccccatgaaaaccctgctggttagagtgatgacacccgatctgagagagcggctggaaaacctgagaaagaagcctgaaaatatcccccagcccatcagcaatacatctagagccaacctgaataagctgctgaccgattacaccgaaatgaagaaggcgatcctgcatgtgtactgggaagagttccagaaggaccctgtgggcctgatgagccgggtggcccagcctgccagcaagaagatcgatcagaacaagctgaaacctgagatggacgagaagggcaacctgaccaccgccggctttgcctgctctcagtgtggccagcccctgttcgtgtacaagctggagcaggtgtctgagaagggcaaggcttacaccaactacttcggacggtgcaatgtggccgagcacgaaaagctgatcctgctggcccagctgaagcccgagaaggatagcgacgaagccgtgacatatagcctgggaaagtttgggcagagggccctggatttctacagcattcatgtgaccaaggagtccacccaccccgtgaagcccctggcccagatcgccggaaacagatacgcctccggacctgtgggaaaggccctgagcgacgcatgtatgggcacaatcgcctccttcctgtctaagtaccaggacatcatcatcgaacaccagaaggtggtgaagggcaaccagaagagactggagagcctgcgggagctggccggcaaggaaaacctggaataccctagcgtgaccctgccacctcagcctcacaccaaggagggcgttgatgcctacaacgaagtgatcgcccgggtgcgaatgtgggtgaacctgaacctgtggcagaagctgaagctaagcagagatgatgccaagcctctgctgagactgaagggattcccttcctttcctctggtcgagagacaggccaacgaagtggactggtgggacatggtgtgtaacgtgaagaagctgatcaacgagaaaaaggaggatggcaaggtgttttggcagaatctggctggctacaagagacaggaagccctgagaccatacctgagcagcgaggaagatcggaagaagggaaagaaattcgctcggtaccagctgggcgacctgctgctgcacctggaaaagaagcacggcgaggactggggaaaggtgtacgacgaggcctgggagcggattgacaagaaagtggaaggcctgagcaagcacatcaagctggaagaggaacggagaagcgaggacgcccagagcaaggccgccctgaccgactggctgcgggctaaggccagcttcgtgatcgagggcctgaaggaggccgacaaggacgagttctgcagatgcgagctgaagctgcagaagtggtacggggacctgcggggaaagcccttcgccatcgaagccgagaacagcatcctggacatcagcggcttcagcaagcagtacaactgtgccttcatctggcagaaggacggcgtgaagaagctgaacctgtacctgatcatcaactacttcaagggcggcaagctgcggttcaagaagatcaaacctgaagccttcgaagccaacagattctacaccgtgatcaacaaaaagagcggcgagatcgtgcccatggaggtgaacttcaacttcgacgaccccaacctgatcatcctgcctctggcctttggcaagagacagggcagagaattcatctggaacgacctgctgtccctggaaaccggcagcctgaagctggccaacggaagagtgatcgagaagacactgtacaacagaagaacccggcaggatgagcctgccctgttcgtggccctgaccttcgagcggcgggaggtcctggactcctccaatatcaaaccaatgaacctgatcggcgtggcaagaggcgaaaacatccccgccgtgatcgccctgaccgaccccgagggctgcccactgagccggtttaaggatagcctgggaaacccaacccacatcctgagaatcggcgagagctataaggagaagcagcggaccatccaggccaagaaggaggtggagcagcggagagccggcggctacagccggaagtacgccagcaaagccaagaatctggcagacgatatggtgagaaacaccgctagagatctgctgtactacgccgtgacccaggatgccatgctgatcttcgccaacctgagccggggcttcggccggcagggcaagcggaccttcatggccgagagacagtacacacggatggaggactggctgaccgccaagctggcctacgagggcctgagcaagacctacctgtccaagacactggcccagtacacctccaagacatgcagcaactgtgggtttaccatcaccagcgccgactacgacagggtgctggagaagctgaagaagacagcaacaggctggatgaccacaattaacggcaaggagctgaaggtggagggccagattacctactacaacagatacaagagacagaacgtagtcaaggacctgtccgtcgagctggatagactgagcgaagaatctgtgaacaacgacatctcctcctggacaaagggcagaagcggagaagctctgagcctcctgaagaaaagattctcccatagacccgtgcaggagaagttcgtgtgcctgaactgcggcttcgagacacacgcagccgagcaagccgccctgaacatcgccagatcctggctgttcctgcggagccaggagtacaagaaataccagacaaacaagacaaccggcaacaccgataagagagccttcgtcgagacctggcagtccttttaccggaagaagcttaaggaggtgtggaaacctgccgtgcggtctggcggatctggcggaggctccccccaggccagcgtgaccttcgaggacgtggccgtgtacctgacccaggaggagtggggccacctggagcccgcccagaggggcctgtacagggacgtgatgctggagaactacggcaacgtggtgagcctgggcttccccgtgagcaagcccgacgtgatcctgcagctggagctgaggggcgagccctggttcctggacatgcagggcaccgagggcagggagatcctgagggactgcgagggcggcccaagcagcggcgcccctcctcccagcggcggcagcccagccggctccccaacctctaccgaggagggcacctctgagtccgccacccccgagagcggccctggcacctccaccgagcccagcgagggcagcgcacccggcagccctgccggcagccccacctccacagaggagggaaccagcaccgagcccagcgaaggcagcgccccaggcaccagcaccgagcctagtgagcaggagattaaacggatcaacaagatcagaagaagacttgtgaaagacagcaacaccaagaaggccggcaagacaggccccatgaaaaccctgctggttagagtgatgacacccgatctgagagagcggctggaaaacctgagaaagaagcctgaaaatatcccccagcccatcagcaatacatctagagccaacctgaataagctgctgaccgattacaccgaaatgaagaaggcgatcctgcatgtgtactgggaagagttccagaaggaccctgtgggcctgatgagccgggtggcccagcctgccagcaagaagatcgatcagaacaagctgaaacctgagatggacgagaagggcaacctgaccaccgccggctttgcctgctctcagtgtggccagcccctgttcgtgtacaagctggagcaggtgtctgagaagggcaaggcttacaccaactacttcggacggtgcaatgtggccgagcacgaaaagctgatcctgctggcccagctgaagcccgagaaggatagcgacgaagccgtgacatatagcctgggaaagtttgggcagagggccctggatttctacagcattcatgtgaccaaggagtccacccaccccgtgaagcccctggcccagatcgccggaaacagatacgcctccggacctgtgggaaaggccctgagcgacgcatgtatgggcacaatcgcctccttcctgtctaagtaccaggacatcatcatcgaacaccagaaggtggtgaagggcaaccagaagagactggagagcctgcgggagctggccggcaaggaaaacctggaataccctagcgtgaccctgccacctcagcctcacaccaaggagggcgttgatgcctacaacgaagtgatcgcccgggtgcgaatgtgggtgaacctgaacctgtggcagaagctgaagctaagcagagatgatgccaagcctctgctgagactgaagggattcccttcctttcctctggtcgagagacaggccaacgaagtggactggtgggacatggtgtgtaacgtgaagaagctgatcaacgagaaaaaggaggatggcaaggtgttttggcagaatctggctggctacaagagacaggaagccctgagaccatacctgagcagcgaggaagatcggaagaagggaaagaaattcgctcggtaccagctgggcgacctgctgctgcacctggaaaagaagcacggcgaggactggggaaaggtgtacgacgaggcctgggagcggattgacaagaaagtggaaggcctgagcaagcacatcaagctggaagaggaacggagaagcgaggacgcccagagcaaggccgccctgaccgactggctgcgggctaaggccagcttcgtgatcgagggcctgaaggaggccgacaaggacgagttctgcagatgcgagctgaagctgcagaagtggtacggggacctgcggggaaagcccttcgccatcgaagccgagaacagcatcctggacatcagcggcttcagcaagcagtacaactgtgccttcatctggcagaaggacggcgtgaagaagctgaacctgtacctgatcatcaactacttcaagggcggcaagctgcggttcaagaagatcaaacctgaagccttcgaagccaacagattctacaccgtgatcaacaaaaagagcggcgagatcgtgcccatggaggtgaacttcaacttcgacgaccccaacctgatcatcctgcctctggcctttggcaagagacagggcagagaattcatctggaacgacctgctgtccctggaaaccggcagcctgaagctggccaacggaagagtgatcgagaagacactgtacaacagaagaacccggcaggatgagcctgccctgttcgtggccctgaccttcgagcggcgggaggtcctggactcctccaatatcaaaccaatgaacctgatcggcgtggcaagaggcgaaaacatccccgccgtgatcgccctgaccgaccccgagggctgcccactgagccggtttaaggatagcctgggaaacccaacccacatcctgagaatcggcgagagctataaggagaagcagcggaccatccaggccaagaaggaggtggagcagcggagagccggcggctacagccggaagtacgccagcaaagccaagaatctggcagacgatatggtgagaaacaccgctagagatctgctgtactacgccgtgacccaggatgccatgctgatcttcgccaacctgagccggggcttcggccggcagggcaagcggaccttcatggccgagagacagtacacacggatggaggactggctgaccgccaagctggcctacgagggcctgagcaagacctacctgtccaagacactggcccagtacacctccaagacatgcagcaactgtgggtttaccatcaccagcgccgactacgacagggtgctggagaagctgaagaagacagcaacaggctggatgaccacaattaacggcaaggagctgaaggtggagggccagattacctactacaacagatacaagagacagaacgtagtcaaggacctgtccgtcgagctggatagactgagcgaagaatctgtgaacaacgacatctcctcctggacaaagggcagaagcggagaagctctgagcctcctgaagaaaagattctcccatagacccgtgcaggagaagttcgtgtgcctgaactgcggcttcgagacacacgcagccgagcaagccgccctgaacatcgccagatcctggctgttcctgcggagccaggagtacaagaaataccagacaaacaagacaaccggcaacaccgataagagagccttcgtcgagacctggcagtccttttaccggaagaagcttaaggaggtgtggaaacctgccgtgcggtctggcggatctggcggaggctcctccccaggccagcgtgaccttcgaggacgtggccgtgtacctgacccaggaggagtggggccacctggagcccgcccagaggggcctgtacagggacgtgatgctggagaactacggcaacgtggtgagcctgggcttccccgtgagcaagcccgacgtgatcctgcagctggagctgaggggcgagccctggttcctggacatgcagggcaccgagggcagggagatcctgagggactgcgagggatctggctccggcagcggccccaagaaaaagagaaaagtctaagctgccttctgcggggcttgccttctggccatgcccttcttctctcccttgcacctgtacctcttggtctttgaataaagcctgagtaggaaggctagcaaaaaaaaaaaaaaaaaaaaaaaaaaaaaaaaaaaaaaaaaaaaaaaaaaaaaaaaaaaaaaaaaaaaaaaaaaaaaaaa

SEQ ID NO: 16001 - RNA, 9485 nt, synthetic construct
  source 1..9485: mol_type = other RNA
aggaaataagagagaaaagaagagtaagaagaaatataagagccaccatggcccctaagaagaagcgtaaagtgagccggatggaacgcctcgtctacgaggtgcggcagaagtgcagaaacatcgaggacatctgcatctcctgcggatctctgaacgtgaccctggagcacccactgttcatcggcggcatgtgccagaactgtaaaaactgttttctggagtgtgcctatcaatacgacgatgacggctaccagagctactgcaccatctgttgcggcggaagagaggtgctgatgtgtggaaataacaactgctgccggtgcttctgcgtggaatgcgtggacctgctggtgggccccggcgccgcccaggccgctattaaggaagatccttggaactgctacatgtgcggccacaagggcacatacggcctgctgagacggagagaggactggcctagcagactgcagatgttcttcgccaataaccacgaccaggagttcgacccccctaaggtgtaccctcccgtccccgccgagaagagaaagcccatccgggtcctgagcctgttcgatggcatcgccaccggtctgctggtgctgaaggacctgggcatccaggtggataggtacattgcctccgaggtgtgcgaggactccatcaccgtgggaatggtgcgtcatcagggcaagatcatgtacgtgggcgacgtgcggagcgtgacacagaagcatatccaggagtggggccctttcgacctggtgatcggcggcagcccttgcaatgacctgagcatcgtgaacccagcccggaagggcctgtacgagggaaccggcagactgttcttcgagttttacagactgctgcacgacgcccggcctaaggaaggcgacgaccggcccttcttttggctgttcgagaatgtggtggccatgggagtcagcgacaagcgggatattagccggttcctggagagcaaccccgtgatgatcgatgccaaggaagtgagcgccgcccaccgggccagatacttctggggcaatctgcctggcatgaacagacccctggccagcaccgtgaacgacaagctggagctgcaggagtgcctggagcacggccggatcgccaagttcagcaaggtgagaaccatcaccacccgaagcaacagcatcaaacaaggcaaggaccagcactttcctgtgttcatgaacgagaaggaggacatcctgtggtgtaccgagatggagagagtgttcgggttcccagtccactacacagatgtcagcaacatgtctagactggccagacagagactgctgggaagaagctggtccgtccctgtgatcagacacctgttcgcccctctgaaggagtacttcgcctgcgtgagcagcggcaacagcaacgccaacagccggggccccagcttctctagcggcctggtgccactgtccctgagagggagccacatgggccccatggagatctacaaaaccgtgagcgcctggaagcggcagcctgtgcgcgtgctgagcctgtttcggaatatcgataaagtcctgaaaagcctgggattcctggagagcggctctggctccggcggtggcaccctgaagtacgtggaggatgtgacaaacgtggtcagacgggatgtggagaagtggggccccttcgatctggtgtacggcagcacccaacccctgggcagctcttgtgaccggtgccctggctggtacatgtttcagttccaccggatcctgcagtacgccctgccgagacaggagtcccagcggccattcttttggattttcatggacaacttgctgctgaccgaggatgaccaggaaactaccactcggttcctgcagaccgaagccgtgaccctgcaggacgtgagaggccgggactaccagaacgccatgcgggtgtggtccaacatccctggactgaaaagcaagcacgcacctctgacccctaaagaagaggagtacctgcaggcccaggtgcggagcagaagcaagctggacgcccctaaggtggatctgctggtgaagaattgcctcctgcccctgagagagtacttcaagtatttcagccagaatagtctgcccctgggaggcagcggcggcggcgccctggtgacatttgaggacgtcgccgtgcggttcacccaggaggaatgggctctgctggatccttctcagaaaatcctgtaccgggacgtgatgagagagacataccggaatctgacctccgtgggcatcaactgggaatgttgggaccttgaagcctgcttcagaagcctgggaagaaacctgagagtgcaggtggtgaagagaaagtgcgagctgaccaacagcggcccctgcgccgagggcggcccaagcagcggcgcccctcctcccagcggcggcagcccagccggctccccaacctctaccgaggagggcacctctgagtccgccacccccgagagcggccctggcacctccaccgagcccagcgagggcagcgcacccggcagccctgccggcagccccacctccacagaggagggaaccagcaccgagcccagcgaaggcagcgccccaggcaccagcaccgagcctagtgagcaggagattaaacggatcaacaagatcagaagaagacttgtgaaagacagcaacaccaagaaggccggcaagacaggccccatgaaaaccctgctggttagagtgatgacacccgatctgagagagcggctggaaaacctgagaaagaagcctgaaaatatcccccagcccatcagcaatacatctagagccaacctgaataagctgctgaccgattacaccgaaatgaagaaggcgatcctgcatgtgtactgggaagagttccagaaggaccctgtgggcctgatgagccgggtggcccagcctgccagcaagaagatcgatcagaacaagctgaaacctgagatggacgagaagggcaacctgaccaccgccggctttgcctgctctcagtgtggccagcccctgttcgtgtacaagctggagcaggtgtctgagaagggcaaggcttacaccaactacttcggacggtgcaatgtggccgagcacgaaaagctgatcctgctggcccagctgaagcccgagaaggatagcgacgaagccgtgacatatagcctgggaaagtttgggcagagggccctggatttctacagcattcatgtgaccaaggagtccacccaccccgtgaagcccctggcccagatcgccggaaacagatacgcctccggacctgtgggaaaggccctgagcgacgcatgtatgggcacaatcgcctccttcctgtctaagtaccaggacatcatcatcgaacaccagaaggtggtgaagggcaaccagaagagactggagagcctgcgggagctggccggcaaggaaaacctggaataccctagcgtgaccctgccacctcagcctcacaccaaggagggcgttgatgcctacaacgaagtgatcgcccgggtgcgaatgtgggtgaacctgaacctgtggcagaagctgaagctaagcagagatgatgccaagcctctgctgagactgaagggattcccttcctttcctctggtcgagagacaggccaacgaagtggactggtgggacatggtgtgtaacgtgaagaagctgatcaacgagaaaaaggaggatggcaaggtgttttggcagaatctggctggctacaagagacaggaagccctgagaccatacctgagcagcgaggaagatcggaagaagggaaagaaattcgctcggtaccagctgggcgacctgctgctgcacctggaaaagaagcacggcgaggactggggaaaggtgtacgacgaggcctgggagcggattgacaagaaagtggaaggcctgagcaagcacatcaagctggaagaggaacggagaagcgaggacgcccagagcaaggccgccctgaccgactggctgcgggctaaggccagcttcgtgatcgagggcctgaaggaggccgacaaggacgagttctgcagatgcgagctgaagctgcagaagtggtacggggacctgcggggaaagcccttcgccatcgaagccgagaacagcatcctggacatcagcggcttcagcaagcagtacaactgtgccttcatctggcagaaggacggcgtgaagaagctgaacctgtacctgatcatcaactacttcaagggcggcaagctgcggttcaagaagatcaaacctgaagccttcgaagccaacagattctacaccgtgatcaacaaaaagagcggcgagatcgtgcccatggaggtgaacttcaacttcgacgaccccaacctgatcatcctgcctctggcctttggcaagagacagggcagagaattcatctggaacgacctgctgtccctggaaaccggcagcctgaagctggccaacggaagagtgatcgagaagacactgtacaacagaagaacccggcaggatgagcctgccctgttcgtggccctgaccttcgagcggcgggaggtcctggactcctccaatatcaaaccaatgaacctgatcggcgtggcaagaggcgaaaacatccccgccgtgatcgccctgaccgaccccgagggctgcccactgagccggtttaaggatagcctgggaaacccaacccacatcctgagaatcggcgagagctataaggagaagcagcggaccatccaggccaagaaggaggtggagcagcggagagccggcggctacagccggaagtacgccagcaaagccaagaatctggcagacgatatggtgagaaacaccgctagagatctgctgtactacgccgtgacccaggatgccatgctgatcttcgccaacctgagccggggcttcggccggcagggcaagcggaccttcatggccgagagacagtacacacggatggaggactggctgaccgccaagctggcctacgagggcctgagcaagacctacctgtccaagacactggcccagtacacctccaagacatgcagcaactgtgggtttaccatcaccagcgccgactacgacagggtgctggagaagctgaagaagacagcaacaggctggatgaccacaattaacggcaaggagctgaaggtggagggccagattacctactacaacagatacaagagacagaacgtagtcaaggacctgtccgtcgagctggatagactgagcgaagaatctgtgaacaacgacatctcctcctggacaaagggcagaagcggagaagctctgagcctcctgaagaaaagattctcccatagacccgtgcaggagaagttcgtgtgcctgaactgcggcttcgagacacacgcagccgagcaagccgccctgaacatcgccagatcctggctgttcctgcggagccaggagtacaagaaataccagacaaacaagacaaccggcaacaccgataagagagccttcgtcgagacctggcagtccttttaccggaagaagcttaaggaggtgtggaaacctgccgtgcggtctggcggatctggcggaggctccgaggccctgcccgtggtgttcgaggacgtggccgtgtacttcaccagggaggagtggggcgccctggacaagaggcagaaggagatgtacagggacgtgatgaggatgaactacgagctgctggccagcctgggccccgccgccgccaagcccgacctgatcagcaagctggagaggagggccgccccctggatcaaggacccccacggcctgaagtggggcaagggcaggccccccggcaagggcggcccaagcagcggcgcccctcctcccagcggcggcagcccagccggctccccaacctctaccgaggagggcacctctgagtccgccacccccgagagcggccctggcacctccaccgagcccagcgagggcagcgcacccggcagccctgccggcagccccacctccacagaggagggaaccagcaccgagcccagcgaaggcagcgccccaggcaccagcaccgagcctagtgagcaggagattaaacggatcaacaagatcagaagaagacttgtgaaagacagcaacaccaagaaggccggcaagacaggccccatgaaaaccctgctggttagagtgatgacacccgatctgagagagcggctggaaaacctgagaaagaagcctgaaaatatcccccagcccatcagcaatacatctagagccaacctgaataagctgctgaccgattacaccgaaatgaagaaggcgatcctgcatgtgtactgggaagagttccagaaggaccctgtgggcctgatgagccgggtggcccagcctgccagcaagaagatcgatcagaacaagctgaaacctgagatggacgagaagggcaacctgaccaccgccggctttgcctgctctcagtgtggccagcccctgttcgtgtacaagctggagcaggtgtctgagaagggcaaggcttacaccaactacttcggacggtgcaatgtggccgagcacgaaaagctgatcctgctggcccagctgaagcccgagaaggatagcgacgaagccgtgacatatagcctgggaaagtttgggcagagggccctggatttctacagcattcatgtgaccaaggagtccacccaccccgtgaagcccctggcccagatcgccggaaacagatacgcctccggacctgtgggaaaggccctgagcgacgcatgtatgggcacaatcgcctccttcctgtctaagtaccaggacatcatcatcgaacaccagaaggtggtgaagggcaaccagaagagactggagagcctgcgggagctggccggcaaggaaaacctggaataccctagcgtgaccctgccacctcagcctcacaccaaggagggcgttgatgcctacaacgaagtgatcgcccgggtgcgaatgtgggtgaacctgaacctgtggcagaagctgaagctaagcagagatgatgccaagcctctgctgagactgaagggattcccttcctttcctctggtcgagagacaggccaacgaagtggactggtgggacatggtgtgtaacgtgaagaagctgatcaacgagaaaaaggaggatggcaaggtgttttggcagaatctggctggctacaagagacaggaagccctgagaccatacctgagcagcgaggaagatcggaagaagggaaagaaattcgctcggtaccagctgggcgacctgctgctgcacctggaaaagaagcacggcgaggactggggaaaggtgtacgacgaggcctgggagcggattgacaagaaagtggaaggcctgagcaagcacatcaagctggaagaggaacggagaagcgaggacgcccagagcaaggccgccctgaccgactggctgcgggctaaggccagcttcgtgatcgagggcctgaaggaggccgacaaggacgagttctgcagatgcgagctgaagctgcagaagtggtacggggacctgcggggaaagcccttcgccatcgaagccgagaacagcatcctggacatcagcggcttcagcaagcagtacaactgtgccttcatctggcagaaggacggcgtgaagaagctgaacctgtacctgatcatcaactacttcaagggcggcaagctgcggttcaagaagatcaaacctgaagccttcgaagccaacagattctacaccgtgatcaacaaaaagagcggcgagatcgtgcccatggaggtgaacttcaacttcgacgaccccaacctgatcatcctgcctctggcctttggcaagagacagggcagagaattcatctggaacgacctgctgtccctggaaaccggcagcctgaagctggccaacggaagagtgatcgagaagacactgtacaacagaagaacccggcaggatgagcctgccctgttcgtggccctgaccttcgagcggcgggaggtcctggactcctccaatatcaaaccaatgaacctgatcggcgtggcaagaggcgaaaacatccccgccgtgatcgccctgaccgaccccgagggctgcccactgagccggtttaaggatagcctgggaaacccaacccacatcctgagaatcggcgagagctataaggagaagcagcggaccatccaggccaagaaggaggtggagcagcggagagccggcggctacagccggaagtacgccagcaaagccaagaatctggcagacgatatggtgagaaacaccgctagagatctgctgtactacgccgtgacccaggatgccatgctgatcttcgccaacctgagccggggcttcggccggcagggcaagcggaccttcatggccgagagacagtacacacggatggaggactggctgaccgccaagctggcctacgagggcctgagcaagacctacctgtccaagacactggcccagtacacctccaagacatgcagcaactgtgggtttaccatcaccagcgccgactacgacagggtgctggagaagctgaagaagacagcaacaggctggatgaccacaattaacggcaaggagctgaaggtggagggccagattacctactacaacagatacaagagacagaacgtagtcaaggacctgtccgtcgagctggatagactgagcgaagaatctgtgaacaacgacatctcctcctggacaaagggcagaagcggagaagctctgagcctcctgaagaaaagattctcccatagacccgtgcaggagaagttcgtgtgcctgaactgcggcttcgagacacacgcagccgagcaagccgccctgaacatcgccagatcctggctgttcctgcggagccaggagtacaagaaataccagacaaacaagacaaccggcaacaccgataagagagccttcgtcgagacctggcagtccttttaccggaagaagcttaaggaggtgtggaaacctgccgtgcggtctggcggatctggcggaggctcctgaggccctgcccgtggtgttcgaggacgtggccgtgtacttcaccagggaggagtggggcgccctggacaagaggcagaaggagatgtacagggacgtgatgaggatgaactacgagctgctggccagcctgggccccgccgccgccaagcccgacctgatcagcaagctggagaggagggccgccccctggatcaaggacccccacggcctgaagtggggcaagggcaggccccccggcaagggatctggctccggcagcggccccaagaaaaagagaaaagtctaagctgccttctgcggggcttgccttctggccatgcccttcttctctcccttgcacctgtacctcttggtctttgaataaagcctgagtaggaaggctagcaaaaaaaaaaaaaaaaaaaaaaaaaaaaaaaaaaaaaaaaaaaaaaaaaaaaaaaaaaaaaaaaaaaaaaaaaaaaaaaa

SEQ ID NO: 16002 - RNA, 9539 nt, synthetic construct
  source 1..9539: mol_type = other RNA
aggaaataagagagaaaagaagagtaagaagaaatataagagccaccatggcccctaagaagaagcgtaaagtgagccggatggaacgcctcgtctacgaggtgcggcagaagtgcagaaacatcgaggacatctgcatctcctgcggatctctgaacgtgaccctggagcacccactgttcatcggcggcatgtgccagaactgtaaaaactgttttctggagtgtgcctatcaatacgacgatgacggctaccagagctactgcaccatctgttgcggcggaagagaggtgctgatgtgtggaaataacaactgctgccggtgcttctgcgtggaatgcgtggacctgctggtgggccccggcgccgcccaggccgctattaaggaagatccttggaactgctacatgtgcggccacaagggcacatacggcctgctgagacggagagaggactggcctagcagactgcagatgttcttcgccaataaccacgaccaggagttcgacccccctaaggtgtaccctcccgtccccgccgagaagagaaagcccatccgggtcctgagcctgttcgatggcatcgccaccggtctgctggtgctgaaggacctgggcatccaggtggataggtacattgcctccgaggtgtgcgaggactccatcaccgtgggaatggtgcgtcatcagggcaagatcatgtacgtgggcgacgtgcggagcgtgacacagaagcatatccaggagtggggccctttcgacctggtgatcggcggcagcccttgcaatgacctgagcatcgtgaacccagcccggaagggcctgtacgagggaaccggcagactgttcttcgagttttacagactgctgcacgacgcccggcctaaggaaggcgacgaccggcccttcttttggctgttcgagaatgtggtggccatgggagtcagcgacaagcgggatattagccggttcctggagagcaaccccgtgatgatcgatgccaaggaagtgagcgccgcccaccgggccagatacttctggggcaatctgcctggcatgaacagacccctggccagcaccgtgaacgacaagctggagctgcaggagtgcctggagcacggccggatcgccaagttcagcaaggtgagaaccatcaccacccgaagcaacagcatcaaacaaggcaaggaccagcactttcctgtgttcatgaacgagaaggaggacatcctgtggtgtaccgagatggagagagtgttcgggttcccagtccactacacagatgtcagcaacatgtctagactggccagacagagactgctgggaagaagctggtccgtccctgtgatcagacacctgttcgcccctctgaaggagtacttcgcctgcgtgagcagcggcaacagcaacgccaacagccggggccccagcttctctagcggcctggtgccactgtccctgagagggagccacatgggccccatggagatctacaaaaccgtgagcgcctggaagcggcagcctgtgcgcgtgctgagcctgtttcggaatatcgataaagtcctgaaaagcctgggattcctggagagcggctctggctccggcggtggcaccctgaagtacgtggaggatgtgacaaacgtggtcagacgggatgtggagaagtggggccccttcgatctggtgtacggcagcacccaacccctgggcagctcttgtgaccggtgccctggctggtacatgtttcagttccaccggatcctgcagtacgccctgccgagacaggagtcccagcggccattcttttggattttcatggacaacttgctgctgaccgaggatgaccaggaaactaccactcggttcctgcagaccgaagccgtgaccctgcaggacgtgagaggccgggactaccagaacgccatgcgggtgtggtccaacatccctggactgaaaagcaagcacgcacctctgacccctaaagaagaggagtacctgcaggcccaggtgcggagcagaagcaagctggacgcccctaaggtggatctgctggtgaagaattgcctcctgcccctgagagagtacttcaagtatttcagccagaatagtctgcccctgggaggcagcggcggcggcgccctggtgacatttgaggacgtcgccgtgcggttcacccaggaggaatgggctctgctggatccttctcagaaaatcctgtaccgggacgtgatgagagagacataccggaatctgacctccgtgggcatcaactgggaatgttgggaccttgaagcctgcttcagaagcctgggaagaaacctgagagtgcaggtggtgaagagaaagtgcgagctgaccaacagcggcccctgcgccgagggcggcccaagcagcggcgcccctcctcccagcggcggcagcccagccggctccccaacctctaccgaggagggcacctctgagtccgccacccccgagagcggccctggcacctccaccgagcccagcgagggcagcgcacccggcagccctgccggcagccccacctccacagaggagggaaccagcaccgagcccagcgaaggcagcgccccaggcaccagcaccgagcctagtgagcaggagattaaacggatcaacaagatcagaagaagacttgtgaaagacagcaacaccaagaaggccggcaagacaggccccatgaaaaccctgctggttagagtgatgacacccgatctgagagagcggctggaaaacctgagaaagaagcctgaaaatatcccccagcccatcagcaatacatctagagccaacctgaataagctgctgaccgattacaccgaaatgaagaaggcgatcctgcatgtgtactgggaagagttccagaaggaccctgtgggcctgatgagccgggtggcccagcctgccagcaagaagatcgatcagaacaagctgaaacctgagatggacgagaagggcaacctgaccaccgccggctttgcctgctctcagtgtggccagcccctgttcgtgtacaagctggagcaggtgtctgagaagggcaaggcttacaccaactacttcggacggtgcaatgtggccgagcacgaaaagctgatcctgctggcccagctgaagcccgagaaggatagcgacgaagccgtgacatatagcctgggaaagtttgggcagagggccctggatttctacagcattcatgtgaccaaggagtccacccaccccgtgaagcccctggcccagatcgccggaaacagatacgcctccggacctgtgggaaaggccctgagcgacgcatgtatgggcacaatcgcctccttcctgtctaagtaccaggacatcatcatcgaacaccagaaggtggtgaagggcaaccagaagagactggagagcctgcgggagctggccggcaaggaaaacctggaataccctagcgtgaccctgccacctcagcctcacaccaaggagggcgttgatgcctacaacgaagtgatcgcccgggtgcgaatgtgggtgaacctgaacctgtggcagaagctgaagctaagcagagatgatgccaagcctctgctgagactgaagggattcccttcctttcctctggtcgagagacaggccaacgaagtggactggtgggacatggtgtgtaacgtgaagaagctgatcaacgagaaaaaggaggatggcaaggtgttttggcagaatctggctggctacaagagacaggaagccctgagaccatacctgagcagcgaggaagatcggaagaagggaaagaaattcgctcggtaccagctgggcgacctgctgctgcacctggaaaagaagcacggcgaggactggggaaaggtgtacgacgaggcctgggagcggattgacaagaaagtggaaggcctgagcaagcacatcaagctggaagaggaacggagaagcgaggacgcccagagcaaggccgccctgaccgactggctgcgggctaaggccagcttcgtgatcgagggcctgaaggaggccgacaaggacgagttctgcagatgcgagctgaagctgcagaagtggtacggggacctgcggggaaagcccttcgccatcgaagccgagaacagcatcctggacatcagcggcttcagcaagcagtacaactgtgccttcatctggcagaaggacggcgtgaagaagctgaacctgtacctgatcatcaactacttcaagggcggcaagctgcggttcaagaagatcaaacctgaagccttcgaagccaacagattctacaccgtgatcaacaaaaagagcggcgagatcgtgcccatggaggtgaacttcaacttcgacgaccccaacctgatcatcctgcctctggcctttggcaagagacagggcagagaattcatctggaacgacctgctgtccctggaaaccggcagcctgaagctggccaacggaagagtgatcgagaagacactgtacaacagaagaacccggcaggatgagcctgccctgttcgtggccctgaccttcgagcggcgggaggtcctggactcctccaatatcaaaccaatgaacctgatcggcgtggcaagaggcgaaaacatccccgccgtgatcgccctgaccgaccccgagggctgcccactgagccggtttaaggatagcctgggaaacccaacccacatcctgagaatcggcgagagctataaggagaagcagcggaccatccaggccaagaaggaggtggagcagcggagagccggcggctacagccggaagtacgccagcaaagccaagaatctggcagacgatatggtgagaaacaccgctagagatctgctgtactacgccgtgacccaggatgccatgctgatcttcgccaacctgagccggggcttcggccggcagggcaagcggaccttcatggccgagagacagtacacacggatggaggactggctgaccgccaagctggcctacgagggcctgagcaagacctacctgtccaagacactggcccagtacacctccaagacatgcagcaactgtgggtttaccatcaccagcgccgactacgacagggtgctggagaagctgaagaagacagcaacaggctggatgaccacaattaacggcaaggagctgaaggtggagggccagattacctactacaacagatacaagagacagaacgtagtcaaggacctgtccgtcgagctggatagactgagcgaagaatctgtgaacaacgacatctcctcctggacaaagggcagaagcggagaagctctgagcctcctgaagaaaagattctcccatagacccgtgcaggagaagttcgtgtgcctgaactgcggcttcgagacacacgcagccgagcaagccgccctgaacatcgccagatcctggctgttcctgcggagccaggagtacaagaaataccagacaaacaagacaaccggcaacaccgataagagagccttcgtcgagacctggcagtccttttaccggaagaagcttaaggaggtgtggaaacctgccgtgcggtctggcggatctggcggaggctccgtggccttcagggacgtgatcgtggacttcacccaggaggagtggcagcagctgaagcccgcccagaaggacctgtacagggacgtgatgatggagatctactggaacctggtgagcctggacctggagaccgagggcgacatgaacgagcccgaccccgagaaggacagctgggaggacaggaccagcatcgtggtggtggagggcctgatgaggaacggcgcccagggctacgcctgcgagaaggccggcatccagggctgcagggtgggcggcccaagcagcggcgcccctcctcccagcggcggcagcccagccggctccccaacctctaccgaggagggcacctctgagtccgccacccccgagagcggccctggcacctccaccgagcccagcgagggcagcgcacccggcagccctgccggcagccccacctccacagaggagggaaccagcaccgagcccagcgaaggcagcgccccaggcaccagcaccgagcctagtgagcaggagattaaacggatcaacaagatcagaagaagacttgtgaaagacagcaacaccaagaaggccggcaagacaggccccatgaaaaccctgctggttagagtgatgacacccgatctgagagagcggctggaaaacctgagaaagaagcctgaaaatatcccccagcccatcagcaatacatctagagccaacctgaataagctgctgaccgattacaccgaaatgaagaaggcgatcctgcatgtgtactgggaagagttccagaaggaccctgtgggcctgatgagccgggtggcccagcctgccagcaagaagatcgatcagaacaagctgaaacctgagatggacgagaagggcaacctgaccaccgccggctttgcctgctctcagtgtggccagcccctgttcgtgtacaagctggagcaggtgtctgagaagggcaaggcttacaccaactacttcggacggtgcaatgtggccgagcacgaaaagctgatcctgctggcccagctgaagcccgagaaggatagcgacgaagccgtgacatatagcctgggaaagtttgggcagagggccctggatttctacagcattcatgtgaccaaggagtccacccaccccgtgaagcccctggcccagatcgccggaaacagatacgcctccggacctgtgggaaaggccctgagcgacgcatgtatgggcacaatcgcctccttcctgtctaagtaccaggacatcatcatcgaacaccagaaggtggtgaagggcaaccagaagagactggagagcctgcgggagctggccggcaaggaaaacctggaataccctagcgtgaccctgccacctcagcctcacaccaaggagggcgttgatgcctacaacgaagtgatcgcccgggtgcgaatgtgggtgaacctgaacctgtggcagaagctgaagctaagcagagatgatgccaagcctctgctgagactgaagggattcccttcctttcctctggtcgagagacaggccaacgaagtggactggtgggacatggtgtgtaacgtgaagaagctgatcaacgagaaaaaggaggatggcaaggtgttttggcagaatctggctggctacaagagacaggaagccctgagaccatacctgagcagcgaggaagatcggaagaagggaaagaaattcgctcggtaccagctgggcgacctgctgctgcacctggaaaagaagcacggcgaggactggggaaaggtgtacgacgaggcctgggagcggattgacaagaaagtggaaggcctgagcaagcacatcaagctggaagaggaacggagaagcgaggacgcccagagcaaggccgccctgaccgactggctgcgggctaaggccagcttcgtgatcgagggcctgaaggaggccgacaaggacgagttctgcagatgcgagctgaagctgcagaagtggtacggggacctgcggggaaagcccttcgccatcgaagccgagaacagcatcctggacatcagcggcttcagcaagcagtacaactgtgccttcatctggcagaaggacggcgtgaagaagctgaacctgtacctgatcatcaactacttcaagggcggcaagctgcggttcaagaagatcaaacctgaagccttcgaagccaacagattctacaccgtgatcaacaaaaagagcggcgagatcgtgcccatggaggtgaacttcaacttcgacgaccccaacctgatcatcctgcctctggcctttggcaagagacagggcagagaattcatctggaacgacctgctgtccctggaaaccggcagcctgaagctggccaacggaagagtgatcgagaagacactgtacaacagaagaacccggcaggatgagcctgccctgttcgtggccctgaccttcgagcggcgggaggtcctggactcctccaatatcaaaccaatgaacctgatcggcgtggcaagaggcgaaaacatccccgccgtgatcgccctgaccgaccccgagggctgcccactgagccggtttaaggatagcctgggaaacccaacccacatcctgagaatcggcgagagctataaggagaagcagcggaccatccaggccaagaaggaggtggagcagcggagagccggcggctacagccggaagtacgccagcaaagccaagaatctggcagacgatatggtgagaaacaccgctagagatctgctgtactacgccgtgacccaggatgccatgctgatcttcgccaacctgagccggggcttcggccggcagggcaagcggaccttcatggccgagagacagtacacacggatggaggactggctgaccgccaagctggcctacgagggcctgagcaagacctacctgtccaagacactggcccagtacacctccaagacatgcagcaactgtgggtttaccatcaccagcgccgactacgacagggtgctggagaagctgaagaagacagcaacaggctggatgaccacaattaacggcaaggagctgaaggtggagggccagattacctactacaacagatacaagagacagaacgtagtcaaggacctgtccgtcgagctggatagactgagcgaagaatctgtgaacaacgacatctcctcctggacaaagggcagaagcggagaagctctgagcctcctgaagaaaagattctcccatagacccgtgcaggagaagttcgtgtgcctgaactgcggcttcgagacacacgcagccgagcaagccgccctgaacatcgccagatcctggctgttcctgcggagccaggagtacaagaaataccagacaaacaagacaaccggcaacaccgataagagagccttcgtcgagacctggcagtccttttaccggaagaagcttaaggaggtgtggaaacctgccgtgcggtctggcggatctggcggaggctcctgtggccttcagggacgtgatcgtggacttcacccaggaggagtggcagcagctgaagcccgcccagaaggacctgtacagggacgtgatgatggagatctactggaacctggtgagcctggacctggagaccgagggcgacatgaacgagcccgaccccgagaaggacagctgggaggacaggaccagcatcgtggtggtggagggcctgatgaggaacggcgcccagggctacgcctgcgagaaggccggcatccagggctgcagggtgggatctggctccggcagcggccccaagaaaaagagaaaagtctaagctgccttctgcggggcttgccttctggccatgcccttcttctctcccttgcacctgtacctcttggtctttgaataaagcctgagtaggaaggctagcaaaaaaaaaaaaaaaaaaaaaaaaaaaaaaaaaaaaaaaaaaaaaaaaaaaaaaaaaaaaaaaaaaaaaaaaaaaaaaaa

SEQ ID NO: 16003 - RNA, 9485 nt, synthetic construct
  source 1..9485: mol_type = other RNA
aggaaataagagagaaaagaagagtaagaagaaatataagagccaccatggcccctaagaagaagcgtaaagtgagccggatggaacgcctcgtctacgaggtgcggcagaagtgcagaaacatcgaggacatctgcatctcctgcggatctctgaacgtgaccctggagcacccactgttcatcggcggcatgtgccagaactgtaaaaactgttttctggagtgtgcctatcaatacgacgatgacggctaccagagctactgcaccatctgttgcggcggaagagaggtgctgatgtgtggaaataacaactgctgccggtgcttctgcgtggaatgcgtggacctgctggtgggccccggcgccgcccaggccgctattaaggaagatccttggaactgctacatgtgcggccacaagggcacatacggcctgctgagacggagagaggactggcctagcagactgcagatgttcttcgccaataaccacgaccaggagttcgacccccctaaggtgtaccctcccgtccccgccgagaagagaaagcccatccgggtcctgagcctgttcgatggcatcgccaccggtctgctggtgctgaaggacctgggcatccaggtggataggtacattgcctccgaggtgtgcgaggactccatcaccgtgggaatggtgcgtcatcagggcaagatcatgtacgtgggcgacgtgcggagcgtgacacagaagcatatccaggagtggggccctttcgacctggtgatcggcggcagcccttgcaatgacctgagcatcgtgaacccagcccggaagggcctgtacgagggaaccggcagactgttcttcgagttttacagactgctgcacgacgcccggcctaaggaaggcgacgaccggcccttcttttggctgttcgagaatgtggtggccatgggagtcagcgacaagcgggatattagccggttcctggagagcaaccccgtgatgatcgatgccaaggaagtgagcgccgcccaccgggccagatacttctggggcaatctgcctggcatgaacagacccctggccagcaccgtgaacgacaagctggagctgcaggagtgcctggagcacggccggatcgccaagttcagcaaggtgagaaccatcaccacccgaagcaacagcatcaaacaaggcaaggaccagcactttcctgtgttcatgaacgagaaggaggacatcctgtggtgtaccgagatggagagagtgttcgggttcccagtccactacacagatgtcagcaacatgtctagactggccagacagagactgctgggaagaagctggtccgtccctgtgatcagacacctgttcgcccctctgaaggagtacttcgcctgcgtgagcagcggcaacagcaacgccaacagccggggccccagcttctctagcggcctggtgccactgtccctgagagggagccacatgggccccatggagatctacaaaaccgtgagcgcctggaagcggcagcctgtgcgcgtgctgagcctgtttcggaatatcgataaagtcctgaaaagcctgggattcctggagagcggctctggctccggcggtggcaccctgaagtacgtggaggatgtgacaaacgtggtcagacgggatgtggagaagtggggccccttcgatctggtgtacggcagcacccaacccctgggcagctcttgtgaccggtgccctggctggtacatgtttcagttccaccggatcctgcagtacgccctgccgagacaggagtcccagcggccattcttttggattttcatggacaacttgctgctgaccgaggatgaccaggaaactaccactcggttcctgcagaccgaagccgtgaccctgcaggacgtgagaggccgggactaccagaacgccatgcgggtgtggtccaacatccctggactgaaaagcaagcacgcacctctgacccctaaagaagaggagtacctgcaggcccaggtgcggagcagaagcaagctggacgcccctaaggtggatctgctggtgaagaattgcctcctgcccctgagagagtacttcaagtatttcagccagaatagtctgcccctgggaggcagcggcggcggcgccctggtgacatttgaggacgtcgccgtgcggttcacccaggaggaatgggctctgctggatccttctcagaaaatcctgtaccgggacgtgatgagagagacataccggaatctgacctccgtgggcatcaactgggaatgttgggaccttgaagcctgcttcagaagcctgggaagaaacctgagagtgcaggtggtgaagagaaagtgcgagctgaccaacagcggcccctgcgccgagggcggcccaagcagcggcgcccctcctcccagcggcggcagcccagccggctccccaacctctaccgaggagggcacctctgagtccgccacccccgagagcggccctggcacctccaccgagcccagcgagggcagcgcacccggcagccctgccggcagccccacctccacagaggagggaaccagcaccgagcccagcgaaggcagcgccccaggcaccagcaccgagcctagtgagcaggagattaaacggatcaacaagatcagaagaagacttgtgaaagacagcaacaccaagaaggccggcaagacaggccccatgaaaaccctgctggttagagtgatgacacccgatctgagagagcggctggaaaacctgagaaagaagcctgaaaatatcccccagcccatcagcaatacatctagagccaacctgaataagctgctgaccgattacaccgaaatgaagaaggcgatcctgcatgtgtactgggaagagttccagaaggaccctgtgggcctgatgagccgggtggcccagcctgccagcaagaagatcgatcagaacaagctgaaacctgagatggacgagaagggcaacctgaccaccgccggctttgcctgctctcagtgtggccagcccctgttcgtgtacaagctggagcaggtgtctgagaagggcaaggcttacaccaactacttcggacggtgcaatgtggccgagcacgaaaagctgatcctgctggcccagctgaagcccgagaaggatagcgacgaagccgtgacatatagcctgggaaagtttgggcagagggccctggatttctacagcattcatgtgaccaaggagtccacccaccccgtgaagcccctggcccagatcgccggaaacagatacgcctccggacctgtgggaaaggccctgagcgacgcatgtatgggcacaatcgcctccttcctgtctaagtaccaggacatcatcatcgaacaccagaaggtggtgaagggcaaccagaagagactggagagcctgcgggagctggccggcaaggaaaacctggaataccctagcgtgaccctgccacctcagcctcacaccaaggagggcgttgatgcctacaacgaagtgatcgcccgggtgcgaatgtgggtgaacctgaacctgtggcagaagctgaagctaagcagagatgatgccaagcctctgctgagactgaagggattcccttcctttcctctggtcgagagacaggccaacgaagtggactggtgggacatggtgtgtaacgtgaagaagctgatcaacgagaaaaaggaggatggcaaggtgttttggcagaatctggctggctacaagagacaggaagccctgagaccatacctgagcagcgaggaagatcggaagaagggaaagaaattcgctcggtaccagctgggcgacctgctgctgcacctggaaaagaagcacggcgaggactggggaaaggtgtacgacgaggcctgggagcggattgacaagaaagtggaaggcctgagcaagcacatcaagctggaagaggaacggagaagcgaggacgcccagagcaaggccgccctgaccgactggctgcgggctaaggccagcttcgtgatcgagggcctgaaggaggccgacaaggacgagttctgcagatgcgagctgaagctgcagaagtggtacggggacctgcggggaaagcccttcgccatcgaagccgagaacagcatcctggacatcagcggcttcagcaagcagtacaactgtgccttcatctggcagaaggacggcgtgaagaagctgaacctgtacctgatcatcaactacttcaagggcggcaagctgcggttcaagaagatcaaacctgaagccttcgaagccaacagattctacaccgtgatcaacaaaaagagcggcgagatcgtgcccatggaggtgaacttcaacttcgacgaccccaacctgatcatcctgcctctggcctttggcaagagacagggcagagaattcatctggaacgacctgctgtccctggaaaccggcagcctgaagctggccaacggaagagtgatcgagaagacactgtacaacagaagaacccggcaggatgagcctgccctgttcgtggccctgaccttcgagcggcgggaggtcctggactcctccaatatcaaaccaatgaacctgatcggcgtggcaagaggcgaaaacatccccgccgtgatcgccctgaccgaccccgagggctgcccactgagccggtttaaggatagcctgggaaacccaacccacatcctgagaatcggcgagagctataaggagaagcagcggaccatccaggccaagaaggaggtggagcagcggagagccggcggctacagccggaagtacgccagcaaagccaagaatctggcagacgatatggtgagaaacaccgctagagatctgctgtactacgccgtgacccaggatgccatgctgatcttcgccaacctgagccggggcttcggccggcagggcaagcggaccttcatggccgagagacagtacacacggatggaggactggctgaccgccaagctggcctacgagggcctgagcaagacctacctgtccaagacactggcccagtacacctccaagacatgcagcaactgtgggtttaccatcaccagcgccgactacgacagggtgctggagaagctgaagaagacagcaacaggctggatgaccacaattaacggcaaggagctgaaggtggagggccagattacctactacaacagatacaagagacagaacgtagtcaaggacctgtccgtcgagctggatagactgagcgaagaatctgtgaacaacgacatctcctcctggacaaagggcagaagcggagaagctctgagcctcctgaagaaaagattctcccatagacccgtgcaggagaagttcgtgtgcctgaactgcggcttcgagacacacgcagccgagcaagccgccctgaacatcgccagatcctggctgttcctgcggagccaggagtacaagaaataccagacaaacaagacaaccggcaacaccgataagagagccttcgtcgagacctggcagtccttttaccggaagaagcttaaggaggtgtggaaacctgccgtgcggtctggcggatctggcggaggctccggcccctggaccctgctgaccttcagggacgtggccatcgagttcagccaggaggagtggggctgcctgaaccacagccagagggagctgtacagggacgtgatgctggagacctacggccacctgctgttcctgggcctggtgagcaagcccgacctggtgatcctgctggagcagaagaaggagctgtggggcgtgaagaggaaggagaccgtgggctgccagttcgagggccacgtgaccggcggcccaagcagcggcgcccctcctcccagcggcggcagcccagccggctccccaacctctaccgaggagggcacctctgagtccgccacccccgagagcggccctggcacctccaccgagcccagcgagggcagcgcacccggcagccctgccggcagccccacctccacagaggagggaaccagcaccgagcccagcgaaggcagcgccccaggcaccagcaccgagcctagtgagcaggagattaaacggatcaacaagatcagaagaagacttgtgaaagacagcaacaccaagaaggccggcaagacaggccccatgaaaaccctgctggttagagtgatgacacccgatctgagagagcggctggaaaacctgagaaagaagcctgaaaatatcccccagcccatcagcaatacatctagagccaacctgaataagctgctgaccgattacaccgaaatgaagaaggcgatcctgcatgtgtactgggaagagttccagaaggaccctgtgggcctgatgagccgggtggcccagcctgccagcaagaagatcgatcagaacaagctgaaacctgagatggacgagaagggcaacctgaccaccgccggctttgcctgctctcagtgtggccagcccctgttcgtgtacaagctggagcaggtgtctgagaagggcaaggcttacaccaactacttcggacggtgcaatgtggccgagcacgaaaagctgatcctgctggcccagctgaagcccgagaaggatagcgacgaagccgtgacatatagcctgggaaagtttgggcagagggccctggatttctacagcattcatgtgaccaaggagtccacccaccccgtgaagcccctggcccagatcgccggaaacagatacgcctccggacctgtgggaaaggccctgagcgacgcatgtatgggcacaatcgcctccttcctgtctaagtaccaggacatcatcatcgaacaccagaaggtggtgaagggcaaccagaagagactggagagcctgcgggagctggccggcaaggaaaacctggaataccctagcgtgaccctgccacctcagcctcacaccaaggagggcgttgatgcctacaacgaagtgatcgcccgggtgcgaatgtgggtgaacctgaacctgtggcagaagctgaagctaagcagagatgatgccaagcctctgctgagactgaagggattcccttcctttcctctggtcgagagacaggccaacgaagtggactggtgggacatggtgtgtaacgtgaagaagctgatcaacgagaaaaaggaggatggcaaggtgttttggcagaatctggctggctacaagagacaggaagccctgagaccatacctgagcagcgaggaagatcggaagaagggaaagaaattcgctcggtaccagctgggcgacctgctgctgcacctggaaaagaagcacggcgaggactggggaaaggtgtacgacgaggcctgggagcggattgacaagaaagtggaaggcctgagcaagcacatcaagctggaagaggaacggagaagcgaggacgcccagagcaaggccgccctgaccgactggctgcgggctaaggccagcttcgtgatcgagggcctgaaggaggccgacaaggacgagttctgcagatgcgagctgaagctgcagaagtggtacggggacctgcggggaaagcccttcgccatcgaagccgagaacagcatcctggacatcagcggcttcagcaagcagtacaactgtgccttcatctggcagaaggacggcgtgaagaagctgaacctgtacctgatcatcaactacttcaagggcggcaagctgcggttcaagaagatcaaacctgaagccttcgaagccaacagattctacaccgtgatcaacaaaaagagcggcgagatcgtgcccatggaggtgaacttcaacttcgacgaccccaacctgatcatcctgcctctggcctttggcaagagacagggcagagaattcatctggaacgacctgctgtccctggaaaccggcagcctgaagctggccaacggaagagtgatcgagaagacactgtacaacagaagaacccggcaggatgagcctgccctgttcgtggccctgaccttcgagcggcgggaggtcctggactcctccaatatcaaaccaatgaacctgatcggcgtggcaagaggcgaaaacatccccgccgtgatcgccctgaccgaccccgagggctgcccactgagccggtttaaggatagcctgggaaacccaacccacatcctgagaatcggcgagagctataaggagaagcagcggaccatccaggccaagaaggaggtggagcagcggagagccggcggctacagccggaagtacgccagcaaagccaagaatctggcagacgatatggtgagaaacaccgctagagatctgctgtactacgccgtgacccaggatgccatgctgatcttcgccaacctgagccggggcttcggccggcagggcaagcggaccttcatggccgagagacagtacacacggatggaggactggctgaccgccaagctggcctacgagggcctgagcaagacctacctgtccaagacactggcccagtacacctccaagacatgcagcaactgtgggtttaccatcaccagcgccgactacgacagggtgctggagaagctgaagaagacagcaacaggctggatgaccacaattaacggcaaggagctgaaggtggagggccagattacctactacaacagatacaagagacagaacgtagtcaaggacctgtccgtcgagctggatagactgagcgaagaatctgtgaacaacgacatctcctcctggacaaagggcagaagcggagaagctctgagcctcctgaagaaaagattctcccatagacccgtgcaggagaagttcgtgtgcctgaactgcggcttcgagacacacgcagccgagcaagccgccctgaacatcgccagatcctggctgttcctgcggagccaggagtacaagaaataccagacaaacaagacaaccggcaacaccgataagagagccttcgtcgagacctggcagtccttttaccggaagaagcttaaggaggtgtggaaacctgccgtgcggtctggcggatctggcggaggctcctggcccctggaccctgctgaccttcagggacgtggccatcgagttcagccaggaggagtggggctgcctgaaccacagccagagggagctgtacagggacgtgatgctggagacctacggccacctgctgttcctgggcctggtgagcaagcccgacctggtgatcctgctggagcagaagaaggagctgtggggcgtgaagaggaaggagaccgtgggctgccagttcgagggccacgtgaccggatctggctccggcagcggccccaagaaaaagagaaaagtctaagctgccttctgcggggcttgccttctggccatgcccttcttctctcccttgcacctgtacctcttggtctttgaataaagcctgagtaggaaggctagcaaaaaaaaaaaaaaaaaaaaaaaaaaaaaaaaaaaaaaaaaaaaaaaaaaaaaaaaaaaaaaaaaaaaaaaaaaaaaaaa

SEQ ID NO: 16004 - RNA, 9485 nt, synthetic construct
  source 1..9485: mol_type = other RNA
aggaaataagagagaaaagaagagtaagaagaaatataagagccaccatggcccctaagaagaagcgtaaagtgagccggatggaacgcctcgtctacgaggtgcggcagaagtgcagaaacatcgaggacatctgcatctcctgcggatctctgaacgtgaccctggagcacccactgttcatcggcggcatgtgccagaactgtaaaaactgttttctggagtgtgcctatcaatacgacgatgacggctaccagagctactgcaccatctgttgcggcggaagagaggtgctgatgtgtggaaataacaactgctgccggtgcttctgcgtggaatgcgtggacctgctggtgggccccggcgccgcccaggccgctattaaggaagatccttggaactgctacatgtgcggccacaagggcacatacggcctgctgagacggagagaggactggcctagcagactgcagatgttcttcgccaataaccacgaccaggagttcgacccccctaaggtgtaccctcccgtccccgccgagaagagaaagcccatccgggtcctgagcctgttcgatggcatcgccaccggtctgctggtgctgaaggacctgggcatccaggtggataggtacattgcctccgaggtgtgcgaggactccatcaccgtgggaatggtgcgtcatcagggcaagatcatgtacgtgggcgacgtgcggagcgtgacacagaagcatatccaggagtggggccctttcgacctggtgatcggcggcagcccttgcaatgacctgagcatcgtgaacccagcccggaagggcctgtacgagggaaccggcagactgttcttcgagttttacagactgctgcacgacgcccggcctaaggaaggcgacgaccggcccttcttttggctgttcgagaatgtggtggccatgggagtcagcgacaagcgggatattagccggttcctggagagcaaccccgtgatgatcgatgccaaggaagtgagcgccgcccaccgggccagatacttctggggcaatctgcctggcatgaacagacccctggccagcaccgtgaacgacaagctggagctgcaggagtgcctggagcacggccggatcgccaagttcagcaaggtgagaaccatcaccacccgaagcaacagcatcaaacaaggcaaggaccagcactttcctgtgttcatgaacgagaaggaggacatcctgtggtgtaccgagatggagagagtgttcgggttcccagtccactacacagatgtcagcaacatgtctagactggccagacagagactgctgggaagaagctggtccgtccctgtgatcagacacctgttcgcccctctgaaggagtacttcgcctgcgtgagcagcggcaacagcaacgccaacagccggggccccagcttctctagcggcctggtgccactgtccctgagagggagccacatgggccccatggagatctacaaaaccgtgagcgcctggaagcggcagcctgtgcgcgtgctgagcctgtttcggaatatcgataaagtcctgaaaagcctgggattcctggagagcggctctggctccggcggtggcaccctgaagtacgtggaggatgtgacaaacgtggtcagacgggatgtggagaagtggggccccttcgatctggtgtacggcagcacccaacccctgggcagctcttgtgaccggtgccctggctggtacatgtttcagttccaccggatcctgcagtacgccctgccgagacaggagtcccagcggccattcttttggattttcatggacaacttgctgctgaccgaggatgaccaggaaactaccactcggttcctgcagaccgaagccgtgaccctgcaggacgtgagaggccgggactaccagaacgccatgcgggtgtggtccaacatccctggactgaaaagcaagcacgcacctctgacccctaaagaagaggagtacctgcaggcccaggtgcggagcagaagcaagctggacgcccctaaggtggatctgctggtgaagaattgcctcctgcccctgagagagtacttcaagtatttcagccagaatagtctgcccctgggaggcagcggcggcggcgccctggtgacatttgaggacgtcgccgtgcggttcacccaggaggaatgggctctgctggatccttctcagaaaatcctgtaccgggacgtgatgagagagacataccggaatctgacctccgtgggcatcaactgggaatgttgggaccttgaagcctgcttcagaagcctgggaagaaacctgagagtgcaggtggtgaagagaaagtgcgagctgaccaacagcggcccctgcgccgagggcggcccaagcagcggcgcccctcctcccagcggcggcagcccagccggctccccaacctctaccgaggagggcacctctgagtccgccacccccgagagcggccctggcacctccaccgagcccagcgagggcagcgcacccggcagccctgccggcagccccacctccacagaggagggaaccagcaccgagcccagcgaaggcagcgccccaggcaccagcaccgagcctagtgagcaggagattaaacggatcaacaagatcagaagaagacttgtgaaagacagcaacaccaagaaggccggcaagacaggccccatgaaaaccctgctggttagagtgatgacacccgatctgagagagcggctggaaaacctgagaaagaagcctgaaaatatcccccagcccatcagcaatacatctagagccaacctgaataagctgctgaccgattacaccgaaatgaagaaggcgatcctgcatgtgtactgggaagagttccagaaggaccctgtgggcctgatgagccgggtggcccagcctgccagcaagaagatcgatcagaacaagctgaaacctgagatggacgagaagggcaacctgaccaccgccggctttgcctgctctcagtgtggccagcccctgttcgtgtacaagctggagcaggtgtctgagaagggcaaggcttacaccaactacttcggacggtgcaatgtggccgagcacgaaaagctgatcctgctggcccagctgaagcccgagaaggatagcgacgaagccgtgacatatagcctgggaaagtttgggcagagggccctggatttctacagcattcatgtgaccaaggagtccacccaccccgtgaagcccctggcccagatcgccggaaacagatacgcctccggacctgtgggaaaggccctgagcgacgcatgtatgggcacaatcgcctccttcctgtctaagtaccaggacatcatcatcgaacaccagaaggtggtgaagggcaaccagaagagactggagagcctgcgggagctggccggcaaggaaaacctggaataccctagcgtgaccctgccacctcagcctcacaccaaggagggcgttgatgcctacaacgaagtgatcgcccgggtgcgaatgtgggtgaacctgaacctgtggcagaagctgaagctaagcagagatgatgccaagcctctgctgagactgaagggattcccttcctttcctctggtcgagagacaggccaacgaagtggactggtgggacatggtgtgtaacgtgaagaagctgatcaacgagaaaaaggaggatggcaaggtgttttggcagaatctggctggctacaagagacaggaagccctgagaccatacctgagcagcgaggaagatcggaagaagggaaagaaattcgctcggtaccagctgggcgacctgctgctgcacctggaaaagaagcacggcgaggactggggaaaggtgtacgacgaggcctgggagcggattgacaagaaagtggaaggcctgagcaagcacatcaagctggaagaggaacggagaagcgaggacgcccagagcaaggccgccctgaccgactggctgcgggctaaggccagcttcgtgatcgagggcctgaaggaggccgacaaggacgagttctgcagatgcgagctgaagctgcagaagtggtacggggacctgcggggaaagcccttcgccatcgaagccgagaacagcatcctggacatcagcggcttcagcaagcagtacaactgtgccttcatctggcagaaggacggcgtgaagaagctgaacctgtacctgatcatcaactacttcaagggcggcaagctgcggttcaagaagatcaaacctgaagccttcgaagccaacagattctacaccgtgatcaacaaaaagagcggcgagatcgtgcccatggaggtgaacttcaacttcgacgaccccaacctgatcatcctgcctctggcctttggcaagagacagggcagagaattcatctggaacgacctgctgtccctggaaaccggcagcctgaagctggccaacggaagagtgatcgagaagacactgtacaacagaagaacccggcaggatgagcctgccctgttcgtggccctgaccttcgagcggcgggaggtcctggactcctccaatatcaaaccaatgaacctgatcggcgtggcaagaggcgaaaacatccccgccgtgatcgccctgaccgaccccgagggctgcccactgagccggtttaaggatagcctgggaaacccaacccacatcctgagaatcggcgagagctataaggagaagcagcggaccatccaggccaagaaggaggtggagcagcggagagccggcggctacagccggaagtacgccagcaaagccaagaatctggcagacgatatggtgagaaacaccgctagagatctgctgtactacgccgtgacccaggatgccatgctgatcttcgccaacctgagccggggcttcggccggcagggcaagcggaccttcatggccgagagacagtacacacggatggaggactggctgaccgccaagctggcctacgagggcctgagcaagacctacctgtccaagacactggcccagtacacctccaagacatgcagcaactgtgggtttaccatcaccagcgccgactacgacagggtgctggagaagctgaagaagacagcaacaggctggatgaccacaattaacggcaaggagctgaaggtggagggccagattacctactacaacagatacaagagacagaacgtagtcaaggacctgtccgtcgagctggatagactgagcgaagaatctgtgaacaacgacatctcctcctggacaaagggcagaagcggagaagctctgagcctcctgaagaaaagattctcccatagacccgtgcaggagaagttcgtgtgcctgaactgcggcttcgagacacacgcagccgagcaagccgccctgaacatcgccagatcctggctgttcctgcggagccaggagtacaagaaataccagacaaacaagacaaccggcaacaccgataagagagccttcgtcgagacctggcagtccttttaccggaagaagcttaaggaggtgtggaaacctgccgtgcggtctggcggatctggcggaggctccagcaaggcccccgtgaccttcggcgacctggtgatctacttcagccaggaggagtgggagtggctgagccccatccagaaggacctgtacgaggaggtgatgctggagaactaccacaccctggtgagcctgggcctggtgagcaggaggcccaacatcatcaccctgctggagaagggcaaggccccctggatggtggagcccagcaggaggaggaggggccccgagagcggcagcaagaggggcggcccaagcagcggcgcccctcctcccagcggcggcagcccagccggctccccaacctctaccgaggagggcacctctgagtccgccacccccgagagcggccctggcacctccaccgagcccagcgagggcagcgcacccggcagccctgccggcagccccacctccacagaggagggaaccagcaccgagcccagcgaaggcagcgccccaggcaccagcaccgagcctagtgagcaggagattaaacggatcaacaagatcagaagaagacttgtgaaagacagcaacaccaagaaggccggcaagacaggccccatgaaaaccctgctggttagagtgatgacacccgatctgagagagcggctggaaaacctgagaaagaagcctgaaaatatcccccagcccatcagcaatacatctagagccaacctgaataagctgctgaccgattacaccgaaatgaagaaggcgatcctgcatgtgtactgggaagagttccagaaggaccctgtgggcctgatgagccgggtggcccagcctgccagcaagaagatcgatcagaacaagctgaaacctgagatggacgagaagggcaacctgaccaccgccggctttgcctgctctcagtgtggccagcccctgttcgtgtacaagctggagcaggtgtctgagaagggcaaggcttacaccaactacttcggacggtgcaatgtggccgagcacgaaaagctgatcctgctggcccagctgaagcccgagaaggatagcgacgaagccgtgacatatagcctgggaaagtttgggcagagggccctggatttctacagcattcatgtgaccaaggagtccacccaccccgtgaagcccctggcccagatcgccggaaacagatacgcctccggacctgtgggaaaggccctgagcgacgcatgtatgggcacaatcgcctccttcctgtctaagtaccaggacatcatcatcgaacaccagaaggtggtgaagggcaaccagaagagactggagagcctgcgggagctggccggcaaggaaaacctggaataccctagcgtgaccctgccacctcagcctcacaccaaggagggcgttgatgcctacaacgaagtgatcgcccgggtgcgaatgtgggtgaacctgaacctgtggcagaagctgaagctaagcagagatgatgccaagcctctgctgagactgaagggattcccttcctttcctctggtcgagagacaggccaacgaagtggactggtgggacatggtgtgtaacgtgaagaagctgatcaacgagaaaaaggaggatggcaaggtgttttggcagaatctggctggctacaagagacaggaagccctgagaccatacctgagcagcgaggaagatcggaagaagggaaagaaattcgctcggtaccagctgggcgacctgctgctgcacctggaaaagaagcacggcgaggactggggaaaggtgtacgacgaggcctgggagcggattgacaagaaagtggaaggcctgagcaagcacatcaagctggaagaggaacggagaagcgaggacgcccagagcaaggccgccctgaccgactggctgcgggctaaggccagcttcgtgatcgagggcctgaaggaggccgacaaggacgagttctgcagatgcgagctgaagctgcagaagtggtacggggacctgcggggaaagcccttcgccatcgaagccgagaacagcatcctggacatcagcggcttcagcaagcagtacaactgtgccttcatctggcagaaggacggcgtgaagaagctgaacctgtacctgatcatcaactacttcaagggcggcaagctgcggttcaagaagatcaaacctgaagccttcgaagccaacagattctacaccgtgatcaacaaaaagagcggcgagatcgtgcccatggaggtgaacttcaacttcgacgaccccaacctgatcatcctgcctctggcctttggcaagagacagggcagagaattcatctggaacgacctgctgtccctggaaaccggcagcctgaagctggccaacggaagagtgatcgagaagacactgtacaacagaagaacccggcaggatgagcctgccctgttcgtggccctgaccttcgagcggcgggaggtcctggactcctccaatatcaaaccaatgaacctgatcggcgtggcaagaggcgaaaacatccccgccgtgatcgccctgaccgaccccgagggctgcccactgagccggtttaaggatagcctgggaaacccaacccacatcctgagaatcggcgagagctataaggagaagcagcggaccatccaggccaagaaggaggtggagcagcggagagccggcggctacagccggaagtacgccagcaaagccaagaatctggcagacgatatggtgagaaacaccgctagagatctgctgtactacgccgtgacccaggatgccatgctgatcttcgccaacctgagccggggcttcggccggcagggcaagcggaccttcatggccgagagacagtacacacggatggaggactggctgaccgccaagctggcctacgagggcctgagcaagacctacctgtccaagacactggcccagtacacctccaagacatgcagcaactgtgggtttaccatcaccagcgccgactacgacagggtgctggagaagctgaagaagacagcaacaggctggatgaccacaattaacggcaaggagctgaaggtggagggccagattacctactacaacagatacaagagacagaacgtagtcaaggacctgtccgtcgagctggatagactgagcgaagaatctgtgaacaacgacatctcctcctggacaaagggcagaagcggagaagctctgagcctcctgaagaaaagattctcccatagacccgtgcaggagaagttcgtgtgcctgaactgcggcttcgagacacacgcagccgagcaagccgccctgaacatcgccagatcctggctgttcctgcggagccaggagtacaagaaataccagacaaacaagacaaccggcaacaccgataagagagccttcgtcgagacctggcagtccttttaccggaagaagcttaaggaggtgtggaaacctgccgtgcggtctggcggatctggcggaggctcctagcaaggcccccgtgaccttcggcgacctggtgatctacttcagccaggaggagtgggagtggctgagccccatccagaaggacctgtacgaggaggtgatgctggagaactaccacaccctggtgagcctgggcctggtgagcaggaggcccaacatcatcaccctgctggagaagggcaaggccccctggatggtggagcccagcaggaggaggaggggccccgagagcggcagcaagaggggatctggctccggcagcggccccaagaaaaagagaaaagtctaagctgccttctgcggggcttgccttctggccatgcccttcttctctcccttgcacctgtacctcttggtctttgaataaagcctgagtaggaaggctagcaaaaaaaaaaaaaaaaaaaaaaaaaaaaaaaaaaaaaaaaaaaaaaaaaaaaaaaaaaaaaaaaaaaaaaaaaaaaaaaa

SEQ ID NO: 16005 - RNA, 9485 nt, synthetic construct
  source 1..9485: mol_type = other RNA
aggaaataagagagaaaagaagagtaagaagaaatataagagccaccatggcccctaagaagaagcgtaaagtgagccggatggaacgcctcgtctacgaggtgcggcagaagtgcagaaacatcgaggacatctgcatctcctgcggatctctgaacgtgaccctggagcacccactgttcatcggcggcatgtgccagaactgtaaaaactgttttctggagtgtgcctatcaatacgacgatgacggctaccagagctactgcaccatctgttgcggcggaagagaggtgctgatgtgtggaaataacaactgctgccggtgcttctgcgtggaatgcgtggacctgctggtgggccccggcgccgcccaggccgctattaaggaagatccttggaactgctacatgtgcggccacaagggcacatacggcctgctgagacggagagaggactggcctagcagactgcagatgttcttcgccaataaccacgaccaggagttcgacccccctaaggtgtaccctcccgtccccgccgagaagagaaagcccatccgggtcctgagcctgttcgatggcatcgccaccggtctgctggtgctgaaggacctgggcatccaggtggataggtacattgcctccgaggtgtgcgaggactccatcaccgtgggaatggtgcgtcatcagggcaagatcatgtacgtgggcgacgtgcggagcgtgacacagaagcatatccaggagtggggccctttcgacctggtgatcggcggcagcccttgcaatgacctgagcatcgtgaacccagcccggaagggcctgtacgagggaaccggcagactgttcttcgagttttacagactgctgcacgacgcccggcctaaggaaggcgacgaccggcccttcttttggctgttcgagaatgtggtggccatgggagtcagcgacaagcgggatattagccggttcctggagagcaaccccgtgatgatcgatgccaaggaagtgagcgccgcccaccgggccagatacttctggggcaatctgcctggcatgaacagacccctggccagcaccgtgaacgacaagctggagctgcaggagtgcctggagcacggccggatcgccaagttcagcaaggtgagaaccatcaccacccgaagcaacagcatcaaacaaggcaaggaccagcactttcctgtgttcatgaacgagaaggaggacatcctgtggtgtaccgagatggagagagtgttcgggttcccagtccactacacagatgtcagcaacatgtctagactggccagacagagactgctgggaagaagctggtccgtccctgtgatcagacacctgttcgcccctctgaaggagtacttcgcctgcgtgagcagcggcaacagcaacgccaacagccggggccccagcttctctagcggcctggtgccactgtccctgagagggagccacatgggccccatggagatctacaaaaccgtgagcgcctggaagcggcagcctgtgcgcgtgctgagcctgtttcggaatatcgataaagtcctgaaaagcctgggattcctggagagcggctctggctccggcggtggcaccctgaagtacgtggaggatgtgacaaacgtggtcagacgggatgtggagaagtggggccccttcgatctggtgtacggcagcacccaacccctgggcagctcttgtgaccggtgccctggctggtacatgtttcagttccaccggatcctgcagtacgccctgccgagacaggagtcccagcggccattcttttggattttcatggacaacttgctgctgaccgaggatgaccaggaaactaccactcggttcctgcagaccgaagccgtgaccctgcaggacgtgagaggccgggactaccagaacgccatgcgggtgtggtccaacatccctggactgaaaagcaagcacgcacctctgacccctaaagaagaggagtacctgcaggcccaggtgcggagcagaagcaagctggacgcccctaaggtggatctgctggtgaagaattgcctcctgcccctgagagagtacttcaagtatttcagccagaatagtctgcccctgggaggcagcggcggcggcgccctggtgacatttgaggacgtcgccgtgcggttcacccaggaggaatgggctctgctggatccttctcagaaaatcctgtaccgggacgtgatgagagagacataccggaatctgacctccgtgggcatcaactgggaatgttgggaccttgaagcctgcttcagaagcctgggaagaaacctgagagtgcaggtggtgaagagaaagtgcgagctgaccaacagcggcccctgcgccgagggcggcccaagcagcggcgcccctcctcccagcggcggcagcccagccggctccccaacctctaccgaggagggcacctctgagtccgccacccccgagagcggccctggcacctccaccgagcccagcgagggcagcgcacccggcagccctgccggcagccccacctccacagaggagggaaccagcaccgagcccagcgaaggcagcgccccaggcaccagcaccgagcctagtgagcaggagattaaacggatcaacaagatcagaagaagacttgtgaaagacagcaacaccaagaaggccggcaagacaggccccatgaaaaccctgctggttagagtgatgacacccgatctgagagagcggctggaaaacctgagaaagaagcctgaaaatatcccccagcccatcagcaatacatctagagccaacctgaataagctgctgaccgattacaccgaaatgaagaaggcgatcctgcatgtgtactgggaagagttccagaaggaccctgtgggcctgatgagccgggtggcccagcctgccagcaagaagatcgatcagaacaagctgaaacctgagatggacgagaagggcaacctgaccaccgccggctttgcctgctctcagtgtggccagcccctgttcgtgtacaagctggagcaggtgtctgagaagggcaaggcttacaccaactacttcggacggtgcaatgtggccgagcacgaaaagctgatcctgctggcccagctgaagcccgagaaggatagcgacgaagccgtgacatatagcctgggaaagtttgggcagagggccctggatttctacagcattcatgtgaccaaggagtccacccaccccgtgaagcccctggcccagatcgccggaaacagatacgcctccggacctgtgggaaaggccctgagcgacgcatgtatgggcacaatcgcctccttcctgtctaagtaccaggacatcatcatcgaacaccagaaggtggtgaagggcaaccagaagagactggagagcctgcgggagctggccggcaaggaaaacctggaataccctagcgtgaccctgccacctcagcctcacaccaaggagggcgttgatgcctacaacgaagtgatcgcccgggtgcgaatgtgggtgaacctgaacctgtggcagaagctgaagctaagcagagatgatgccaagcctctgctgagactgaagggattcccttcctttcctctggtcgagagacaggccaacgaagtggactggtgggacatggtgtgtaacgtgaagaagctgatcaacgagaaaaaggaggatggcaaggtgttttggcagaatctggctggctacaagagacaggaagccctgagaccatacctgagcagcgaggaagatcggaagaagggaaagaaattcgctcggtaccagctgggcgacctgctgctgcacctggaaaagaagcacggcgaggactggggaaaggtgtacgacgaggcctgggagcggattgacaagaaagtggaaggcctgagcaagcacatcaagctggaagaggaacggagaagcgaggacgcccagagcaaggccgccctgaccgactggctgcgggctaaggccagcttcgtgatcgagggcctgaaggaggccgacaaggacgagttctgcagatgcgagctgaagctgcagaagtggtacggggacctgcggggaaagcccttcgccatcgaagccgagaacagcatcctggacatcagcggcttcagcaagcagtacaactgtgccttcatctggcagaaggacggcgtgaagaagctgaacctgtacctgatcatcaactacttcaagggcggcaagctgcggttcaagaagatcaaacctgaagccttcgaagccaacagattctacaccgtgatcaacaaaaagagcggcgagatcgtgcccatggaggtgaacttcaacttcgacgaccccaacctgatcatcctgcctctggcctttggcaagagacagggcagagaattcatctggaacgacctgctgtccctggaaaccggcagcctgaagctggccaacggaagagtgatcgagaagacactgtacaacagaagaacccggcaggatgagcctgccctgttcgtggccctgaccttcgagcggcgggaggtcctggactcctccaatatcaaaccaatgaacctgatcggcgtggcaagaggcgaaaacatccccgccgtgatcgccctgaccgaccccgagggctgcccactgagccggtttaaggatagcctgggaaacccaacccacatcctgagaatcggcgagagctataaggagaagcagcggaccatccaggccaagaaggaggtggagcagcggagagccggcggctacagccggaagtacgccagcaaagccaagaatctggcagacgatatggtgagaaacaccgctagagatctgctgtactacgccgtgacccaggatgccatgctgatcttcgccaacctgagccggggcttcggccggcagggcaagcggaccttcatggccgagagacagtacacacggatggaggactggctgaccgccaagctggcctacgagggcctgagcaagacctacctgtccaagacactggcccagtacacctccaagacatgcagcaactgtgggtttaccatcaccagcgccgactacgacagggtgctggagaagctgaagaagacagcaacaggctggatgaccacaattaacggcaaggagctgaaggtggagggccagattacctactacaacagatacaagagacagaacgtagtcaaggacctgtccgtcgagctggatagactgagcgaagaatctgtgaacaacgacatctcctcctggacaaagggcagaagcggagaagctctgagcctcctgaagaaaagattctcccatagacccgtgcaggagaagttcgtgtgcctgaactgcggcttcgagacacacgcagccgagcaagccgccctgaacatcgccagatcctggctgttcctgcggagccaggagtacaagaaataccagacaaacaagacaaccggcaacaccgataagagagccttcgtcgagacctggcagtccttttaccggaagaagcttaaggaggtgtggaaacctgccgtgcggtctggcggatctggcggaggctccgagcccgtgagcttcgaggaggtggccgtgtacttcagcagggaggagtgggccctgctggaccccgcccagagggccctgtactgggacgtgatgctggagacctacgagtgcgtggccagcctggcccccctgcccggccccaagcccatggtgatcagcctgctggaggagggcgaggagccctggatccccgacgtgggcagccccgaggccgtggccggcgacgtgagccccggcgagggcggcccaagcagcggcgcccctcctcccagcggcggcagcccagccggctccccaacctctaccgaggagggcacctctgagtccgccacccccgagagcggccctggcacctccaccgagcccagcgagggcagcgcacccggcagccctgccggcagccccacctccacagaggagggaaccagcaccgagcccagcgaaggcagcgccccaggcaccagcaccgagcctagtgagcaggagattaaacggatcaacaagatcagaagaagacttgtgaaagacagcaacaccaagaaggccggcaagacaggccccatgaaaaccctgctggttagagtgatgacacccgatctgagagagcggctggaaaacctgagaaagaagcctgaaaatatcccccagcccatcagcaatacatctagagccaacctgaataagctgctgaccgattacaccgaaatgaagaaggcgatcctgcatgtgtactgggaagagttccagaaggaccctgtgggcctgatgagccgggtggcccagcctgccagcaagaagatcgatcagaacaagctgaaacctgagatggacgagaagggcaacctgaccaccgccggctttgcctgctctcagtgtggccagcccctgttcgtgtacaagctggagcaggtgtctgagaagggcaaggcttacaccaactacttcggacggtgcaatgtggccgagcacgaaaagctgatcctgctggcccagctgaagcccgagaaggatagcgacgaagccgtgacatatagcctgggaaagtttgggcagagggccctggatttctacagcattcatgtgaccaaggagtccacccaccccgtgaagcccctggcccagatcgccggaaacagatacgcctccggacctgtgggaaaggccctgagcgacgcatgtatgggcacaatcgcctccttcctgtctaagtaccaggacatcatcatcgaacaccagaaggtggtgaagggcaaccagaagagactggagagcctgcgggagctggccggcaaggaaaacctggaataccctagcgtgaccctgccacctcagcctcacaccaaggagggcgttgatgcctacaacgaagtgatcgcccgggtgcgaatgtgggtgaacctgaacctgtggcagaagctgaagctaagcagagatgatgccaagcctctgctgagactgaagggattcccttcctttcctctggtcgagagacaggccaacgaagtggactggtgggacatggtgtgtaacgtgaagaagctgatcaacgagaaaaaggaggatggcaaggtgttttggcagaatctggctggctacaagagacaggaagccctgagaccatacctgagcagcgaggaagatcggaagaagggaaagaaattcgctcggtaccagctgggcgacctgctgctgcacctggaaaagaagcacggcgaggactggggaaaggtgtacgacgaggcctgggagcggattgacaagaaagtggaaggcctgagcaagcacatcaagctggaagaggaacggagaagcgaggacgcccagagcaaggccgccctgaccgactggctgcgggctaaggccagcttcgtgatcgagggcctgaaggaggccgacaaggacgagttctgcagatgcgagctgaagctgcagaagtggtacggggacctgcggggaaagcccttcgccatcgaagccgagaacagcatcctggacatcagcggcttcagcaagcagtacaactgtgccttcatctggcagaaggacggcgtgaagaagctgaacctgtacctgatcatcaactacttcaagggcggcaagctgcggttcaagaagatcaaacctgaagccttcgaagccaacagattctacaccgtgatcaacaaaaagagcggcgagatcgtgcccatggaggtgaacttcaacttcgacgaccccaacctgatcatcctgcctctggcctttggcaagagacagggcagagaattcatctggaacgacctgctgtccctggaaaccggcagcctgaagctggccaacggaagagtgatcgagaagacactgtacaacagaagaacccggcaggatgagcctgccctgttcgtggccctgaccttcgagcggcgggaggtcctggactcctccaatatcaaaccaatgaacctgatcggcgtggcaagaggcgaaaacatccccgccgtgatcgccctgaccgaccccgagggctgcccactgagccggtttaaggatagcctgggaaacccaacccacatcctgagaatcggcgagagctataaggagaagcagcggaccatccaggccaagaaggaggtggagcagcggagagccggcggctacagccggaagtacgccagcaaagccaagaatctggcagacgatatggtgagaaacaccgctagagatctgctgtactacgccgtgacccaggatgccatgctgatcttcgccaacctgagccggggcttcggccggcagggcaagcggaccttcatggccgagagacagtacacacggatggaggactggctgaccgccaagctggcctacgagggcctgagcaagacctacctgtccaagacactggcccagtacacctccaagacatgcagcaactgtgggtttaccatcaccagcgccgactacgacagggtgctggagaagctgaagaagacagcaacaggctggatgaccacaattaacggcaaggagctgaaggtggagggccagattacctactacaacagatacaagagacagaacgtagtcaaggacctgtccgtcgagctggatagactgagcgaagaatctgtgaacaacgacatctcctcctggacaaagggcagaagcggagaagctctgagcctcctgaagaaaagattctcccatagacccgtgcaggagaagttcgtgtgcctgaactgcggcttcgagacacacgcagccgagcaagccgccctgaacatcgccagatcctggctgttcctgcggagccaggagtacaagaaataccagacaaacaagacaaccggcaacaccgataagagagccttcgtcgagacctggcagtccttttaccggaagaagcttaaggaggtgtggaaacctgccgtgcggtctggcggatctggcggaggctcctgagcccgtgagcttcgaggaggtggccgtgtacttcagcagggaggagtgggccctgctggaccccgcccagagggccctgtactgggacgtgatgctggagacctacgagtgcgtggccagcctggcccccctgcccggccccaagcccatggtgatcagcctgctggaggagggcgaggagccctggatccccgacgtgggcagccccgaggccgtggccggcgacgtgagccccggcgagggatctggctccggcagcggccccaagaaaaagagaaaagtctaagctgccttctgcggggcttgccttctggccatgcccttcttctctcccttgcacctgtacctcttggtctttgaataaagcctgagtaggaaggctagcaaaaaaaaaaaaaaaaaaaaaaaaaaaaaaaaaaaaaaaaaaaaaaaaaaaaaaaaaaaaaaaaaaaaaaaaaaaaaaaa

SEQ ID NO: 16006 - RNA, 9485 nt, synthetic construct
  source 1..9485: mol_type = other RNA
aggaaataagagagaaaagaagagtaagaagaaatataagagccaccatggcccctaagaagaagcgtaaagtgagccggatggaacgcctcgtctacgaggtgcggcagaagtgcagaaacatcgaggacatctgcatctcctgcggatctctgaacgtgaccctggagcacccactgttcatcggcggcatgtgccagaactgtaaaaactgttttctggagtgtgcctatcaatacgacgatgacggctaccagagctactgcaccatctgttgcggcggaagagaggtgctgatgtgtggaaataacaactgctgccggtgcttctgcgtggaatgcgtggacctgctggtgggccccggcgccgcccaggccgctattaaggaagatccttggaactgctacatgtgcggccacaagggcacatacggcctgctgagacggagagaggactggcctagcagactgcagatgttcttcgccaataaccacgaccaggagttcgacccccctaaggtgtaccctcccgtccccgccgagaagagaaagcccatccgggtcctgagcctgttcgatggcatcgccaccggtctgctggtgctgaaggacctgggcatccaggtggataggtacattgcctccgaggtgtgcgaggactccatcaccgtgggaatggtgcgtcatcagggcaagatcatgtacgtgggcgacgtgcggagcgtgacacagaagcatatccaggagtggggccctttcgacctggtgatcggcggcagcccttgcaatgacctgagcatcgtgaacccagcccggaagggcctgtacgagggaaccggcagactgttcttcgagttttacagactgctgcacgacgcccggcctaaggaaggcgacgaccggcccttcttttggctgttcgagaatgtggtggccatgggagtcagcgacaagcgggatattagccggttcctggagagcaaccccgtgatgatcgatgccaaggaagtgagcgccgcccaccgggccagatacttctggggcaatctgcctggcatgaacagacccctggccagcaccgtgaacgacaagctggagctgcaggagtgcctggagcacggccggatcgccaagttcagcaaggtgagaaccatcaccacccgaagcaacagcatcaaacaaggcaaggaccagcactttcctgtgttcatgaacgagaaggaggacatcctgtggtgtaccgagatggagagagtgttcgggttcccagtccactacacagatgtcagcaacatgtctagactggccagacagagactgctgggaagaagctggtccgtccctgtgatcagacacctgttcgcccctctgaaggagtacttcgcctgcgtgagcagcggcaacagcaacgccaacagccggggccccagcttctctagcggcctggtgccactgtccctgagagggagccacatgggccccatggagatctacaaaaccgtgagcgcctggaagcggcagcctgtgcgcgtgctgagcctgtttcggaatatcgataaagtcctgaaaagcctgggattcctggagagcggctctggctccggcggtggcaccctgaagtacgtggaggatgtgacaaacgtggtcagacgggatgtggagaagtggggccccttcgatctggtgtacggcagcacccaacccctgggcagctcttgtgaccggtgccctggctggtacatgtttcagttccaccggatcctgcagtacgccctgccgagacaggagtcccagcggccattcttttggattttcatggacaacttgctgctgaccgaggatgaccaggaaactaccactcggttcctgcagaccgaagccgtgaccctgcaggacgtgagaggccgggactaccagaacgccatgcgggtgtggtccaacatccctggactgaaaagcaagcacgcacctctgacccctaaagaagaggagtacctgcaggcccaggtgcggagcagaagcaagctggacgcccctaaggtggatctgctggtgaagaattgcctcctgcccctgagagagtacttcaagtatttcagccagaatagtctgcccctgggaggcagcggcggcggcgccctggtgacatttgaggacgtcgccgtgcggttcacccaggaggaatgggctctgctggatccttctcagaaaatcctgtaccgggacgtgatgagagagacataccggaatctgacctccgtgggcatcaactgggaatgttgggaccttgaagcctgcttcagaagcctgggaagaaacctgagagtgcaggtggtgaagagaaagtgcgagctgaccaacagcggcccctgcgccgagggcggcccaagcagcggcgcccctcctcccagcggcggcagcccagccggctccccaacctctaccgaggagggcacctctgagtccgccacccccgagagcggccctggcacctccaccgagcccagcgagggcagcgcacccggcagccctgccggcagccccacctccacagaggagggaaccagcaccgagcccagcgaaggcagcgccccaggcaccagcaccgagcctagtgagcaggagattaaacggatcaacaagatcagaagaagacttgtgaaagacagcaacaccaagaaggccggcaagacaggccccatgaaaaccctgctggttagagtgatgacacccgatctgagagagcggctggaaaacctgagaaagaagcctgaaaatatcccccagcccatcagcaatacatctagagccaacctgaataagctgctgaccgattacaccgaaatgaagaaggcgatcctgcatgtgtactgggaagagttccagaaggaccctgtgggcctgatgagccgggtggcccagcctgccagcaagaagatcgatcagaacaagctgaaacctgagatggacgagaagggcaacctgaccaccgccggctttgcctgctctcagtgtggccagcccctgttcgtgtacaagctggagcaggtgtctgagaagggcaaggcttacaccaactacttcggacggtgcaatgtggccgagcacgaaaagctgatcctgctggcccagctgaagcccgagaaggatagcgacgaagccgtgacatatagcctgggaaagtttgggcagagggccctggatttctacagcattcatgtgaccaaggagtccacccaccccgtgaagcccctggcccagatcgccggaaacagatacgcctccggacctgtgggaaaggccctgagcgacgcatgtatgggcacaatcgcctccttcctgtctaagtaccaggacatcatcatcgaacaccagaaggtggtgaagggcaaccagaagagactggagagcctgcgggagctggccggcaaggaaaacctggaataccctagcgtgaccctgccacctcagcctcacaccaaggagggcgttgatgcctacaacgaagtgatcgcccgggtgcgaatgtgggtgaacctgaacctgtggcagaagctgaagctaagcagagatgatgccaagcctctgctgagactgaagggattcccttcctttcctctggtcgagagacaggccaacgaagtggactggtgggacatggtgtgtaacgtgaagaagctgatcaacgagaaaaaggaggatggcaaggtgttttggcagaatctggctggctacaagagacaggaagccctgagaccatacctgagcagcgaggaagatcggaagaagggaaagaaattcgctcggtaccagctgggcgacctgctgctgcacctggaaaagaagcacggcgaggactggggaaaggtgtacgacgaggcctgggagcggattgacaagaaagtggaaggcctgagcaagcacatcaagctggaagaggaacggagaagcgaggacgcccagagcaaggccgccctgaccgactggctgcgggctaaggccagcttcgtgatcgagggcctgaaggaggccgacaaggacgagttctgcagatgcgagctgaagctgcagaagtggtacggggacctgcggggaaagcccttcgccatcgaagccgagaacagcatcctggacatcagcggcttcagcaagcagtacaactgtgccttcatctggcagaaggacggcgtgaagaagctgaacctgtacctgatcatcaactacttcaagggcggcaagctgcggttcaagaagatcaaacctgaagccttcgaagccaacagattctacaccgtgatcaacaaaaagagcggcgagatcgtgcccatggaggtgaacttcaacttcgacgaccccaacctgatcatcctgcctctggcctttggcaagagacagggcagagaattcatctggaacgacctgctgtccctggaaaccggcagcctgaagctggccaacggaagagtgatcgagaagacactgtacaacagaagaacccggcaggatgagcctgccctgttcgtggccctgaccttcgagcggcgggaggtcctggactcctccaatatcaaaccaatgaacctgatcggcgtggcaagaggcgaaaacatccccgccgtgatcgccctgaccgaccccgagggctgcccactgagccggtttaaggatagcctgggaaacccaacccacatcctgagaatcggcgagagctataaggagaagcagcggaccatccaggccaagaaggaggtggagcagcggagagccggcggctacagccggaagtacgccagcaaagccaagaatctggcagacgatatggtgagaaacaccgctagagatctgctgtactacgccgtgacccaggatgccatgctgatcttcgccaacctgagccggggcttcggccggcagggcaagcggaccttcatggccgagagacagtacacacggatggaggactggctgaccgccaagctggcctacgagggcctgagcaagacctacctgtccaagacactggcccagtacacctccaagacatgcagcaactgtgggtttaccatcaccagcgccgactacgacagggtgctggagaagctgaagaagacagcaacaggctggatgaccacaattaacggcaaggagctgaaggtggagggccagattacctactacaacagatacaagagacagaacgtagtcaaggacctgtccgtcgagctggatagactgagcgaagaatctgtgaacaacgacatctcctcctggacaaagggcagaagcggagaagctctgagcctcctgaagaaaagattctcccatagacccgtgcaggagaagttcgtgtgcctgaactgcggcttcgagacacacgcagccgagcaagccgccctgaacatcgccagatcctggctgttcctgcggagccaggagtacaagaaataccagacaaacaagacaaccggcaacaccgataagagagccttcgtcgagacctggcagtccttttaccggaagaagcttaaggaggtgtggaaacctgccgtgcggtctggcggatctggcggaggctccgcccagggcagcctgaccctgaaggacgtggccgtggacttcacctgggaggagtggcagctgctggaccccgaccagaaggacctgtacagggacgtgatgctggagaactacagcaacctggtgagcgtgggctaccaggtgaacaagcccgacatcctgagcatgctggagcagggcgagcccccctggaccctggaggacgaggtgcacagccacccccaccccgagaccgacaaggtgggcggcccaagcagcggcgcccctcctcccagcggcggcagcccagccggctccccaacctctaccgaggagggcacctctgagtccgccacccccgagagcggccctggcacctccaccgagcccagcgagggcagcgcacccggcagccctgccggcagccccacctccacagaggagggaaccagcaccgagcccagcgaaggcagcgccccaggcaccagcaccgagcctagtgagcaggagattaaacggatcaacaagatcagaagaagacttgtgaaagacagcaacaccaagaaggccggcaagacaggccccatgaaaaccctgctggttagagtgatgacacccgatctgagagagcggctggaaaacctgagaaagaagcctgaaaatatcccccagcccatcagcaatacatctagagccaacctgaataagctgctgaccgattacaccgaaatgaagaaggcgatcctgcatgtgtactgggaagagttccagaaggaccctgtgggcctgatgagccgggtggcccagcctgccagcaagaagatcgatcagaacaagctgaaacctgagatggacgagaagggcaacctgaccaccgccggctttgcctgctctcagtgtggccagcccctgttcgtgtacaagctggagcaggtgtctgagaagggcaaggcttacaccaactacttcggacggtgcaatgtggccgagcacgaaaagctgatcctgctggcccagctgaagcccgagaaggatagcgacgaagccgtgacatatagcctgggaaagtttgggcagagggccctggatttctacagcattcatgtgaccaaggagtccacccaccccgtgaagcccctggcccagatcgccggaaacagatacgcctccggacctgtgggaaaggccctgagcgacgcatgtatgggcacaatcgcctccttcctgtctaagtaccaggacatcatcatcgaacaccagaaggtggtgaagggcaaccagaagagactggagagcctgcgggagctggccggcaaggaaaacctggaataccctagcgtgaccctgccacctcagcctcacaccaaggagggcgttgatgcctacaacgaagtgatcgcccgggtgcgaatgtgggtgaacctgaacctgtggcagaagctgaagctaagcagagatgatgccaagcctctgctgagactgaagggattcccttcctttcctctggtcgagagacaggccaacgaagtggactggtgggacatggtgtgtaacgtgaagaagctgatcaacgagaaaaaggaggatggcaaggtgttttggcagaatctggctggctacaagagacaggaagccctgagaccatacctgagcagcgaggaagatcggaagaagggaaagaaattcgctcggtaccagctgggcgacctgctgctgcacctggaaaagaagcacggcgaggactggggaaaggtgtacgacgaggcctgggagcggattgacaagaaagtggaaggcctgagcaagcacatcaagctggaagaggaacggagaagcgaggacgcccagagcaaggccgccctgaccgactggctgcgggctaaggccagcttcgtgatcgagggcctgaaggaggccgacaaggacgagttctgcagatgcgagctgaagctgcagaagtggtacggggacctgcggggaaagcccttcgccatcgaagccgagaacagcatcctggacatcagcggcttcagcaagcagtacaactgtgccttcatctggcagaaggacggcgtgaagaagctgaacctgtacctgatcatcaactacttcaagggcggcaagctgcggttcaagaagatcaaacctgaagccttcgaagccaacagattctacaccgtgatcaacaaaaagagcggcgagatcgtgcccatggaggtgaacttcaacttcgacgaccccaacctgatcatcctgcctctggcctttggcaagagacagggcagagaattcatctggaacgacctgctgtccctggaaaccggcagcctgaagctggccaacggaagagtgatcgagaagacactgtacaacagaagaacccggcaggatgagcctgccctgttcgtggccctgaccttcgagcggcgggaggtcctggactcctccaatatcaaaccaatgaacctgatcggcgtggcaagaggcgaaaacatccccgccgtgatcgccctgaccgaccccgagggctgcccactgagccggtttaaggatagcctgggaaacccaacccacatcctgagaatcggcgagagctataaggagaagcagcggaccatccaggccaagaaggaggtggagcagcggagagccggcggctacagccggaagtacgccagcaaagccaagaatctggcagacgatatggtgagaaacaccgctagagatctgctgtactacgccgtgacccaggatgccatgctgatcttcgccaacctgagccggggcttcggccggcagggcaagcggaccttcatggccgagagacagtacacacggatggaggactggctgaccgccaagctggcctacgagggcctgagcaagacctacctgtccaagacactggcccagtacacctccaagacatgcagcaactgtgggtttaccatcaccagcgccgactacgacagggtgctggagaagctgaagaagacagcaacaggctggatgaccacaattaacggcaaggagctgaaggtggagggccagattacctactacaacagatacaagagacagaacgtagtcaaggacctgtccgtcgagctggatagactgagcgaagaatctgtgaacaacgacatctcctcctggacaaagggcagaagcggagaagctctgagcctcctgaagaaaagattctcccatagacccgtgcaggagaagttcgtgtgcctgaactgcggcttcgagacacacgcagccgagcaagccgccctgaacatcgccagatcctggctgttcctgcggagccaggagtacaagaaataccagacaaacaagacaaccggcaacaccgataagagagccttcgtcgagacctggcagtccttttaccggaagaagcttaaggaggtgtggaaacctgccgtgcggtctggcggatctggcggaggctcctgcccagggcagcctgaccctgaaggacgtggccgtggacttcacctgggaggagtggcagctgctggaccccgaccagaaggacctgtacagggacgtgatgctggagaactacagcaacctggtgagcgtgggctaccaggtgaacaagcccgacatcctgagcatgctggagcagggcgagcccccctggaccctggaggacgaggtgcacagccacccccaccccgagaccgacaaggtgggatctggctccggcagcggccccaagaaaaagagaaaagtctaagctgccttctgcggggcttgccttctggccatgcccttcttctctcccttgcacctgtacctcttggtctttgaataaagcctgagtaggaaggctagcaaaaaaaaaaaaaaaaaaaaaaaaaaaaaaaaaaaaaaaaaaaaaaaaaaaaaaaaaaaaaaaaaaaaaaaaaaaaaaaa

SEQ ID NO: 16007 - RNA, 9485 nt, synthetic construct
  source 1..9485: mol_type = other RNA
aggaaataagagagaaaagaagagtaagaagaaatataagagccaccatggcccctaagaagaagcgtaaagtgagccggatggaacgcctcgtctacgaggtgcggcagaagtgcagaaacatcgaggacatctgcatctcctgcggatctctgaacgtgaccctggagcacccactgttcatcggcggcatgtgccagaactgtaaaaactgttttctggagtgtgcctatcaatacgacgatgacggctaccagagctactgcaccatctgttgcggcggaagagaggtgctgatgtgtggaaataacaactgctgccggtgcttctgcgtggaatgcgtggacctgctggtgggccccggcgccgcccaggccgctattaaggaagatccttggaactgctacatgtgcggccacaagggcacatacggcctgctgagacggagagaggactggcctagcagactgcagatgttcttcgccaataaccacgaccaggagttcgacccccctaaggtgtaccctcccgtccccgccgagaagagaaagcccatccgggtcctgagcctgttcgatggcatcgccaccggtctgctggtgctgaaggacctgggcatccaggtggataggtacattgcctccgaggtgtgcgaggactccatcaccgtgggaatggtgcgtcatcagggcaagatcatgtacgtgggcgacgtgcggagcgtgacacagaagcatatccaggagtggggccctttcgacctggtgatcggcggcagcccttgcaatgacctgagcatcgtgaacccagcccggaagggcctgtacgagggaaccggcagactgttcttcgagttttacagactgctgcacgacgcccggcctaaggaaggcgacgaccggcccttcttttggctgttcgagaatgtggtggccatgggagtcagcgacaagcgggatattagccggttcctggagagcaaccccgtgatgatcgatgccaaggaagtgagcgccgcccaccgggccagatacttctggggcaatctgcctggcatgaacagacccctggccagcaccgtgaacgacaagctggagctgcaggagtgcctggagcacggccggatcgccaagttcagcaaggtgagaaccatcaccacccgaagcaacagcatcaaacaaggcaaggaccagcactttcctgtgttcatgaacgagaaggaggacatcctgtggtgtaccgagatggagagagtgttcgggttcccagtccactacacagatgtcagcaacatgtctagactggccagacagagactgctgggaagaagctggtccgtccctgtgatcagacacctgttcgcccctctgaaggagtacttcgcctgcgtgagcagcggcaacagcaacgccaacagccggggccccagcttctctagcggcctggtgccactgtccctgagagggagccacatgggccccatggagatctacaaaaccgtgagcgcctggaagcggcagcctgtgcgcgtgctgagcctgtttcggaatatcgataaagtcctgaaaagcctgggattcctggagagcggctctggctccggcggtggcaccctgaagtacgtggaggatgtgacaaacgtggtcagacgggatgtggagaagtggggccccttcgatctggtgtacggcagcacccaacccctgggcagctcttgtgaccggtgccctggctggtacatgtttcagttccaccggatcctgcagtacgccctgccgagacaggagtcccagcggccattcttttggattttcatggacaacttgctgctgaccgaggatgaccaggaaactaccactcggttcctgcagaccgaagccgtgaccctgcaggacgtgagaggccgggactaccagaacgccatgcgggtgtggtccaacatccctggactgaaaagcaagcacgcacctctgacccctaaagaagaggagtacctgcaggcccaggtgcggagcagaagcaagctggacgcccctaaggtggatctgctggtgaagaattgcctcctgcccctgagagagtacttcaagtatttcagccagaatagtctgcccctgggaggcagcggcggcggcgccctggtgacatttgaggacgtcgccgtgcggttcacccaggaggaatgggctctgctggatccttctcagaaaatcctgtaccgggacgtgatgagagagacataccggaatctgacctccgtgggcatcaactgggaatgttgggaccttgaagcctgcttcagaagcctgggaagaaacctgagagtgcaggtggtgaagagaaagtgcgagctgaccaacagcggcccctgcgccgagggcggcccaagcagcggcgcccctcctcccagcggcggcagcccagccggctccccaacctctaccgaggagggcacctctgagtccgccacccccgagagcggccctggcacctccaccgagcccagcgagggcagcgcacccggcagccctgccggcagccccacctccacagaggagggaaccagcaccgagcccagcgaaggcagcgccccaggcaccagcaccgagcctagtgagcaggagattaaacggatcaacaagatcagaagaagacttgtgaaagacagcaacaccaagaaggccggcaagacaggccccatgaaaaccctgctggttagagtgatgacacccgatctgagagagcggctggaaaacctgagaaagaagcctgaaaatatcccccagcccatcagcaatacatctagagccaacctgaataagctgctgaccgattacaccgaaatgaagaaggcgatcctgcatgtgtactgggaagagttccagaaggaccctgtgggcctgatgagccgggtggcccagcctgccagcaagaagatcgatcagaacaagctgaaacctgagatggacgagaagggcaacctgaccaccgccggctttgcctgctctcagtgtggccagcccctgttcgtgtacaagctggagcaggtgtctgagaagggcaaggcttacaccaactacttcggacggtgcaatgtggccgagcacgaaaagctgatcctgctggcccagctgaagcccgagaaggatagcgacgaagccgtgacatatagcctgggaaagtttgggcagagggccctggatttctacagcattcatgtgaccaaggagtccacccaccccgtgaagcccctggcccagatcgccggaaacagatacgcctccggacctgtgggaaaggccctgagcgacgcatgtatgggcacaatcgcctccttcctgtctaagtaccaggacatcatcatcgaacaccagaaggtggtgaagggcaaccagaagagactggagagcctgcgggagctggccggcaaggaaaacctggaataccctagcgtgaccctgccacctcagcctcacaccaaggagggcgttgatgcctacaacgaagtgatcgcccgggtgcgaatgtgggtgaacctgaacctgtggcagaagctgaagctaagcagagatgatgccaagcctctgctgagactgaagggattcccttcctttcctctggtcgagagacaggccaacgaagtggactggtgggacatggtgtgtaacgtgaagaagctgatcaacgagaaaaaggaggatggcaaggtgttttggcagaatctggctggctacaagagacaggaagccctgagaccatacctgagcagcgaggaagatcggaagaagggaaagaaattcgctcggtaccagctgggcgacctgctgctgcacctggaaaagaagcacggcgaggactggggaaaggtgtacgacgaggcctgggagcggattgacaagaaagtggaaggcctgagcaagcacatcaagctggaagaggaacggagaagcgaggacgcccagagcaaggccgccctgaccgactggctgcgggctaaggccagcttcgtgatcgagggcctgaaggaggccgacaaggacgagttctgcagatgcgagctgaagctgcagaagtggtacggggacctgcggggaaagcccttcgccatcgaagccgagaacagcatcctggacatcagcggcttcagcaagcagtacaactgtgccttcatctggcagaaggacggcgtgaagaagctgaacctgtacctgatcatcaactacttcaagggcggcaagctgcggttcaagaagatcaaacctgaagccttcgaagccaacagattctacaccgtgatcaacaaaaagagcggcgagatcgtgcccatggaggtgaacttcaacttcgacgaccccaacctgatcatcctgcctctggcctttggcaagagacagggcagagaattcatctggaacgacctgctgtccctggaaaccggcagcctgaagctggccaacggaagagtgatcgagaagacactgtacaacagaagaacccggcaggatgagcctgccctgttcgtggccctgaccttcgagcggcgggaggtcctggactcctccaatatcaaaccaatgaacctgatcggcgtggcaagaggcgaaaacatccccgccgtgatcgccctgaccgaccccgagggctgcccactgagccggtttaaggatagcctgggaaacccaacccacatcctgagaatcggcgagagctataaggagaagcagcggaccatccaggccaagaaggaggtggagcagcggagagccggcggctacagccggaagtacgccagcaaagccaagaatctggcagacgatatggtgagaaacaccgctagagatctgctgtactacgccgtgacccaggatgccatgctgatcttcgccaacctgagccggggcttcggccggcagggcaagcggaccttcatggccgagagacagtacacacggatggaggactggctgaccgccaagctggcctacgagggcctgagcaagacctacctgtccaagacactggcccagtacacctccaagacatgcagcaactgtgggtttaccatcaccagcgccgactacgacagggtgctggagaagctgaagaagacagcaacaggctggatgaccacaattaacggcaaggagctgaaggtggagggccagattacctactacaacagatacaagagacagaacgtagtcaaggacctgtccgtcgagctggatagactgagcgaagaatctgtgaacaacgacatctcctcctggacaaagggcagaagcggagaagctctgagcctcctgaagaaaagattctcccatagacccgtgcaggagaagttcgtgtgcctgaactgcggcttcgagacacacgcagccgagcaagccgccctgaacatcgccagatcctggctgttcctgcggagccaggagtacaagaaataccagacaaacaagacaaccggcaacaccgataagagagccttcgtcgagacctggcagtccttttaccggaagaagcttaaggaggtgtggaaacctgccgtgcggtctggcggatctggcggaggctccatgttccaggacagcgtggccttcgaggacgtggccgtgaccttcacccaggaggagtgggccctgctggaccccagccagaagaccctgtacagggacgtgatgcaggagaacttcaggaacctggccagcgtgggcaagaagtggaaggcccagaacatctacgtggagtacaagaacctgaggaggaacctgaggaacctgatgggcaagaggctgttcgagagcaaggaggaccaccagggcggcccaagcagcggcgcccctcctcccagcggcggcagcccagccggctccccaacctctaccgaggagggcacctctgagtccgccacccccgagagcggccctggcacctccaccgagcccagcgagggcagcgcacccggcagccctgccggcagccccacctccacagaggagggaaccagcaccgagcccagcgaaggcagcgccccaggcaccagcaccgagcctagtgagcaggagattaaacggatcaacaagatcagaagaagacttgtgaaagacagcaacaccaagaaggccggcaagacaggccccatgaaaaccctgctggttagagtgatgacacccgatctgagagagcggctggaaaacctgagaaagaagcctgaaaatatcccccagcccatcagcaatacatctagagccaacctgaataagctgctgaccgattacaccgaaatgaagaaggcgatcctgcatgtgtactgggaagagttccagaaggaccctgtgggcctgatgagccgggtggcccagcctgccagcaagaagatcgatcagaacaagctgaaacctgagatggacgagaagggcaacctgaccaccgccggctttgcctgctctcagtgtggccagcccctgttcgtgtacaagctggagcaggtgtctgagaagggcaaggcttacaccaactacttcggacggtgcaatgtggccgagcacgaaaagctgatcctgctggcccagctgaagcccgagaaggatagcgacgaagccgtgacatatagcctgggaaagtttgggcagagggccctggatttctacagcattcatgtgaccaaggagtccacccaccccgtgaagcccctggcccagatcgccggaaacagatacgcctccggacctgtgggaaaggccctgagcgacgcatgtatgggcacaatcgcctccttcctgtctaagtaccaggacatcatcatcgaacaccagaaggtggtgaagggcaaccagaagagactggagagcctgcgggagctggccggcaaggaaaacctggaataccctagcgtgaccctgccacctcagcctcacaccaaggagggcgttgatgcctacaacgaagtgatcgcccgggtgcgaatgtgggtgaacctgaacctgtggcagaagctgaagctaagcagagatgatgccaagcctctgctgagactgaagggattcccttcctttcctctggtcgagagacaggccaacgaagtggactggtgggacatggtgtgtaacgtgaagaagctgatcaacgagaaaaaggaggatggcaaggtgttttggcagaatctggctggctacaagagacaggaagccctgagaccatacctgagcagcgaggaagatcggaagaagggaaagaaattcgctcggtaccagctgggcgacctgctgctgcacctggaaaagaagcacggcgaggactggggaaaggtgtacgacgaggcctgggagcggattgacaagaaagtggaaggcctgagcaagcacatcaagctggaagaggaacggagaagcgaggacgcccagagcaaggccgccctgaccgactggctgcgggctaaggccagcttcgtgatcgagggcctgaaggaggccgacaaggacgagttctgcagatgcgagctgaagctgcagaagtggtacggggacctgcggggaaagcccttcgccatcgaagccgagaacagcatcctggacatcagcggcttcagcaagcagtacaactgtgccttcatctggcagaaggacggcgtgaagaagctgaacctgtacctgatcatcaactacttcaagggcggcaagctgcggttcaagaagatcaaacctgaagccttcgaagccaacagattctacaccgtgatcaacaaaaagagcggcgagatcgtgcccatggaggtgaacttcaacttcgacgaccccaacctgatcatcctgcctctggcctttggcaagagacagggcagagaattcatctggaacgacctgctgtccctggaaaccggcagcctgaagctggccaacggaagagtgatcgagaagacactgtacaacagaagaacccggcaggatgagcctgccctgttcgtggccctgaccttcgagcggcgggaggtcctggactcctccaatatcaaaccaatgaacctgatcggcgtggcaagaggcgaaaacatccccgccgtgatcgccctgaccgaccccgagggctgcccactgagccggtttaaggatagcctgggaaacccaacccacatcctgagaatcggcgagagctataaggagaagcagcggaccatccaggccaagaaggaggtggagcagcggagagccggcggctacagccggaagtacgccagcaaagccaagaatctggcagacgatatggtgagaaacaccgctagagatctgctgtactacgccgtgacccaggatgccatgctgatcttcgccaacctgagccggggcttcggccggcagggcaagcggaccttcatggccgagagacagtacacacggatggaggactggctgaccgccaagctggcctacgagggcctgagcaagacctacctgtccaagacactggcccagtacacctccaagacatgcagcaactgtgggtttaccatcaccagcgccgactacgacagggtgctggagaagctgaagaagacagcaacaggctggatgaccacaattaacggcaaggagctgaaggtggagggccagattacctactacaacagatacaagagacagaacgtagtcaaggacctgtccgtcgagctggatagactgagcgaagaatctgtgaacaacgacatctcctcctggacaaagggcagaagcggagaagctctgagcctcctgaagaaaagattctcccatagacccgtgcaggagaagttcgtgtgcctgaactgcggcttcgagacacacgcagccgagcaagccgccctgaacatcgccagatcctggctgttcctgcggagccaggagtacaagaaataccagacaaacaagacaaccggcaacaccgataagagagccttcgtcgagacctggcagtccttttaccggaagaagcttaaggaggtgtggaaacctgccgtgcggtctggcggatctggcggaggctcctatgttccaggacagcgtggccttcgaggacgtggccgtgaccttcacccaggaggagtgggccctgctggaccccagccagaagaccctgtacagggacgtgatgcaggagaacttcaggaacctggccagcgtgggcaagaagtggaaggcccagaacatctacgtggagtacaagaacctgaggaggaacctgaggaacctgatgggcaagaggctgttcgagagcaaggaggaccaccagggatctggctccggcagcggccccaagaaaaagagaaaagtctaagctgccttctgcggggcttgccttctggccatgcccttcttctctcccttgcacctgtacctcttggtctttgaataaagcctgagtaggaaggctagcaaaaaaaaaaaaaaaaaaaaaaaaaaaaaaaaaaaaaaaaaaaaaaaaaaaaaaaaaaaaaaaaaaaaaaaaaaaaaaaa

SEQ ID NO: 16008 - RNA, 9485 nt, synthetic construct
  source 1..9485: mol_type = other RNA
aggaaataagagagaaaagaagagtaagaagaaatataagagccaccatggcccctaagaagaagcgtaaagtgagccggatggaacgcctcgtctacgaggtgcggcagaagtgcagaaacatcgaggacatctgcatctcctgcggatctctgaacgtgaccctggagcacccactgttcatcggcggcatgtgccagaactgtaaaaactgttttctggagtgtgcctatcaatacgacgatgacggctaccagagctactgcaccatctgttgcggcggaagagaggtgctgatgtgtggaaataacaactgctgccggtgcttctgcgtggaatgcgtggacctgctggtgggccccggcgccgcccaggccgctattaaggaagatccttggaactgctacatgtgcggccacaagggcacatacggcctgctgagacggagagaggactggcctagcagactgcagatgttcttcgccaataaccacgaccaggagttcgacccccctaaggtgtaccctcccgtccccgccgagaagagaaagcccatccgggtcctgagcctgttcgatggcatcgccaccggtctgctggtgctgaaggacctgggcatccaggtggataggtacattgcctccgaggtgtgcgaggactccatcaccgtgggaatggtgcgtcatcagggcaagatcatgtacgtgggcgacgtgcggagcgtgacacagaagcatatccaggagtggggccctttcgacctggtgatcggcggcagcccttgcaatgacctgagcatcgtgaacccagcccggaagggcctgtacgagggaaccggcagactgttcttcgagttttacagactgctgcacgacgcccggcctaaggaaggcgacgaccggcccttcttttggctgttcgagaatgtggtggccatgggagtcagcgacaagcgggatattagccggttcctggagagcaaccccgtgatgatcgatgccaaggaagtgagcgccgcccaccgggccagatacttctggggcaatctgcctggcatgaacagacccctggccagcaccgtgaacgacaagctggagctgcaggagtgcctggagcacggccggatcgccaagttcagcaaggtgagaaccatcaccacccgaagcaacagcatcaaacaaggcaaggaccagcactttcctgtgttcatgaacgagaaggaggacatcctgtggtgtaccgagatggagagagtgttcgggttcccagtccactacacagatgtcagcaacatgtctagactggccagacagagactgctgggaagaagctggtccgtccctgtgatcagacacctgttcgcccctctgaaggagtacttcgcctgcgtgagcagcggcaacagcaacgccaacagccggggccccagcttctctagcggcctggtgccactgtccctgagagggagccacatgggccccatggagatctacaaaaccgtgagcgcctggaagcggcagcctgtgcgcgtgctgagcctgtttcggaatatcgataaagtcctgaaaagcctgggattcctggagagcggctctggctccggcggtggcaccctgaagtacgtggaggatgtgacaaacgtggtcagacgggatgtggagaagtggggccccttcgatctggtgtacggcagcacccaacccctgggcagctcttgtgaccggtgccctggctggtacatgtttcagttccaccggatcctgcagtacgccctgccgagacaggagtcccagcggccattcttttggattttcatggacaacttgctgctgaccgaggatgaccaggaaactaccactcggttcctgcagaccgaagccgtgaccctgcaggacgtgagaggccgggactaccagaacgccatgcgggtgtggtccaacatccctggactgaaaagcaagcacgcacctctgacccctaaagaagaggagtacctgcaggcccaggtgcggagcagaagcaagctggacgcccctaaggtggatctgctggtgaagaattgcctcctgcccctgagagagtacttcaagtatttcagccagaatagtctgcccctgggaggcagcggcggcggcgccctggtgacatttgaggacgtcgccgtgcggttcacccaggaggaatgggctctgctggatccttctcagaaaatcctgtaccgggacgtgatgagagagacataccggaatctgacctccgtgggcatcaactgggaatgttgggaccttgaagcctgcttcagaagcctgggaagaaacctgagagtgcaggtggtgaagagaaagtgcgagctgaccaacagcggcccctgcgccgagggcggcccaagcagcggcgcccctcctcccagcggcggcagcccagccggctccccaacctctaccgaggagggcacctctgagtccgccacccccgagagcggccctggcacctccaccgagcccagcgagggcagcgcacccggcagccctgccggcagccccacctccacagaggagggaaccagcaccgagcccagcgaaggcagcgccccaggcaccagcaccgagcctagtgagcaggagattaaacggatcaacaagatcagaagaagacttgtgaaagacagcaacaccaagaaggccggcaagacaggccccatgaaaaccctgctggttagagtgatgacacccgatctgagagagcggctggaaaacctgagaaagaagcctgaaaatatcccccagcccatcagcaatacatctagagccaacctgaataagctgctgaccgattacaccgaaatgaagaaggcgatcctgcatgtgtactgggaagagttccagaaggaccctgtgggcctgatgagccgggtggcccagcctgccagcaagaagatcgatcagaacaagctgaaacctgagatggacgagaagggcaacctgaccaccgccggctttgcctgctctcagtgtggccagcccctgttcgtgtacaagctggagcaggtgtctgagaagggcaaggcttacaccaactacttcggacggtgcaatgtggccgagcacgaaaagctgatcctgctggcccagctgaagcccgagaaggatagcgacgaagccgtgacatatagcctgggaaagtttgggcagagggccctggatttctacagcattcatgtgaccaaggagtccacccaccccgtgaagcccctggcccagatcgccggaaacagatacgcctccggacctgtgggaaaggccctgagcgacgcatgtatgggcacaatcgcctccttcctgtctaagtaccaggacatcatcatcgaacaccagaaggtggtgaagggcaaccagaagagactggagagcctgcgggagctggccggcaaggaaaacctggaataccctagcgtgaccctgccacctcagcctcacaccaaggagggcgttgatgcctacaacgaagtgatcgcccgggtgcgaatgtgggtgaacctgaacctgtggcagaagctgaagctaagcagagatgatgccaagcctctgctgagactgaagggattcccttcctttcctctggtcgagagacaggccaacgaagtggactggtgggacatggtgtgtaacgtgaagaagctgatcaacgagaaaaaggaggatggcaaggtgttttggcagaatctggctggctacaagagacaggaagccctgagaccatacctgagcagcgaggaagatcggaagaagggaaagaaattcgctcggtaccagctgggcgacctgctgctgcacctggaaaagaagcacggcgaggactggggaaaggtgtacgacgaggcctgggagcggattgacaagaaagtggaaggcctgagcaagcacatcaagctggaagaggaacggagaagcgaggacgcccagagcaaggccgccctgaccgactggctgcgggctaaggccagcttcgtgatcgagggcctgaaggaggccgacaaggacgagttctgcagatgcgagctgaagctgcagaagtggtacggggacctgcggggaaagcccttcgccatcgaagccgagaacagcatcctggacatcagcggcttcagcaagcagtacaactgtgccttcatctggcagaaggacggcgtgaagaagctgaacctgtacctgatcatcaactacttcaagggcggcaagctgcggttcaagaagatcaaacctgaagccttcgaagccaacagattctacaccgtgatcaacaaaaagagcggcgagatcgtgcccatggaggtgaacttcaacttcgacgaccccaacctgatcatcctgcctctggcctttggcaagagacagggcagagaattcatctggaacgacctgctgtccctggaaaccggcagcctgaagctggccaacggaagagtgatcgagaagacactgtacaacagaagaacccggcaggatgagcctgccctgttcgtggccctgaccttcgagcggcgggaggtcctggactcctccaatatcaaaccaatgaacctgatcggcgtggcaagaggcgaaaacatccccgccgtgatcgccctgaccgaccccgagggctgcccactgagccggtttaaggatagcctgggaaacccaacccacatcctgagaatcggcgagagctataaggagaagcagcggaccatccaggccaagaaggaggtggagcagcggagagccggcggctacagccggaagtacgccagcaaagccaagaatctggcagacgatatggtgagaaacaccgctagagatctgctgtactacgccgtgacccaggatgccatgctgatcttcgccaacctgagccggggcttcggccggcagggcaagcggaccttcatggccgagagacagtacacacggatggaggactggctgaccgccaagctggcctacgagggcctgagcaagacctacctgtccaagacactggcccagtacacctccaagacatgcagcaactgtgggtttaccatcaccagcgccgactacgacagggtgctggagaagctgaagaagacagcaacaggctggatgaccacaattaacggcaaggagctgaaggtggagggccagattacctactacaacagatacaagagacagaacgtagtcaaggacctgtccgtcgagctggatagactgagcgaagaatctgtgaacaacgacatctcctcctggacaaagggcagaagcggagaagctctgagcctcctgaagaaaagattctcccatagacccgtgcaggagaagttcgtgtgcctgaactgcggcttcgagacacacgcagccgagcaagccgccctgaacatcgccagatcctggctgttcctgcggagccaggagtacaagaaataccagacaaacaagacaaccggcaacaccgataagagagccttcgtcgagacctggcagtccttttaccggaagaagcttaaggaggtgtggaaacctgccgtgcggtctggcggatctggcggaggctccttcctgctgggcctgctgaccttcagggacgtggccatcgagttcagccaggaggagtggggctgcctgaaccacacccagagggagctgtacagggacgtgatgctggagaactacggccacctgctgttcctgggcctgatcgtgagcaagcccgacctggtgagcttcctggagcagaagaaggagccctgggacgtgaagaggaagaagaccgtggccatccacaggggcaggtgggagggcggcccaagcagcggcgcccctcctcccagcggcggcagcccagccggctccccaacctctaccgaggagggcacctctgagtccgccacccccgagagcggccctggcacctccaccgagcccagcgagggcagcgcacccggcagccctgccggcagccccacctccacagaggagggaaccagcaccgagcccagcgaaggcagcgccccaggcaccagcaccgagcctagtgagcaggagattaaacggatcaacaagatcagaagaagacttgtgaaagacagcaacaccaagaaggccggcaagacaggccccatgaaaaccctgctggttagagtgatgacacccgatctgagagagcggctggaaaacctgagaaagaagcctgaaaatatcccccagcccatcagcaatacatctagagccaacctgaataagctgctgaccgattacaccgaaatgaagaaggcgatcctgcatgtgtactgggaagagttccagaaggaccctgtgggcctgatgagccgggtggcccagcctgccagcaagaagatcgatcagaacaagctgaaacctgagatggacgagaagggcaacctgaccaccgccggctttgcctgctctcagtgtggccagcccctgttcgtgtacaagctggagcaggtgtctgagaagggcaaggcttacaccaactacttcggacggtgcaatgtggccgagcacgaaaagctgatcctgctggcccagctgaagcccgagaaggatagcgacgaagccgtgacatatagcctgggaaagtttgggcagagggccctggatttctacagcattcatgtgaccaaggagtccacccaccccgtgaagcccctggcccagatcgccggaaacagatacgcctccggacctgtgggaaaggccctgagcgacgcatgtatgggcacaatcgcctccttcctgtctaagtaccaggacatcatcatcgaacaccagaaggtggtgaagggcaaccagaagagactggagagcctgcgggagctggccggcaaggaaaacctggaataccctagcgtgaccctgccacctcagcctcacaccaaggagggcgttgatgcctacaacgaagtgatcgcccgggtgcgaatgtgggtgaacctgaacctgtggcagaagctgaagctaagcagagatgatgccaagcctctgctgagactgaagggattcccttcctttcctctggtcgagagacaggccaacgaagtggactggtgggacatggtgtgtaacgtgaagaagctgatcaacgagaaaaaggaggatggcaaggtgttttggcagaatctggctggctacaagagacaggaagccctgagaccatacctgagcagcgaggaagatcggaagaagggaaagaaattcgctcggtaccagctgggcgacctgctgctgcacctggaaaagaagcacggcgaggactggggaaaggtgtacgacgaggcctgggagcggattgacaagaaagtggaaggcctgagcaagcacatcaagctggaagaggaacggagaagcgaggacgcccagagcaaggccgccctgaccgactggctgcgggctaaggccagcttcgtgatcgagggcctgaaggaggccgacaaggacgagttctgcagatgcgagctgaagctgcagaagtggtacggggacctgcggggaaagcccttcgccatcgaagccgagaacagcatcctggacatcagcggcttcagcaagcagtacaactgtgccttcatctggcagaaggacggcgtgaagaagctgaacctgtacctgatcatcaactacttcaagggcggcaagctgcggttcaagaagatcaaacctgaagccttcgaagccaacagattctacaccgtgatcaacaaaaagagcggcgagatcgtgcccatggaggtgaacttcaacttcgacgaccccaacctgatcatcctgcctctggcctttggcaagagacagggcagagaattcatctggaacgacctgctgtccctggaaaccggcagcctgaagctggccaacggaagagtgatcgagaagacactgtacaacagaagaacccggcaggatgagcctgccctgttcgtggccctgaccttcgagcggcgggaggtcctggactcctccaatatcaaaccaatgaacctgatcggcgtggcaagaggcgaaaacatccccgccgtgatcgccctgaccgaccccgagggctgcccactgagccggtttaaggatagcctgggaaacccaacccacatcctgagaatcggcgagagctataaggagaagcagcggaccatccaggccaagaaggaggtggagcagcggagagccggcggctacagccggaagtacgccagcaaagccaagaatctggcagacgatatggtgagaaacaccgctagagatctgctgtactacgccgtgacccaggatgccatgctgatcttcgccaacctgagccggggcttcggccggcagggcaagcggaccttcatggccgagagacagtacacacggatggaggactggctgaccgccaagctggcctacgagggcctgagcaagacctacctgtccaagacactggcccagtacacctccaagacatgcagcaactgtgggtttaccatcaccagcgccgactacgacagggtgctggagaagctgaagaagacagcaacaggctggatgaccacaattaacggcaaggagctgaaggtggagggccagattacctactacaacagatacaagagacagaacgtagtcaaggacctgtccgtcgagctggatagactgagcgaagaatctgtgaacaacgacatctcctcctggacaaagggcagaagcggagaagctctgagcctcctgaagaaaagattctcccatagacccgtgcaggagaagttcgtgtgcctgaactgcggcttcgagacacacgcagccgagcaagccgccctgaacatcgccagatcctggctgttcctgcggagccaggagtacaagaaataccagacaaacaagacaaccggcaacaccgataagagagccttcgtcgagacctggcagtccttttaccggaagaagcttaaggaggtgtggaaacctgccgtgcggtctggcggatctggcggaggctcctttcctgctgggcctgctgaccttcagggacgtggccatcgagttcagccaggaggagtggggctgcctgaaccacacccagagggagctgtacagggacgtgatgctggagaactacggccacctgctgttcctgggcctgatcgtgagcaagcccgacctggtgagcttcctggagcagaagaaggagccctgggacgtgaagaggaagaagaccgtggccatccacaggggcaggtgggagggatctggctccggcagcggccccaagaaaaagagaaaagtctaagctgccttctgcggggcttgccttctggccatgcccttcttctctcccttgcacctgtacctcttggtctttgaataaagcctgagtaggaaggctagcaaaaaaaaaaaaaaaaaaaaaaaaaaaaaaaaaaaaaaaaaaaaaaaaaaaaaaaaaaaaaaaaaaaaaaaaaaaaaaaa

SEQ ID NO: 16009 - RNA, 9485 nt, synthetic construct
  source 1..9485: mol_type = other RNA
aggaaataagagagaaaagaagagtaagaagaaatataagagccaccatggcccctaagaagaagcgtaaagtgagccggatggaacgcctcgtctacgaggtgcggcagaagtgcagaaacatcgaggacatctgcatctcctgcggatctctgaacgtgaccctggagcacccactgttcatcggcggcatgtgccagaactgtaaaaactgttttctggagtgtgcctatcaatacgacgatgacggctaccagagctactgcaccatctgttgcggcggaagagaggtgctgatgtgtggaaataacaactgctgccggtgcttctgcgtggaatgcgtggacctgctggtgggccccggcgccgcccaggccgctattaaggaagatccttggaactgctacatgtgcggccacaagggcacatacggcctgctgagacggagagaggactggcctagcagactgcagatgttcttcgccaataaccacgaccaggagttcgacccccctaaggtgtaccctcccgtccccgccgagaagagaaagcccatccgggtcctgagcctgttcgatggcatcgccaccggtctgctggtgctgaaggacctgggcatccaggtggataggtacattgcctccgaggtgtgcgaggactccatcaccgtgggaatggtgcgtcatcagggcaagatcatgtacgtgggcgacgtgcggagcgtgacacagaagcatatccaggagtggggccctttcgacctggtgatcggcggcagcccttgcaatgacctgagcatcgtgaacccagcccggaagggcctgtacgagggaaccggcagactgttcttcgagttttacagactgctgcacgacgcccggcctaaggaaggcgacgaccggcccttcttttggctgttcgagaatgtggtggccatgggagtcagcgacaagcgggatattagccggttcctggagagcaaccccgtgatgatcgatgccaaggaagtgagcgccgcccaccgggccagatacttctggggcaatctgcctggcatgaacagacccctggccagcaccgtgaacgacaagctggagctgcaggagtgcctggagcacggccggatcgccaagttcagcaaggtgagaaccatcaccacccgaagcaacagcatcaaacaaggcaaggaccagcactttcctgtgttcatgaacgagaaggaggacatcctgtggtgtaccgagatggagagagtgttcgggttcccagtccactacacagatgtcagcaacatgtctagactggccagacagagactgctgggaagaagctggtccgtccctgtgatcagacacctgttcgcccctctgaaggagtacttcgcctgcgtgagcagcggcaacagcaacgccaacagccggggccccagcttctctagcggcctggtgccactgtccctgagagggagccacatgggccccatggagatctacaaaaccgtgagcgcctggaagcggcagcctgtgcgcgtgctgagcctgtttcggaatatcgataaagtcctgaaaagcctgggattcctggagagcggctctggctccggcggtggcaccctgaagtacgtggaggatgtgacaaacgtggtcagacgggatgtggagaagtggggccccttcgatctggtgtacggcagcacccaacccctgggcagctcttgtgaccggtgccctggctggtacatgtttcagttccaccggatcctgcagtacgccctgccgagacaggagtcccagcggccattcttttggattttcatggacaacttgctgctgaccgaggatgaccaggaaactaccactcggttcctgcagaccgaagccgtgaccctgcaggacgtgagaggccgggactaccagaacgccatgcgggtgtggtccaacatccctggactgaaaagcaagcacgcacctctgacccctaaagaagaggagtacctgcaggcccaggtgcggagcagaagcaagctggacgcccctaaggtggatctgctggtgaagaattgcctcctgcccctgagagagtacttcaagtatttcagccagaatagtctgcccctgggaggcagcggcggcggcgccctggtgacatttgaggacgtcgccgtgcggttcacccaggaggaatgggctctgctggatccttctcagaaaatcctgtaccgggacgtgatgagagagacataccggaatctgacctccgtgggcatcaactgggaatgttgggaccttgaagcctgcttcagaagcctgggaagaaacctgagagtgcaggtggtgaagagaaagtgcgagctgaccaacagcggcccctgcgccgagggcggcccaagcagcggcgcccctcctcccagcggcggcagcccagccggctccccaacctctaccgaggagggcacctctgagtccgccacccccgagagcggccctggcacctccaccgagcccagcgagggcagcgcacccggcagccctgccggcagccccacctccacagaggagggaaccagcaccgagcccagcgaaggcagcgccccaggcaccagcaccgagcctagtgagcaggagattaaacggatcaacaagatcagaagaagacttgtgaaagacagcaacaccaagaaggccggcaagacaggccccatgaaaaccctgctggttagagtgatgacacccgatctgagagagcggctggaaaacctgagaaagaagcctgaaaatatcccccagcccatcagcaatacatctagagccaacctgaataagctgctgaccgattacaccgaaatgaagaaggcgatcctgcatgtgtactgggaagagttccagaaggaccctgtgggcctgatgagccgggtggcccagcctgccagcaagaagatcgatcagaacaagctgaaacctgagatggacgagaagggcaacctgaccaccgccggctttgcctgctctcagtgtggccagcccctgttcgtgtacaagctggagcaggtgtctgagaagggcaaggcttacaccaactacttcggacggtgcaatgtggccgagcacgaaaagctgatcctgctggcccagctgaagcccgagaaggatagcgacgaagccgtgacatatagcctgggaaagtttgggcagagggccctggatttctacagcattcatgtgaccaaggagtccacccaccccgtgaagcccctggcccagatcgccggaaacagatacgcctccggacctgtgggaaaggccctgagcgacgcatgtatgggcacaatcgcctccttcctgtctaagtaccaggacatcatcatcgaacaccagaaggtggtgaagggcaaccagaagagactggagagcctgcgggagctggccggcaaggaaaacctggaataccctagcgtgaccctgccacctcagcctcacaccaaggagggcgttgatgcctacaacgaagtgatcgcccgggtgcgaatgtgggtgaacctgaacctgtggcagaagctgaagctaagcagagatgatgccaagcctctgctgagactgaagggattcccttcctttcctctggtcgagagacaggccaacgaagtggactggtgggacatggtgtgtaacgtgaagaagctgatcaacgagaaaaaggaggatggcaaggtgttttggcagaatctggctggctacaagagacaggaagccctgagaccatacctgagcagcgaggaagatcggaagaagggaaagaaattcgctcggtaccagctgggcgacctgctgctgcacctggaaaagaagcacggcgaggactggggaaaggtgtacgacgaggcctgggagcggattgacaagaaagtggaaggcctgagcaagcacatcaagctggaagaggaacggagaagcgaggacgcccagagcaaggccgccctgaccgactggctgcgggctaaggccagcttcgtgatcgagggcctgaaggaggccgacaaggacgagttctgcagatgcgagctgaagctgcagaagtggtacggggacctgcggggaaagcccttcgccatcgaagccgagaacagcatcctggacatcagcggcttcagcaagcagtacaactgtgccttcatctggcagaaggacggcgtgaagaagctgaacctgtacctgatcatcaactacttcaagggcggcaagctgcggttcaagaagatcaaacctgaagccttcgaagccaacagattctacaccgtgatcaacaaaaagagcggcgagatcgtgcccatggaggtgaacttcaacttcgacgaccccaacctgatcatcctgcctctggcctttggcaagagacagggcagagaattcatctggaacgacctgctgtccctggaaaccggcagcctgaagctggccaacggaagagtgatcgagaagacactgtacaacagaagaacccggcaggatgagcctgccctgttcgtggccctgaccttcgagcggcgggaggtcctggactcctccaatatcaaaccaatgaacctgatcggcgtggcaagaggcgaaaacatccccgccgtgatcgccctgaccgaccccgagggctgcccactgagccggtttaaggatagcctgggaaacccaacccacatcctgagaatcggcgagagctataaggagaagcagcggaccatccaggccaagaaggaggtggagcagcggagagccggcggctacagccggaagtacgccagcaaagccaagaatctggcagacgatatggtgagaaacaccgctagagatctgctgtactacgccgtgacccaggatgccatgctgatcttcgccaacctgagccggggcttcggccggcagggcaagcggaccttcatggccgagagacagtacacacggatggaggactggctgaccgccaagctggcctacgagggcctgagcaagacctacctgtccaagacactggcccagtacacctccaagacatgcagcaactgtgggtttaccatcaccagcgccgactacgacagggtgctggagaagctgaagaagacagcaacaggctggatgaccacaattaacggcaaggagctgaaggtggagggccagattacctactacaacagatacaagagacagaacgtagtcaaggacctgtccgtcgagctggatagactgagcgaagaatctgtgaacaacgacatctcctcctggacaaagggcagaagcggagaagctctgagcctcctgaagaaaagattctcccatagacccgtgcaggagaagttcgtgtgcctgaactgcggcttcgagacacacgcagccgagcaagccgccctgaacatcgccagatcctggctgttcctgcggagccaggagtacaagaaataccagacaaacaagacaaccggcaacaccgataagagagccttcgtcgagacctggcagtccttttaccggaagaagcttaaggaggtgtggaaacctgccgtgcggtctggcggatctggcggaggctccagcaaggcccccgtgaccttcggcgacctggccatctacttcagccaggaggagtgggagtggctgagccccatgcagaaggacctgtacgaggacgtgatgctggagaactaccacaacctggtgagcgtgggcctggcctgcaggaggcccaacatcatcgccctgctggagaagggcaaggccccctgggtgatcgagcccagcaggaggaggtggggccccgagagcggcagcaagtacggcggcccaagcagcggcgcccctcctcccagcggcggcagcccagccggctccccaacctctaccgaggagggcacctctgagtccgccacccccgagagcggccctggcacctccaccgagcccagcgagggcagcgcacccggcagccctgccggcagccccacctccacagaggagggaaccagcaccgagcccagcgaaggcagcgccccaggcaccagcaccgagcctagtgagcaggagattaaacggatcaacaagatcagaagaagacttgtgaaagacagcaacaccaagaaggccggcaagacaggccccatgaaaaccctgctggttagagtgatgacacccgatctgagagagcggctggaaaacctgagaaagaagcctgaaaatatcccccagcccatcagcaatacatctagagccaacctgaataagctgctgaccgattacaccgaaatgaagaaggcgatcctgcatgtgtactgggaagagttccagaaggaccctgtgggcctgatgagccgggtggcccagcctgccagcaagaagatcgatcagaacaagctgaaacctgagatggacgagaagggcaacctgaccaccgccggctttgcctgctctcagtgtggccagcccctgttcgtgtacaagctggagcaggtgtctgagaagggcaaggcttacaccaactacttcggacggtgcaatgtggccgagcacgaaaagctgatcctgctggcccagctgaagcccgagaaggatagcgacgaagccgtgacatatagcctgggaaagtttgggcagagggccctggatttctacagcattcatgtgaccaaggagtccacccaccccgtgaagcccctggcccagatcgccggaaacagatacgcctccggacctgtgggaaaggccctgagcgacgcatgtatgggcacaatcgcctccttcctgtctaagtaccaggacatcatcatcgaacaccagaaggtggtgaagggcaaccagaagagactggagagcctgcgggagctggccggcaaggaaaacctggaataccctagcgtgaccctgccacctcagcctcacaccaaggagggcgttgatgcctacaacgaagtgatcgcccgggtgcgaatgtgggtgaacctgaacctgtggcagaagctgaagctaagcagagatgatgccaagcctctgctgagactgaagggattcccttcctttcctctggtcgagagacaggccaacgaagtggactggtgggacatggtgtgtaacgtgaagaagctgatcaacgagaaaaaggaggatggcaaggtgttttggcagaatctggctggctacaagagacaggaagccctgagaccatacctgagcagcgaggaagatcggaagaagggaaagaaattcgctcggtaccagctgggcgacctgctgctgcacctggaaaagaagcacggcgaggactggggaaaggtgtacgacgaggcctgggagcggattgacaagaaagtggaaggcctgagcaagcacatcaagctggaagaggaacggagaagcgaggacgcccagagcaaggccgccctgaccgactggctgcgggctaaggccagcttcgtgatcgagggcctgaaggaggccgacaaggacgagttctgcagatgcgagctgaagctgcagaagtggtacggggacctgcggggaaagcccttcgccatcgaagccgagaacagcatcctggacatcagcggcttcagcaagcagtacaactgtgccttcatctggcagaaggacggcgtgaagaagctgaacctgtacctgatcatcaactacttcaagggcggcaagctgcggttcaagaagatcaaacctgaagccttcgaagccaacagattctacaccgtgatcaacaaaaagagcggcgagatcgtgcccatggaggtgaacttcaacttcgacgaccccaacctgatcatcctgcctctggcctttggcaagagacagggcagagaattcatctggaacgacctgctgtccctggaaaccggcagcctgaagctggccaacggaagagtgatcgagaagacactgtacaacagaagaacccggcaggatgagcctgccctgttcgtggccctgaccttcgagcggcgggaggtcctggactcctccaatatcaaaccaatgaacctgatcggcgtggcaagaggcgaaaacatccccgccgtgatcgccctgaccgaccccgagggctgcccactgagccggtttaaggatagcctgggaaacccaacccacatcctgagaatcggcgagagctataaggagaagcagcggaccatccaggccaagaaggaggtggagcagcggagagccggcggctacagccggaagtacgccagcaaagccaagaatctggcagacgatatggtgagaaacaccgctagagatctgctgtactacgccgtgacccaggatgccatgctgatcttcgccaacctgagccggggcttcggccggcagggcaagcggaccttcatggccgagagacagtacacacggatggaggactggctgaccgccaagctggcctacgagggcctgagcaagacctacctgtccaagacactggcccagtacacctccaagacatgcagcaactgtgggtttaccatcaccagcgccgactacgacagggtgctggagaagctgaagaagacagcaacaggctggatgaccacaattaacggcaaggagctgaaggtggagggccagattacctactacaacagatacaagagacagaacgtagtcaaggacctgtccgtcgagctggatagactgagcgaagaatctgtgaacaacgacatctcctcctggacaaagggcagaagcggagaagctctgagcctcctgaagaaaagattctcccatagacccgtgcaggagaagttcgtgtgcctgaactgcggcttcgagacacacgcagccgagcaagccgccctgaacatcgccagatcctggctgttcctgcggagccaggagtacaagaaataccagacaaacaagacaaccggcaacaccgataagagagccttcgtcgagacctggcagtccttttaccggaagaagcttaaggaggtgtggaaacctgccgtgcggtctggcggatctggcggaggctcctagcaaggcccccgtgaccttcggcgacctggccatctacttcagccaggaggagtgggagtggctgagccccatgcagaaggacctgtacgaggacgtgatgctggagaactaccacaacctggtgagcgtgggcctggcctgcaggaggcccaacatcatcgccctgctggagaagggcaaggccccctgggtgatcgagcccagcaggaggaggtggggccccgagagcggcagcaagtacggatctggctccggcagcggccccaagaaaaagagaaaagtctaagctgccttctgcggggcttgccttctggccatgcccttcttctctcccttgcacctgtacctcttggtctttgaataaagcctgagtaggaaggctagcaaaaaaaaaaaaaaaaaaaaaaaaaaaaaaaaaaaaaaaaaaaaaaaaaaaaaaaaaaaaaaaaaaaaaaaaaaaaaaaa

SEQ ID NO: 16010 - RNA, 9485 nt, synthetic construct
  source 1..9485: mol_type = other RNA
aggaaataagagagaaaagaagagtaagaagaaatataagagccaccatggcccctaagaagaagcgtaaagtgagccggatggaacgcctcgtctacgaggtgcggcagaagtgcagaaacatcgaggacatctgcatctcctgcggatctctgaacgtgaccctggagcacccactgttcatcggcggcatgtgccagaactgtaaaaactgttttctggagtgtgcctatcaatacgacgatgacggctaccagagctactgcaccatctgttgcggcggaagagaggtgctgatgtgtggaaataacaactgctgccggtgcttctgcgtggaatgcgtggacctgctggtgggccccggcgccgcccaggccgctattaaggaagatccttggaactgctacatgtgcggccacaagggcacatacggcctgctgagacggagagaggactggcctagcagactgcagatgttcttcgccaataaccacgaccaggagttcgacccccctaaggtgtaccctcccgtccccgccgagaagagaaagcccatccgggtcctgagcctgttcgatggcatcgccaccggtctgctggtgctgaaggacctgggcatccaggtggataggtacattgcctccgaggtgtgcgaggactccatcaccgtgggaatggtgcgtcatcagggcaagatcatgtacgtgggcgacgtgcggagcgtgacacagaagcatatccaggagtggggccctttcgacctggtgatcggcggcagcccttgcaatgacctgagcatcgtgaacccagcccggaagggcctgtacgagggaaccggcagactgttcttcgagttttacagactgctgcacgacgcccggcctaaggaaggcgacgaccggcccttcttttggctgttcgagaatgtggtggccatgggagtcagcgacaagcgggatattagccggttcctggagagcaaccccgtgatgatcgatgccaaggaagtgagcgccgcccaccgggccagatacttctggggcaatctgcctggcatgaacagacccctggccagcaccgtgaacgacaagctggagctgcaggagtgcctggagcacggccggatcgccaagttcagcaaggtgagaaccatcaccacccgaagcaacagcatcaaacaaggcaaggaccagcactttcctgtgttcatgaacgagaaggaggacatcctgtggtgtaccgagatggagagagtgttcgggttcccagtccactacacagatgtcagcaacatgtctagactggccagacagagactgctgggaagaagctggtccgtccctgtgatcagacacctgttcgcccctctgaaggagtacttcgcctgcgtgagcagcggcaacagcaacgccaacagccggggccccagcttctctagcggcctggtgccactgtccctgagagggagccacatgggccccatggagatctacaaaaccgtgagcgcctggaagcggcagcctgtgcgcgtgctgagcctgtttcggaatatcgataaagtcctgaaaagcctgggattcctggagagcggctctggctccggcggtggcaccctgaagtacgtggaggatgtgacaaacgtggtcagacgggatgtggagaagtggggccccttcgatctggtgtacggcagcacccaacccctgggcagctcttgtgaccggtgccctggctggtacatgtttcagttccaccggatcctgcagtacgccctgccgagacaggagtcccagcggccattcttttggattttcatggacaacttgctgctgaccgaggatgaccaggaaactaccactcggttcctgcagaccgaagccgtgaccctgcaggacgtgagaggccgggactaccagaacgccatgcgggtgtggtccaacatccctggactgaaaagcaagcacgcacctctgacccctaaagaagaggagtacctgcaggcccaggtgcggagcagaagcaagctggacgcccctaaggtggatctgctggtgaagaattgcctcctgcccctgagagagtacttcaagtatttcagccagaatagtctgcccctgggaggcagcggcggcggcgccctggtgacatttgaggacgtcgccgtgcggttcacccaggaggaatgggctctgctggatccttctcagaaaatcctgtaccgggacgtgatgagagagacataccggaatctgacctccgtgggcatcaactgggaatgttgggaccttgaagcctgcttcagaagcctgggaagaaacctgagagtgcaggtggtgaagagaaagtgcgagctgaccaacagcggcccctgcgccgagggcggcccaagcagcggcgcccctcctcccagcggcggcagcccagccggctccccaacctctaccgaggagggcacctctgagtccgccacccccgagagcggccctggcacctccaccgagcccagcgagggcagcgcacccggcagccctgccggcagccccacctccacagaggagggaaccagcaccgagcccagcgaaggcagcgccccaggcaccagcaccgagcctagtgagcaggagattaaacggatcaacaagatcagaagaagacttgtgaaagacagcaacaccaagaaggccggcaagacaggccccatgaaaaccctgctggttagagtgatgacacccgatctgagagagcggctggaaaacctgagaaagaagcctgaaaatatcccccagcccatcagcaatacatctagagccaacctgaataagctgctgaccgattacaccgaaatgaagaaggcgatcctgcatgtgtactgggaagagttccagaaggaccctgtgggcctgatgagccgggtggcccagcctgccagcaagaagatcgatcagaacaagctgaaacctgagatggacgagaagggcaacctgaccaccgccggctttgcctgctctcagtgtggccagcccctgttcgtgtacaagctggagcaggtgtctgagaagggcaaggcttacaccaactacttcggacggtgcaatgtggccgagcacgaaaagctgatcctgctggcccagctgaagcccgagaaggatagcgacgaagccgtgacatatagcctgggaaagtttgggcagagggccctggatttctacagcattcatgtgaccaaggagtccacccaccccgtgaagcccctggcccagatcgccggaaacagatacgcctccggacctgtgggaaaggccctgagcgacgcatgtatgggcacaatcgcctccttcctgtctaagtaccaggacatcatcatcgaacaccagaaggtggtgaagggcaaccagaagagactggagagcctgcgggagctggccggcaaggaaaacctggaataccctagcgtgaccctgccacctcagcctcacaccaaggagggcgttgatgcctacaacgaagtgatcgcccgggtgcgaatgtgggtgaacctgaacctgtggcagaagctgaagctaagcagagatgatgccaagcctctgctgagactgaagggattcccttcctttcctctggtcgagagacaggccaacgaagtggactggtgggacatggtgtgtaacgtgaagaagctgatcaacgagaaaaaggaggatggcaaggtgttttggcagaatctggctggctacaagagacaggaagccctgagaccatacctgagcagcgaggaagatcggaagaagggaaagaaattcgctcggtaccagctgggcgacctgctgctgcacctggaaaagaagcacggcgaggactggggaaaggtgtacgacgaggcctgggagcggattgacaagaaagtggaaggcctgagcaagcacatcaagctggaagaggaacggagaagcgaggacgcccagagcaaggccgccctgaccgactggctgcgggctaaggccagcttcgtgatcgagggcctgaaggaggccgacaaggacgagttctgcagatgcgagctgaagctgcagaagtggtacggggacctgcggggaaagcccttcgccatcgaagccgagaacagcatcctggacatcagcggcttcagcaagcagtacaactgtgccttcatctggcagaaggacggcgtgaagaagctgaacctgtacctgatcatcaactacttcaagggcggcaagctgcggttcaagaagatcaaacctgaagccttcgaagccaacagattctacaccgtgatcaacaaaaagagcggcgagatcgtgcccatggaggtgaacttcaacttcgacgaccccaacctgatcatcctgcctctggcctttggcaagagacagggcagagaattcatctggaacgacctgctgtccctggaaaccggcagcctgaagctggccaacggaagagtgatcgagaagacactgtacaacagaagaacccggcaggatgagcctgccctgttcgtggccctgaccttcgagcggcgggaggtcctggactcctccaatatcaaaccaatgaacctgatcggcgtggcaagaggcgaaaacatccccgccgtgatcgccctgaccgaccccgagggctgcccactgagccggtttaaggatagcctgggaaacccaacccacatcctgagaatcggcgagagctataaggagaagcagcggaccatccaggccaagaaggaggtggagcagcggagagccggcggctacagccggaagtacgccagcaaagccaagaatctggcagacgatatggtgagaaacaccgctagagatctgctgtactacgccgtgacccaggatgccatgctgatcttcgccaacctgagccggggcttcggccggcagggcaagcggaccttcatggccgagagacagtacacacggatggaggactggctgaccgccaagctggcctacgagggcctgagcaagacctacctgtccaagacactggcccagtacacctccaagacatgcagcaactgtgggtttaccatcaccagcgccgactacgacagggtgctggagaagctgaagaagacagcaacaggctggatgaccacaattaacggcaaggagctgaaggtggagggccagattacctactacaacagatacaagagacagaacgtagtcaaggacctgtccgtcgagctggatagactgagcgaagaatctgtgaacaacgacatctcctcctggacaaagggcagaagcggagaagctctgagcctcctgaagaaaagattctcccatagacccgtgcaggagaagttcgtgtgcctgaactgcggcttcgagacacacgcagccgagcaagccgccctgaacatcgccagatcctggctgttcctgcggagccaggagtacaagaaataccagacaaacaagacaaccggcaacaccgataagagagccttcgtcgagacctggcagtccttttaccggaagaagcttaaggaggtgtggaaacctgccgtgcggtctggcggatctggcggaggctccatgatgaccgccgtgagcctgaccaccaggagccaggagagcgtggccttcgaggacgtggccgtgtacttcaccaccaaggagtgggccatcatggtgcccgccgagagggccctgtacagggacgtgatgctggagaactacgaggccgtggccttcgtggtgccccccaccagcaagcccgccctggtgagccacctggagcagggcaaggagagctgcttcatcaggccccagggcgtgggcggcccaagcagcggcgcccctcctcccagcggcggcagcccagccggctccccaacctctaccgaggagggcacctctgagtccgccacccccgagagcggccctggcacctccaccgagcccagcgagggcagcgcacccggcagccctgccggcagccccacctccacagaggagggaaccagcaccgagcccagcgaaggcagcgccccaggcaccagcaccgagcctagtgagcaggagattaaacggatcaacaagatcagaagaagacttgtgaaagacagcaacaccaagaaggccggcaagacaggccccatgaaaaccctgctggttagagtgatgacacccgatctgagagagcggctggaaaacctgagaaagaagcctgaaaatatcccccagcccatcagcaatacatctagagccaacctgaataagctgctgaccgattacaccgaaatgaagaaggcgatcctgcatgtgtactgggaagagttccagaaggaccctgtgggcctgatgagccgggtggcccagcctgccagcaagaagatcgatcagaacaagctgaaacctgagatggacgagaagggcaacctgaccaccgccggctttgcctgctctcagtgtggccagcccctgttcgtgtacaagctggagcaggtgtctgagaagggcaaggcttacaccaactacttcggacggtgcaatgtggccgagcacgaaaagctgatcctgctggcccagctgaagcccgagaaggatagcgacgaagccgtgacatatagcctgggaaagtttgggcagagggccctggatttctacagcattcatgtgaccaaggagtccacccaccccgtgaagcccctggcccagatcgccggaaacagatacgcctccggacctgtgggaaaggccctgagcgacgcatgtatgggcacaatcgcctccttcctgtctaagtaccaggacatcatcatcgaacaccagaaggtggtgaagggcaaccagaagagactggagagcctgcgggagctggccggcaaggaaaacctggaataccctagcgtgaccctgccacctcagcctcacaccaaggagggcgttgatgcctacaacgaagtgatcgcccgggtgcgaatgtgggtgaacctgaacctgtggcagaagctgaagctaagcagagatgatgccaagcctctgctgagactgaagggattcccttcctttcctctggtcgagagacaggccaacgaagtggactggtgggacatggtgtgtaacgtgaagaagctgatcaacgagaaaaaggaggatggcaaggtgttttggcagaatctggctggctacaagagacaggaagccctgagaccatacctgagcagcgaggaagatcggaagaagggaaagaaattcgctcggtaccagctgggcgacctgctgctgcacctggaaaagaagcacggcgaggactggggaaaggtgtacgacgaggcctgggagcggattgacaagaaagtggaaggcctgagcaagcacatcaagctggaagaggaacggagaagcgaggacgcccagagcaaggccgccctgaccgactggctgcgggctaaggccagcttcgtgatcgagggcctgaaggaggccgacaaggacgagttctgcagatgcgagctgaagctgcagaagtggtacggggacctgcggggaaagcccttcgccatcgaagccgagaacagcatcctggacatcagcggcttcagcaagcagtacaactgtgccttcatctggcagaaggacggcgtgaagaagctgaacctgtacctgatcatcaactacttcaagggcggcaagctgcggttcaagaagatcaaacctgaagccttcgaagccaacagattctacaccgtgatcaacaaaaagagcggcgagatcgtgcccatggaggtgaacttcaacttcgacgaccccaacctgatcatcctgcctctggcctttggcaagagacagggcagagaattcatctggaacgacctgctgtccctggaaaccggcagcctgaagctggccaacggaagagtgatcgagaagacactgtacaacagaagaacccggcaggatgagcctgccctgttcgtggccctgaccttcgagcggcgggaggtcctggactcctccaatatcaaaccaatgaacctgatcggcgtggcaagaggcgaaaacatccccgccgtgatcgccctgaccgaccccgagggctgcccactgagccggtttaaggatagcctgggaaacccaacccacatcctgagaatcggcgagagctataaggagaagcagcggaccatccaggccaagaaggaggtggagcagcggagagccggcggctacagccggaagtacgccagcaaagccaagaatctggcagacgatatggtgagaaacaccgctagagatctgctgtactacgccgtgacccaggatgccatgctgatcttcgccaacctgagccggggcttcggccggcagggcaagcggaccttcatggccgagagacagtacacacggatggaggactggctgaccgccaagctggcctacgagggcctgagcaagacctacctgtccaagacactggcccagtacacctccaagacatgcagcaactgtgggtttaccatcaccagcgccgactacgacagggtgctggagaagctgaagaagacagcaacaggctggatgaccacaattaacggcaaggagctgaaggtggagggccagattacctactacaacagatacaagagacagaacgtagtcaaggacctgtccgtcgagctggatagactgagcgaagaatctgtgaacaacgacatctcctcctggacaaagggcagaagcggagaagctctgagcctcctgaagaaaagattctcccatagacccgtgcaggagaagttcgtgtgcctgaactgcggcttcgagacacacgcagccgagcaagccgccctgaacatcgccagatcctggctgttcctgcggagccaggagtacaagaaataccagacaaacaagacaaccggcaacaccgataagagagccttcgtcgagacctggcagtccttttaccggaagaagcttaaggaggtgtggaaacctgccgtgcggtctggcggatctggcggaggctcctatgatgaccgccgtgagcctgaccaccaggagccaggagagcgtggccttcgaggacgtggccgtgtacttcaccaccaaggagtgggccatcatggtgcccgccgagagggccctgtacagggacgtgatgctggagaactacgaggccgtggccttcgtggtgccccccaccagcaagcccgccctggtgagccacctggagcagggcaaggagagctgcttcatcaggccccagggcgtgggatctggctccggcagcggccccaagaaaaagagaaaagtctaagctgccttctgcggggcttgccttctggccatgcccttcttctctcccttgcacctgtacctcttggtctttgaataaagcctgagtaggaaggctagcaaaaaaaaaaaaaaaaaaaaaaaaaaaaaaaaaaaaaaaaaaaaaaaaaaaaaaaaaaaaaaaaaaaaaaaaaaaaaaaa

SEQ ID NO: 16011 - RNA, 9485 nt, synthetic construct
  source 1..9485: mol_type = other RNA
aggaaataagagagaaaagaagagtaagaagaaatataagagccaccatggcccctaagaagaagcgtaaagtgagccggatggaacgcctcgtctacgaggtgcggcagaagtgcagaaacatcgaggacatctgcatctcctgcggatctctgaacgtgaccctggagcacccactgttcatcggcggcatgtgccagaactgtaaaaactgttttctggagtgtgcctatcaatacgacgatgacggctaccagagctactgcaccatctgttgcggcggaagagaggtgctgatgtgtggaaataacaactgctgccggtgcttctgcgtggaatgcgtggacctgctggtgggccccggcgccgcccaggccgctattaaggaagatccttggaactgctacatgtgcggccacaagggcacatacggcctgctgagacggagagaggactggcctagcagactgcagatgttcttcgccaataaccacgaccaggagttcgacccccctaaggtgtaccctcccgtccccgccgagaagagaaagcccatccgggtcctgagcctgttcgatggcatcgccaccggtctgctggtgctgaaggacctgggcatccaggtggataggtacattgcctccgaggtgtgcgaggactccatcaccgtgggaatggtgcgtcatcagggcaagatcatgtacgtgggcgacgtgcggagcgtgacacagaagcatatccaggagtggggccctttcgacctggtgatcggcggcagcccttgcaatgacctgagcatcgtgaacccagcccggaagggcctgtacgagggaaccggcagactgttcttcgagttttacagactgctgcacgacgcccggcctaaggaaggcgacgaccggcccttcttttggctgttcgagaatgtggtggccatgggagtcagcgacaagcgggatattagccggttcctggagagcaaccccgtgatgatcgatgccaaggaagtgagcgccgcccaccgggccagatacttctggggcaatctgcctggcatgaacagacccctggccagcaccgtgaacgacaagctggagctgcaggagtgcctggagcacggccggatcgccaagttcagcaaggtgagaaccatcaccacccgaagcaacagcatcaaacaaggcaaggaccagcactttcctgtgttcatgaacgagaaggaggacatcctgtggtgtaccgagatggagagagtgttcgggttcccagtccactacacagatgtcagcaacatgtctagactggccagacagagactgctgggaagaagctggtccgtccctgtgatcagacacctgttcgcccctctgaaggagtacttcgcctgcgtgagcagcggcaacagcaacgccaacagccggggccccagcttctctagcggcctggtgccactgtccctgagagggagccacatgggccccatggagatctacaaaaccgtgagcgcctggaagcggcagcctgtgcgcgtgctgagcctgtttcggaatatcgataaagtcctgaaaagcctgggattcctggagagcggctctggctccggcggtggcaccctgaagtacgtggaggatgtgacaaacgtggtcagacgggatgtggagaagtggggccccttcgatctggtgtacggcagcacccaacccctgggcagctcttgtgaccggtgccctggctggtacatgtttcagttccaccggatcctgcagtacgccctgccgagacaggagtcccagcggccattcttttggattttcatggacaacttgctgctgaccgaggatgaccaggaaactaccactcggttcctgcagaccgaagccgtgaccctgcaggacgtgagaggccgggactaccagaacgccatgcgggtgtggtccaacatccctggactgaaaagcaagcacgcacctctgacccctaaagaagaggagtacctgcaggcccaggtgcggagcagaagcaagctggacgcccctaaggtggatctgctggtgaagaattgcctcctgcccctgagagagtacttcaagtatttcagccagaatagtctgcccctgggaggcagcggcggcggcgccctggtgacatttgaggacgtcgccgtgcggttcacccaggaggaatgggctctgctggatccttctcagaaaatcctgtaccgggacgtgatgagagagacataccggaatctgacctccgtgggcatcaactgggaatgttgggaccttgaagcctgcttcagaagcctgggaagaaacctgagagtgcaggtggtgaagagaaagtgcgagctgaccaacagcggcccctgcgccgagggcggcccaagcagcggcgcccctcctcccagcggcggcagcccagccggctccccaacctctaccgaggagggcacctctgagtccgccacccccgagagcggccctggcacctccaccgagcccagcgagggcagcgcacccggcagccctgccggcagccccacctccacagaggagggaaccagcaccgagcccagcgaaggcagcgccccaggcaccagcaccgagcctagtgagcaggagattaaacggatcaacaagatcagaagaagacttgtgaaagacagcaacaccaagaaggccggcaagacaggccccatgaaaaccctgctggttagagtgatgacacccgatctgagagagcggctggaaaacctgagaaagaagcctgaaaatatcccccagcccatcagcaatacatctagagccaacctgaataagctgctgaccgattacaccgaaatgaagaaggcgatcctgcatgtgtactgggaagagttccagaaggaccctgtgggcctgatgagccgggtggcccagcctgccagcaagaagatcgatcagaacaagctgaaacctgagatggacgagaagggcaacctgaccaccgccggctttgcctgctctcagtgtggccagcccctgttcgtgtacaagctggagcaggtgtctgagaagggcaaggcttacaccaactacttcggacggtgcaatgtggccgagcacgaaaagctgatcctgctggcccagctgaagcccgagaaggatagcgacgaagccgtgacatatagcctgggaaagtttgggcagagggccctggatttctacagcattcatgtgaccaaggagtccacccaccccgtgaagcccctggcccagatcgccggaaacagatacgcctccggacctgtgggaaaggccctgagcgacgcatgtatgggcacaatcgcctccttcctgtctaagtaccaggacatcatcatcgaacaccagaaggtggtgaagggcaaccagaagagactggagagcctgcgggagctggccggcaaggaaaacctggaataccctagcgtgaccctgccacctcagcctcacaccaaggagggcgttgatgcctacaacgaagtgatcgcccgggtgcgaatgtgggtgaacctgaacctgtggcagaagctgaagctaagcagagatgatgccaagcctctgctgagactgaagggattcccttcctttcctctggtcgagagacaggccaacgaagtggactggtgggacatggtgtgtaacgtgaagaagctgatcaacgagaaaaaggaggatggcaaggtgttttggcagaatctggctggctacaagagacaggaagccctgagaccatacctgagcagcgaggaagatcggaagaagggaaagaaattcgctcggtaccagctgggcgacctgctgctgcacctggaaaagaagcacggcgaggactggggaaaggtgtacgacgaggcctgggagcggattgacaagaaagtggaaggcctgagcaagcacatcaagctggaagaggaacggagaagcgaggacgcccagagcaaggccgccctgaccgactggctgcgggctaaggccagcttcgtgatcgagggcctgaaggaggccgacaaggacgagttctgcagatgcgagctgaagctgcagaagtggtacggggacctgcggggaaagcccttcgccatcgaagccgagaacagcatcctggacatcagcggcttcagcaagcagtacaactgtgccttcatctggcagaaggacggcgtgaagaagctgaacctgtacctgatcatcaactacttcaagggcggcaagctgcggttcaagaagatcaaacctgaagccttcgaagccaacagattctacaccgtgatcaacaaaaagagcggcgagatcgtgcccatggaggtgaacttcaacttcgacgaccccaacctgatcatcctgcctctggcctttggcaagagacagggcagagaattcatctggaacgacctgctgtccctggaaaccggcagcctgaagctggccaacggaagagtgatcgagaagacactgtacaacagaagaacccggcaggatgagcctgccctgttcgtggccctgaccttcgagcggcgggaggtcctggactcctccaatatcaaaccaatgaacctgatcggcgtggcaagaggcgaaaacatccccgccgtgatcgccctgaccgaccccgagggctgcccactgagccggtttaaggatagcctgggaaacccaacccacatcctgagaatcggcgagagctataaggagaagcagcggaccatccaggccaagaaggaggtggagcagcggagagccggcggctacagccggaagtacgccagcaaagccaagaatctggcagacgatatggtgagaaacaccgctagagatctgctgtactacgccgtgacccaggatgccatgctgatcttcgccaacctgagccggggcttcggccggcagggcaagcggaccttcatggccgagagacagtacacacggatggaggactggctgaccgccaagctggcctacgagggcctgagcaagacctacctgtccaagacactggcccagtacacctccaagacatgcagcaactgtgggtttaccatcaccagcgccgactacgacagggtgctggagaagctgaagaagacagcaacaggctggatgaccacaattaacggcaaggagctgaaggtggagggccagattacctactacaacagatacaagagacagaacgtagtcaaggacctgtccgtcgagctggatagactgagcgaagaatctgtgaacaacgacatctcctcctggacaaagggcagaagcggagaagctctgagcctcctgaagaaaagattctcccatagacccgtgcaggagaagttcgtgtgcctgaactgcggcttcgagacacacgcagccgagcaagccgccctgaacatcgccagatcctggctgttcctgcggagccaggagtacaagaaataccagacaaacaagacaaccggcaacaccgataagagagccttcgtcgagacctggcagtccttttaccggaagaagcttaaggaggtgtggaaacctgccgtgcggtctggcggatctggcggaggctccctgctgaccttcgaggacgtggccatcagcttcagcgaggaggagtggaagctgatggaccccgcccagaagatgctgtacagcgacgtgatgcaggagaactacgagaccgtgatcagcctgggcctgaagctgaagaaggacaccggcaacgaccagcccatcagcaccagcaccctggagatccaggccagcggctgcaaggtgctgaggaaggccaggatgaaggtggcccagaagaccggcggcccaagcagcggcgcccctcctcccagcggcggcagcccagccggctccccaacctctaccgaggagggcacctctgagtccgccacccccgagagcggccctggcacctccaccgagcccagcgagggcagcgcacccggcagccctgccggcagccccacctccacagaggagggaaccagcaccgagcccagcgaaggcagcgccccaggcaccagcaccgagcctagtgagcaggagattaaacggatcaacaagatcagaagaagacttgtgaaagacagcaacaccaagaaggccggcaagacaggccccatgaaaaccctgctggttagagtgatgacacccgatctgagagagcggctggaaaacctgagaaagaagcctgaaaatatcccccagcccatcagcaatacatctagagccaacctgaataagctgctgaccgattacaccgaaatgaagaaggcgatcctgcatgtgtactgggaagagttccagaaggaccctgtgggcctgatgagccgggtggcccagcctgccagcaagaagatcgatcagaacaagctgaaacctgagatggacgagaagggcaacctgaccaccgccggctttgcctgctctcagtgtggccagcccctgttcgtgtacaagctggagcaggtgtctgagaagggcaaggcttacaccaactacttcggacggtgcaatgtggccgagcacgaaaagctgatcctgctggcccagctgaagcccgagaaggatagcgacgaagccgtgacatatagcctgggaaagtttgggcagagggccctggatttctacagcattcatgtgaccaaggagtccacccaccccgtgaagcccctggcccagatcgccggaaacagatacgcctccggacctgtgggaaaggccctgagcgacgcatgtatgggcacaatcgcctccttcctgtctaagtaccaggacatcatcatcgaacaccagaaggtggtgaagggcaaccagaagagactggagagcctgcgggagctggccggcaaggaaaacctggaataccctagcgtgaccctgccacctcagcctcacaccaaggagggcgttgatgcctacaacgaagtgatcgcccgggtgcgaatgtgggtgaacctgaacctgtggcagaagctgaagctaagcagagatgatgccaagcctctgctgagactgaagggattcccttcctttcctctggtcgagagacaggccaacgaagtggactggtgggacatggtgtgtaacgtgaagaagctgatcaacgagaaaaaggaggatggcaaggtgttttggcagaatctggctggctacaagagacaggaagccctgagaccatacctgagcagcgaggaagatcggaagaagggaaagaaattcgctcggtaccagctgggcgacctgctgctgcacctggaaaagaagcacggcgaggactggggaaaggtgtacgacgaggcctgggagcggattgacaagaaagtggaaggcctgagcaagcacatcaagctggaagaggaacggagaagcgaggacgcccagagcaaggccgccctgaccgactggctgcgggctaaggccagcttcgtgatcgagggcctgaaggaggccgacaaggacgagttctgcagatgcgagctgaagctgcagaagtggtacggggacctgcggggaaagcccttcgccatcgaagccgagaacagcatcctggacatcagcggcttcagcaagcagtacaactgtgccttcatctggcagaaggacggcgtgaagaagctgaacctgtacctgatcatcaactacttcaagggcggcaagctgcggttcaagaagatcaaacctgaagccttcgaagccaacagattctacaccgtgatcaacaaaaagagcggcgagatcgtgcccatggaggtgaacttcaacttcgacgaccccaacctgatcatcctgcctctggcctttggcaagagacagggcagagaattcatctggaacgacctgctgtccctggaaaccggcagcctgaagctggccaacggaagagtgatcgagaagacactgtacaacagaagaacccggcaggatgagcctgccctgttcgtggccctgaccttcgagcggcgggaggtcctggactcctccaatatcaaaccaatgaacctgatcggcgtggcaagaggcgaaaacatccccgccgtgatcgccctgaccgaccccgagggctgcccactgagccggtttaaggatagcctgggaaacccaacccacatcctgagaatcggcgagagctataaggagaagcagcggaccatccaggccaagaaggaggtggagcagcggagagccggcggctacagccggaagtacgccagcaaagccaagaatctggcagacgatatggtgagaaacaccgctagagatctgctgtactacgccgtgacccaggatgccatgctgatcttcgccaacctgagccggggcttcggccggcagggcaagcggaccttcatggccgagagacagtacacacggatggaggactggctgaccgccaagctggcctacgagggcctgagcaagacctacctgtccaagacactggcccagtacacctccaagacatgcagcaactgtgggtttaccatcaccagcgccgactacgacagggtgctggagaagctgaagaagacagcaacaggctggatgaccacaattaacggcaaggagctgaaggtggagggccagattacctactacaacagatacaagagacagaacgtagtcaaggacctgtccgtcgagctggatagactgagcgaagaatctgtgaacaacgacatctcctcctggacaaagggcagaagcggagaagctctgagcctcctgaagaaaagattctcccatagacccgtgcaggagaagttcgtgtgcctgaactgcggcttcgagacacacgcagccgagcaagccgccctgaacatcgccagatcctggctgttcctgcggagccaggagtacaagaaataccagacaaacaagacaaccggcaacaccgataagagagccttcgtcgagacctggcagtccttttaccggaagaagcttaaggaggtgtggaaacctgccgtgcggtctggcggatctggcggaggctcctctgctgaccttcgaggacgtggccatcagcttcagcgaggaggagtggaagctgatggaccccgcccagaagatgctgtacagcgacgtgatgcaggagaactacgagaccgtgatcagcctgggcctgaagctgaagaaggacaccggcaacgaccagcccatcagcaccagcaccctggagatccaggccagcggctgcaaggtgctgaggaaggccaggatgaaggtggcccagaagaccggatctggctccggcagcggccccaagaaaaagagaaaagtctaagctgccttctgcggggcttgccttctggccatgcccttcttctctcccttgcacctgtacctcttggtctttgaataaagcctgagtaggaaggctagcaaaaaaaaaaaaaaaaaaaaaaaaaaaaaaaaaaaaaaaaaaaaaaaaaaaaaaaaaaaaaaaaaaaaaaaaaaaaaaaa

SEQ ID NO: 16012 - RNA, 9485 nt, synthetic construct
  source 1..9485: mol_type = other RNA
aggaaataagagagaaaagaagagtaagaagaaatataagagccaccatggcccctaagaagaagcgtaaagtgagccggatggaacgcctcgtctacgaggtgcggcagaagtgcagaaacatcgaggacatctgcatctcctgcggatctctgaacgtgaccctggagcacccactgttcatcggcggcatgtgccagaactgtaaaaactgttttctggagtgtgcctatcaatacgacgatgacggctaccagagctactgcaccatctgttgcggcggaagagaggtgctgatgtgtggaaataacaactgctgccggtgcttctgcgtggaatgcgtggacctgctggtgggccccggcgccgcccaggccgctattaaggaagatccttggaactgctacatgtgcggccacaagggcacatacggcctgctgagacggagagaggactggcctagcagactgcagatgttcttcgccaataaccacgaccaggagttcgacccccctaaggtgtaccctcccgtccccgccgagaagagaaagcccatccgggtcctgagcctgttcgatggcatcgccaccggtctgctggtgctgaaggacctgggcatccaggtggataggtacattgcctccgaggtgtgcgaggactccatcaccgtgggaatggtgcgtcatcagggcaagatcatgtacgtgggcgacgtgcggagcgtgacacagaagcatatccaggagtggggccctttcgacctggtgatcggcggcagcccttgcaatgacctgagcatcgtgaacccagcccggaagggcctgtacgagggaaccggcagactgttcttcgagttttacagactgctgcacgacgcccggcctaaggaaggcgacgaccggcccttcttttggctgttcgagaatgtggtggccatgggagtcagcgacaagcgggatattagccggttcctggagagcaaccccgtgatgatcgatgccaaggaagtgagcgccgcccaccgggccagatacttctggggcaatctgcctggcatgaacagacccctggccagcaccgtgaacgacaagctggagctgcaggagtgcctggagcacggccggatcgccaagttcagcaaggtgagaaccatcaccacccgaagcaacagcatcaaacaaggcaaggaccagcactttcctgtgttcatgaacgagaaggaggacatcctgtggtgtaccgagatggagagagtgttcgggttcccagtccactacacagatgtcagcaacatgtctagactggccagacagagactgctgggaagaagctggtccgtccctgtgatcagacacctgttcgcccctctgaaggagtacttcgcctgcgtgagcagcggcaacagcaacgccaacagccggggccccagcttctctagcggcctggtgccactgtccctgagagggagccacatgggccccatggagatctacaaaaccgtgagcgcctggaagcggcagcctgtgcgcgtgctgagcctgtttcggaatatcgataaagtcctgaaaagcctgggattcctggagagcggctctggctccggcggtggcaccctgaagtacgtggaggatgtgacaaacgtggtcagacgggatgtggagaagtggggccccttcgatctggtgtacggcagcacccaacccctgggcagctcttgtgaccggtgccctggctggtacatgtttcagttccaccggatcctgcagtacgccctgccgagacaggagtcccagcggccattcttttggattttcatggacaacttgctgctgaccgaggatgaccaggaaactaccactcggttcctgcagaccgaagccgtgaccctgcaggacgtgagaggccgggactaccagaacgccatgcgggtgtggtccaacatccctggactgaaaagcaagcacgcacctctgacccctaaagaagaggagtacctgcaggcccaggtgcggagcagaagcaagctggacgcccctaaggtggatctgctggtgaagaattgcctcctgcccctgagagagtacttcaagtatttcagccagaatagtctgcccctgggaggcagcggcggcggcgccctggtgacatttgaggacgtcgccgtgcggttcacccaggaggaatgggctctgctggatccttctcagaaaatcctgtaccgggacgtgatgagagagacataccggaatctgacctccgtgggcatcaactgggaatgttgggaccttgaagcctgcttcagaagcctgggaagaaacctgagagtgcaggtggtgaagagaaagtgcgagctgaccaacagcggcccctgcgccgagggcggcccaagcagcggcgcccctcctcccagcggcggcagcccagccggctccccaacctctaccgaggagggcacctctgagtccgccacccccgagagcggccctggcacctccaccgagcccagcgagggcagcgcacccggcagccctgccggcagccccacctccacagaggagggaaccagcaccgagcccagcgaaggcagcgccccaggcaccagcaccgagcctagtgagcaggagattaaacggatcaacaagatcagaagaagacttgtgaaagacagcaacaccaagaaggccggcaagacaggccccatgaaaaccctgctggttagagtgatgacacccgatctgagagagcggctggaaaacctgagaaagaagcctgaaaatatcccccagcccatcagcaatacatctagagccaacctgaataagctgctgaccgattacaccgaaatgaagaaggcgatcctgcatgtgtactgggaagagttccagaaggaccctgtgggcctgatgagccgggtggcccagcctgccagcaagaagatcgatcagaacaagctgaaacctgagatggacgagaagggcaacctgaccaccgccggctttgcctgctctcagtgtggccagcccctgttcgtgtacaagctggagcaggtgtctgagaagggcaaggcttacaccaactacttcggacggtgcaatgtggccgagcacgaaaagctgatcctgctggcccagctgaagcccgagaaggatagcgacgaagccgtgacatatagcctgggaaagtttgggcagagggccctggatttctacagcattcatgtgaccaaggagtccacccaccccgtgaagcccctggcccagatcgccggaaacagatacgcctccggacctgtgggaaaggccctgagcgacgcatgtatgggcacaatcgcctccttcctgtctaagtaccaggacatcatcatcgaacaccagaaggtggtgaagggcaaccagaagagactggagagcctgcgggagctggccggcaaggaaaacctggaataccctagcgtgaccctgccacctcagcctcacaccaaggagggcgttgatgcctacaacgaagtgatcgcccgggtgcgaatgtgggtgaacctgaacctgtggcagaagctgaagctaagcagagatgatgccaagcctctgctgagactgaagggattcccttcctttcctctggtcgagagacaggccaacgaagtggactggtgggacatggtgtgtaacgtgaagaagctgatcaacgagaaaaaggaggatggcaaggtgttttggcagaatctggctggctacaagagacaggaagccctgagaccatacctgagcagcgaggaagatcggaagaagggaaagaaattcgctcggtaccagctgggcgacctgctgctgcacctggaaaagaagcacggcgaggactggggaaaggtgtacgacgaggcctgggagcggattgacaagaaagtggaaggcctgagcaagcacatcaagctggaagaggaacggagaagcgaggacgcccagagcaaggccgccctgaccgactggctgcgggctaaggccagcttcgtgatcgagggcctgaaggaggccgacaaggacgagttctgcagatgcgagctgaagctgcagaagtggtacggggacctgcggggaaagcccttcgccatcgaagccgagaacagcatcctggacatcagcggcttcagcaagcagtacaactgtgccttcatctggcagaaggacggcgtgaagaagctgaacctgtacctgatcatcaactacttcaagggcggcaagctgcggttcaagaagatcaaacctgaagccttcgaagccaacagattctacaccgtgatcaacaaaaagagcggcgagatcgtgcccatggaggtgaacttcaacttcgacgaccccaacctgatcatcctgcctctggcctttggcaagagacagggcagagaattcatctggaacgacctgctgtccctggaaaccggcagcctgaagctggccaacggaagagtgatcgagaagacactgtacaacagaagaacccggcaggatgagcctgccctgttcgtggccctgaccttcgagcggcgggaggtcctggactcctccaatatcaaaccaatgaacctgatcggcgtggcaagaggcgaaaacatccccgccgtgatcgccctgaccgaccccgagggctgcccactgagccggtttaaggatagcctgggaaacccaacccacatcctgagaatcggcgagagctataaggagaagcagcggaccatccaggccaagaaggaggtggagcagcggagagccggcggctacagccggaagtacgccagcaaagccaagaatctggcagacgatatggtgagaaacaccgctagagatctgctgtactacgccgtgacccaggatgccatgctgatcttcgccaacctgagccggggcttcggccggcagggcaagcggaccttcatggccgagagacagtacacacggatggaggactggctgaccgccaagctggcctacgagggcctgagcaagacctacctgtccaagacactggcccagtacacctccaagacatgcagcaactgtgggtttaccatcaccagcgccgactacgacagggtgctggagaagctgaagaagacagcaacaggctggatgaccacaattaacggcaaggagctgaaggtggagggccagattacctactacaacagatacaagagacagaacgtagtcaaggacctgtccgtcgagctggatagactgagcgaagaatctgtgaacaacgacatctcctcctggacaaagggcagaagcggagaagctctgagcctcctgaagaaaagattctcccatagacccgtgcaggagaagttcgtgtgcctgaactgcggcttcgagacacacgcagccgagcaagccgccctgaacatcgccagatcctggctgttcctgcggagccaggagtacaagaaataccagacaaacaagacaaccggcaacaccgataagagagccttcgtcgagacctggcagtccttttaccggaagaagcttaaggaggtgtggaaacctgccgtgcggtctggcggatctggcggaggctccagggtggtgttcgaggacgtggccgtgtacttcagccaggaggagtggggcctgctggacgaggcccagaggcacctgtaccacgccgtgatgaccgagaacttcgccctggtgaccagcctgggctgctggcacggcgcccagtacgaggaggcccccagcgagcagagcgtgagcgtgggcatgagcgaggtgggcacccccaagcccgaccccagcaccaagaaggcccagccctacgagggcggcccaagcagcggcgcccctcctcccagcggcggcagcccagccggctccccaacctctaccgaggagggcacctctgagtccgccacccccgagagcggccctggcacctccaccgagcccagcgagggcagcgcacccggcagccctgccggcagccccacctccacagaggagggaaccagcaccgagcccagcgaaggcagcgccccaggcaccagcaccgagcctagtgagcaggagattaaacggatcaacaagatcagaagaagacttgtgaaagacagcaacaccaagaaggccggcaagacaggccccatgaaaaccctgctggttagagtgatgacacccgatctgagagagcggctggaaaacctgagaaagaagcctgaaaatatcccccagcccatcagcaatacatctagagccaacctgaataagctgctgaccgattacaccgaaatgaagaaggcgatcctgcatgtgtactgggaagagttccagaaggaccctgtgggcctgatgagccgggtggcccagcctgccagcaagaagatcgatcagaacaagctgaaacctgagatggacgagaagggcaacctgaccaccgccggctttgcctgctctcagtgtggccagcccctgttcgtgtacaagctggagcaggtgtctgagaagggcaaggcttacaccaactacttcggacggtgcaatgtggccgagcacgaaaagctgatcctgctggcccagctgaagcccgagaaggatagcgacgaagccgtgacatatagcctgggaaagtttgggcagagggccctggatttctacagcattcatgtgaccaaggagtccacccaccccgtgaagcccctggcccagatcgccggaaacagatacgcctccggacctgtgggaaaggccctgagcgacgcatgtatgggcacaatcgcctccttcctgtctaagtaccaggacatcatcatcgaacaccagaaggtggtgaagggcaaccagaagagactggagagcctgcgggagctggccggcaaggaaaacctggaataccctagcgtgaccctgccacctcagcctcacaccaaggagggcgttgatgcctacaacgaagtgatcgcccgggtgcgaatgtgggtgaacctgaacctgtggcagaagctgaagctaagcagagatgatgccaagcctctgctgagactgaagggattcccttcctttcctctggtcgagagacaggccaacgaagtggactggtgggacatggtgtgtaacgtgaagaagctgatcaacgagaaaaaggaggatggcaaggtgttttggcagaatctggctggctacaagagacaggaagccctgagaccatacctgagcagcgaggaagatcggaagaagggaaagaaattcgctcggtaccagctgggcgacctgctgctgcacctggaaaagaagcacggcgaggactggggaaaggtgtacgacgaggcctgggagcggattgacaagaaagtggaaggcctgagcaagcacatcaagctggaagaggaacggagaagcgaggacgcccagagcaaggccgccctgaccgactggctgcgggctaaggccagcttcgtgatcgagggcctgaaggaggccgacaaggacgagttctgcagatgcgagctgaagctgcagaagtggtacggggacctgcggggaaagcccttcgccatcgaagccgagaacagcatcctggacatcagcggcttcagcaagcagtacaactgtgccttcatctggcagaaggacggcgtgaagaagctgaacctgtacctgatcatcaactacttcaagggcggcaagctgcggttcaagaagatcaaacctgaagccttcgaagccaacagattctacaccgtgatcaacaaaaagagcggcgagatcgtgcccatggaggtgaacttcaacttcgacgaccccaacctgatcatcctgcctctggcctttggcaagagacagggcagagaattcatctggaacgacctgctgtccctggaaaccggcagcctgaagctggccaacggaagagtgatcgagaagacactgtacaacagaagaacccggcaggatgagcctgccctgttcgtggccctgaccttcgagcggcgggaggtcctggactcctccaatatcaaaccaatgaacctgatcggcgtggcaagaggcgaaaacatccccgccgtgatcgccctgaccgaccccgagggctgcccactgagccggtttaaggatagcctgggaaacccaacccacatcctgagaatcggcgagagctataaggagaagcagcggaccatccaggccaagaaggaggtggagcagcggagagccggcggctacagccggaagtacgccagcaaagccaagaatctggcagacgatatggtgagaaacaccgctagagatctgctgtactacgccgtgacccaggatgccatgctgatcttcgccaacctgagccggggcttcggccggcagggcaagcggaccttcatggccgagagacagtacacacggatggaggactggctgaccgccaagctggcctacgagggcctgagcaagacctacctgtccaagacactggcccagtacacctccaagacatgcagcaactgtgggtttaccatcaccagcgccgactacgacagggtgctggagaagctgaagaagacagcaacaggctggatgaccacaattaacggcaaggagctgaaggtggagggccagattacctactacaacagatacaagagacagaacgtagtcaaggacctgtccgtcgagctggatagactgagcgaagaatctgtgaacaacgacatctcctcctggacaaagggcagaagcggagaagctctgagcctcctgaagaaaagattctcccatagacccgtgcaggagaagttcgtgtgcctgaactgcggcttcgagacacacgcagccgagcaagccgccctgaacatcgccagatcctggctgttcctgcggagccaggagtacaagaaataccagacaaacaagacaaccggcaacaccgataagagagccttcgtcgagacctggcagtccttttaccggaagaagcttaaggaggtgtggaaacctgccgtgcggtctggcggatctggcggaggctcctagggtggtgttcgaggacgtggccgtgtacttcagccaggaggagtggggcctgctggacgaggcccagaggcacctgtaccacgccgtgatgaccgagaacttcgccctggtgaccagcctgggctgctggcacggcgcccagtacgaggaggcccccagcgagcagagcgtgagcgtgggcatgagcgaggtgggcacccccaagcccgaccccagcaccaagaaggcccagccctacgagggatctggctccggcagcggccccaagaaaaagagaaaagtctaagctgccttctgcggggcttgccttctggccatgcccttcttctctcccttgcacctgtacctcttggtctttgaataaagcctgagtaggaaggctagcaaaaaaaaaaaaaaaaaaaaaaaaaaaaaaaaaaaaaaaaaaaaaaaaaaaaaaaaaaaaaaaaaaaaaaaaaaaaaaaa

SEQ ID NO: 16013 - RNA, 9485 nt, synthetic construct
  source 1..9485: mol_type = other RNA
aggaaataagagagaaaagaagagtaagaagaaatataagagccaccatggcccctaagaagaagcgtaaagtgagccggatggaacgcctcgtctacgaggtgcggcagaagtgcagaaacatcgaggacatctgcatctcctgcggatctctgaacgtgaccctggagcacccactgttcatcggcggcatgtgccagaactgtaaaaactgttttctggagtgtgcctatcaatacgacgatgacggctaccagagctactgcaccatctgttgcggcggaagagaggtgctgatgtgtggaaataacaactgctgccggtgcttctgcgtggaatgcgtggacctgctggtgggccccggcgccgcccaggccgctattaaggaagatccttggaactgctacatgtgcggccacaagggcacatacggcctgctgagacggagagaggactggcctagcagactgcagatgttcttcgccaataaccacgaccaggagttcgacccccctaaggtgtaccctcccgtccccgccgagaagagaaagcccatccgggtcctgagcctgttcgatggcatcgccaccggtctgctggtgctgaaggacctgggcatccaggtggataggtacattgcctccgaggtgtgcgaggactccatcaccgtgggaatggtgcgtcatcagggcaagatcatgtacgtgggcgacgtgcggagcgtgacacagaagcatatccaggagtggggccctttcgacctggtgatcggcggcagcccttgcaatgacctgagcatcgtgaacccagcccggaagggcctgtacgagggaaccggcagactgttcttcgagttttacagactgctgcacgacgcccggcctaaggaaggcgacgaccggcccttcttttggctgttcgagaatgtggtggccatgggagtcagcgacaagcgggatattagccggttcctggagagcaaccccgtgatgatcgatgccaaggaagtgagcgccgcccaccgggccagatacttctggggcaatctgcctggcatgaacagacccctggccagcaccgtgaacgacaagctggagctgcaggagtgcctggagcacggccggatcgccaagttcagcaaggtgagaaccatcaccacccgaagcaacagcatcaaacaaggcaaggaccagcactttcctgtgttcatgaacgagaaggaggacatcctgtggtgtaccgagatggagagagtgttcgggttcccagtccactacacagatgtcagcaacatgtctagactggccagacagagactgctgggaagaagctggtccgtccctgtgatcagacacctgttcgcccctctgaaggagtacttcgcctgcgtgagcagcggcaacagcaacgccaacagccggggccccagcttctctagcggcctggtgccactgtccctgagagggagccacatgggccccatggagatctacaaaaccgtgagcgcctggaagcggcagcctgtgcgcgtgctgagcctgtttcggaatatcgataaagtcctgaaaagcctgggattcctggagagcggctctggctccggcggtggcaccctgaagtacgtggaggatgtgacaaacgtggtcagacgggatgtggagaagtggggccccttcgatctggtgtacggcagcacccaacccctgggcagctcttgtgaccggtgccctggctggtacatgtttcagttccaccggatcctgcagtacgccctgccgagacaggagtcccagcggccattcttttggattttcatggacaacttgctgctgaccgaggatgaccaggaaactaccactcggttcctgcagaccgaagccgtgaccctgcaggacgtgagaggccgggactaccagaacgccatgcgggtgtggtccaacatccctggactgaaaagcaagcacgcacctctgacccctaaagaagaggagtacctgcaggcccaggtgcggagcagaagcaagctggacgcccctaaggtggatctgctggtgaagaattgcctcctgcccctgagagagtacttcaagtatttcagccagaatagtctgcccctgggaggcagcggcggcggcgccctggtgacatttgaggacgtcgccgtgcggttcacccaggaggaatgggctctgctggatccttctcagaaaatcctgtaccgggacgtgatgagagagacataccggaatctgacctccgtgggcatcaactgggaatgttgggaccttgaagcctgcttcagaagcctgggaagaaacctgagagtgcaggtggtgaagagaaagtgcgagctgaccaacagcggcccctgcgccgagggcggcccaagcagcggcgcccctcctcccagcggcggcagcccagccggctccccaacctctaccgaggagggcacctctgagtccgccacccccgagagcggccctggcacctccaccgagcccagcgagggcagcgcacccggcagccctgccggcagccccacctccacagaggagggaaccagcaccgagcccagcgaaggcagcgccccaggcaccagcaccgagcctagtgagcaggagattaaacggatcaacaagatcagaagaagacttgtgaaagacagcaacaccaagaaggccggcaagacaggccccatgaaaaccctgctggttagagtgatgacacccgatctgagagagcggctggaaaacctgagaaagaagcctgaaaatatcccccagcccatcagcaatacatctagagccaacctgaataagctgctgaccgattacaccgaaatgaagaaggcgatcctgcatgtgtactgggaagagttccagaaggaccctgtgggcctgatgagccgggtggcccagcctgccagcaagaagatcgatcagaacaagctgaaacctgagatggacgagaagggcaacctgaccaccgccggctttgcctgctctcagtgtggccagcccctgttcgtgtacaagctggagcaggtgtctgagaagggcaaggcttacaccaactacttcggacggtgcaatgtggccgagcacgaaaagctgatcctgctggcccagctgaagcccgagaaggatagcgacgaagccgtgacatatagcctgggaaagtttgggcagagggccctggatttctacagcattcatgtgaccaaggagtccacccaccccgtgaagcccctggcccagatcgccggaaacagatacgcctccggacctgtgggaaaggccctgagcgacgcatgtatgggcacaatcgcctccttcctgtctaagtaccaggacatcatcatcgaacaccagaaggtggtgaagggcaaccagaagagactggagagcctgcgggagctggccggcaaggaaaacctggaataccctagcgtgaccctgccacctcagcctcacaccaaggagggcgttgatgcctacaacgaagtgatcgcccgggtgcgaatgtgggtgaacctgaacctgtggcagaagctgaagctaagcagagatgatgccaagcctctgctgagactgaagggattcccttcctttcctctggtcgagagacaggccaacgaagtggactggtgggacatggtgtgtaacgtgaagaagctgatcaacgagaaaaaggaggatggcaaggtgttttggcagaatctggctggctacaagagacaggaagccctgagaccatacctgagcagcgaggaagatcggaagaagggaaagaaattcgctcggtaccagctgggcgacctgctgctgcacctggaaaagaagcacggcgaggactggggaaaggtgtacgacgaggcctgggagcggattgacaagaaagtggaaggcctgagcaagcacatcaagctggaagaggaacggagaagcgaggacgcccagagcaaggccgccctgaccgactggctgcgggctaaggccagcttcgtgatcgagggcctgaaggaggccgacaaggacgagttctgcagatgcgagctgaagctgcagaagtggtacggggacctgcggggaaagcccttcgccatcgaagccgagaacagcatcctggacatcagcggcttcagcaagcagtacaactgtgccttcatctggcagaaggacggcgtgaagaagctgaacctgtacctgatcatcaactacttcaagggcggcaagctgcggttcaagaagatcaaacctgaagccttcgaagccaacagattctacaccgtgatcaacaaaaagagcggcgagatcgtgcccatggaggtgaacttcaacttcgacgaccccaacctgatcatcctgcctctggcctttggcaagagacagggcagagaattcatctggaacgacctgctgtccctggaaaccggcagcctgaagctggccaacggaagagtgatcgagaagacactgtacaacagaagaacccggcaggatgagcctgccctgttcgtggccctgaccttcgagcggcgggaggtcctggactcctccaatatcaaaccaatgaacctgatcggcgtggcaagaggcgaaaacatccccgccgtgatcgccctgaccgaccccgagggctgcccactgagccggtttaaggatagcctgggaaacccaacccacatcctgagaatcggcgagagctataaggagaagcagcggaccatccaggccaagaaggaggtggagcagcggagagccggcggctacagccggaagtacgccagcaaagccaagaatctggcagacgatatggtgagaaacaccgctagagatctgctgtactacgccgtgacccaggatgccatgctgatcttcgccaacctgagccggggcttcggccggcagggcaagcggaccttcatggccgagagacagtacacacggatggaggactggctgaccgccaagctggcctacgagggcctgagcaagacctacctgtccaagacactggcccagtacacctccaagacatgcagcaactgtgggtttaccatcaccagcgccgactacgacagggtgctggagaagctgaagaagacagcaacaggctggatgaccacaattaacggcaaggagctgaaggtggagggccagattacctactacaacagatacaagagacagaacgtagtcaaggacctgtccgtcgagctggatagactgagcgaagaatctgtgaacaacgacatctcctcctggacaaagggcagaagcggagaagctctgagcctcctgaagaaaagattctcccatagacccgtgcaggagaagttcgtgtgcctgaactgcggcttcgagacacacgcagccgagcaagccgccctgaacatcgccagatcctggctgttcctgcggagccaggagtacaagaaataccagacaaacaagacaaccggcaacaccgataagagagccttcgtcgagacctggcagtccttttaccggaagaagcttaaggaggtgtggaaacctgccgtgcggtctggcggatctggcggaggctccatggtgaccttcgaggacgtggccgtgcacttcaccaagaccgagtggaccggcctgagccccgcccagagggccctgtacaggagcgtgatgctggagaacttcggcaacctgaccgccctgggctaccccgtgcccaagcccgccctgatcagcctgctggagggcggcgacatggcctggggcctggaggcccaggacgacgcccccgccgagaggaccaagaacatctgcaagggcaggggcggcccaagcagcggcgcccctcctcccagcggcggcagcccagccggctccccaacctctaccgaggagggcacctctgagtccgccacccccgagagcggccctggcacctccaccgagcccagcgagggcagcgcacccggcagccctgccggcagccccacctccacagaggagggaaccagcaccgagcccagcgaaggcagcgccccaggcaccagcaccgagcctagtgagcaggagattaaacggatcaacaagatcagaagaagacttgtgaaagacagcaacaccaagaaggccggcaagacaggccccatgaaaaccctgctggttagagtgatgacacccgatctgagagagcggctggaaaacctgagaaagaagcctgaaaatatcccccagcccatcagcaatacatctagagccaacctgaataagctgctgaccgattacaccgaaatgaagaaggcgatcctgcatgtgtactgggaagagttccagaaggaccctgtgggcctgatgagccgggtggcccagcctgccagcaagaagatcgatcagaacaagctgaaacctgagatggacgagaagggcaacctgaccaccgccggctttgcctgctctcagtgtggccagcccctgttcgtgtacaagctggagcaggtgtctgagaagggcaaggcttacaccaactacttcggacggtgcaatgtggccgagcacgaaaagctgatcctgctggcccagctgaagcccgagaaggatagcgacgaagccgtgacatatagcctgggaaagtttgggcagagggccctggatttctacagcattcatgtgaccaaggagtccacccaccccgtgaagcccctggcccagatcgccggaaacagatacgcctccggacctgtgggaaaggccctgagcgacgcatgtatgggcacaatcgcctccttcctgtctaagtaccaggacatcatcatcgaacaccagaaggtggtgaagggcaaccagaagagactggagagcctgcgggagctggccggcaaggaaaacctggaataccctagcgtgaccctgccacctcagcctcacaccaaggagggcgttgatgcctacaacgaagtgatcgcccgggtgcgaatgtgggtgaacctgaacctgtggcagaagctgaagctaagcagagatgatgccaagcctctgctgagactgaagggattcccttcctttcctctggtcgagagacaggccaacgaagtggactggtgggacatggtgtgtaacgtgaagaagctgatcaacgagaaaaaggaggatggcaaggtgttttggcagaatctggctggctacaagagacaggaagccctgagaccatacctgagcagcgaggaagatcggaagaagggaaagaaattcgctcggtaccagctgggcgacctgctgctgcacctggaaaagaagcacggcgaggactggggaaaggtgtacgacgaggcctgggagcggattgacaagaaagtggaaggcctgagcaagcacatcaagctggaagaggaacggagaagcgaggacgcccagagcaaggccgccctgaccgactggctgcgggctaaggccagcttcgtgatcgagggcctgaaggaggccgacaaggacgagttctgcagatgcgagctgaagctgcagaagtggtacggggacctgcggggaaagcccttcgccatcgaagccgagaacagcatcctggacatcagcggcttcagcaagcagtacaactgtgccttcatctggcagaaggacggcgtgaagaagctgaacctgtacctgatcatcaactacttcaagggcggcaagctgcggttcaagaagatcaaacctgaagccttcgaagccaacagattctacaccgtgatcaacaaaaagagcggcgagatcgtgcccatggaggtgaacttcaacttcgacgaccccaacctgatcatcctgcctctggcctttggcaagagacagggcagagaattcatctggaacgacctgctgtccctggaaaccggcagcctgaagctggccaacggaagagtgatcgagaagacactgtacaacagaagaacccggcaggatgagcctgccctgttcgtggccctgaccttcgagcggcgggaggtcctggactcctccaatatcaaaccaatgaacctgatcggcgtggcaagaggcgaaaacatccccgccgtgatcgccctgaccgaccccgagggctgcccactgagccggtttaaggatagcctgggaaacccaacccacatcctgagaatcggcgagagctataaggagaagcagcggaccatccaggccaagaaggaggtggagcagcggagagccggcggctacagccggaagtacgccagcaaagccaagaatctggcagacgatatggtgagaaacaccgctagagatctgctgtactacgccgtgacccaggatgccatgctgatcttcgccaacctgagccggggcttcggccggcagggcaagcggaccttcatggccgagagacagtacacacggatggaggactggctgaccgccaagctggcctacgagggcctgagcaagacctacctgtccaagacactggcccagtacacctccaagacatgcagcaactgtgggtttaccatcaccagcgccgactacgacagggtgctggagaagctgaagaagacagcaacaggctggatgaccacaattaacggcaaggagctgaaggtggagggccagattacctactacaacagatacaagagacagaacgtagtcaaggacctgtccgtcgagctggatagactgagcgaagaatctgtgaacaacgacatctcctcctggacaaagggcagaagcggagaagctctgagcctcctgaagaaaagattctcccatagacccgtgcaggagaagttcgtgtgcctgaactgcggcttcgagacacacgcagccgagcaagccgccctgaacatcgccagatcctggctgttcctgcggagccaggagtacaagaaataccagacaaacaagacaaccggcaacaccgataagagagccttcgtcgagacctggcagtccttttaccggaagaagcttaaggaggtgtggaaacctgccgtgcggtctggcggatctggcggaggctcctatggtgaccttcgaggacgtggccgtgcacttcaccaagaccgagtggaccggcctgagccccgcccagagggccctgtacaggagcgtgatgctggagaacttcggcaacctgaccgccctgggctaccccgtgcccaagcccgccctgatcagcctgctggagggcggcgacatggcctggggcctggaggcccaggacgacgcccccgccgagaggaccaagaacatctgcaagggcaggggatctggctccggcagcggccccaagaaaaagagaaaagtctaagctgccttctgcggggcttgccttctggccatgcccttcttctctcccttgcacctgtacctcttggtctttgaataaagcctgagtaggaaggctagcaaaaaaaaaaaaaaaaaaaaaaaaaaaaaaaaaaaaaaaaaaaaaaaaaaaaaaaaaaaaaaaaaaaaaaaaaaaaaaaa

SEQ ID NO: 16014 - RNA, 9485 nt, synthetic construct
  source 1..9485: mol_type = other RNA
aggaaataagagagaaaagaagagtaagaagaaatataagagccaccatggcccctaagaagaagcgtaaagtgagccggatggaacgcctcgtctacgaggtgcggcagaagtgcagaaacatcgaggacatctgcatctcctgcggatctctgaacgtgaccctggagcacccactgttcatcggcggcatgtgccagaactgtaaaaactgttttctggagtgtgcctatcaatacgacgatgacggctaccagagctactgcaccatctgttgcggcggaagagaggtgctgatgtgtggaaataacaactgctgccggtgcttctgcgtggaatgcgtggacctgctggtgggccccggcgccgcccaggccgctattaaggaagatccttggaactgctacatgtgcggccacaagggcacatacggcctgctgagacggagagaggactggcctagcagactgcagatgttcttcgccaataaccacgaccaggagttcgacccccctaaggtgtaccctcccgtccccgccgagaagagaaagcccatccgggtcctgagcctgttcgatggcatcgccaccggtctgctggtgctgaaggacctgggcatccaggtggataggtacattgcctccgaggtgtgcgaggactccatcaccgtgggaatggtgcgtcatcagggcaagatcatgtacgtgggcgacgtgcggagcgtgacacagaagcatatccaggagtggggccctttcgacctggtgatcggcggcagcccttgcaatgacctgagcatcgtgaacccagcccggaagggcctgtacgagggaaccggcagactgttcttcgagttttacagactgctgcacgacgcccggcctaaggaaggcgacgaccggcccttcttttggctgttcgagaatgtggtggccatgggagtcagcgacaagcgggatattagccggttcctggagagcaaccccgtgatgatcgatgccaaggaagtgagcgccgcccaccgggccagatacttctggggcaatctgcctggcatgaacagacccctggccagcaccgtgaacgacaagctggagctgcaggagtgcctggagcacggccggatcgccaagttcagcaaggtgagaaccatcaccacccgaagcaacagcatcaaacaaggcaaggaccagcactttcctgtgttcatgaacgagaaggaggacatcctgtggtgtaccgagatggagagagtgttcgggttcccagtccactacacagatgtcagcaacatgtctagactggccagacagagactgctgggaagaagctggtccgtccctgtgatcagacacctgttcgcccctctgaaggagtacttcgcctgcgtgagcagcggcaacagcaacgccaacagccggggccccagcttctctagcggcctggtgccactgtccctgagagggagccacatgggccccatggagatctacaaaaccgtgagcgcctggaagcggcagcctgtgcgcgtgctgagcctgtttcggaatatcgataaagtcctgaaaagcctgggattcctggagagcggctctggctccggcggtggcaccctgaagtacgtggaggatgtgacaaacgtggtcagacgggatgtggagaagtggggccccttcgatctggtgtacggcagcacccaacccctgggcagctcttgtgaccggtgccctggctggtacatgtttcagttccaccggatcctgcagtacgccctgccgagacaggagtcccagcggccattcttttggattttcatggacaacttgctgctgaccgaggatgaccaggaaactaccactcggttcctgcagaccgaagccgtgaccctgcaggacgtgagaggccgggactaccagaacgccatgcgggtgtggtccaacatccctggactgaaaagcaagcacgcacctctgacccctaaagaagaggagtacctgcaggcccaggtgcggagcagaagcaagctggacgcccctaaggtggatctgctggtgaagaattgcctcctgcccctgagagagtacttcaagtatttcagccagaatagtctgcccctgggaggcagcggcggcggcgccctggtgacatttgaggacgtcgccgtgcggttcacccaggaggaatgggctctgctggatccttctcagaaaatcctgtaccgggacgtgatgagagagacataccggaatctgacctccgtgggcatcaactgggaatgttgggaccttgaagcctgcttcagaagcctgggaagaaacctgagagtgcaggtggtgaagagaaagtgcgagctgaccaacagcggcccctgcgccgagggcggcccaagcagcggcgcccctcctcccagcggcggcagcccagccggctccccaacctctaccgaggagggcacctctgagtccgccacccccgagagcggccctggcacctccaccgagcccagcgagggcagcgcacccggcagccctgccggcagccccacctccacagaggagggaaccagcaccgagcccagcgaaggcagcgccccaggcaccagcaccgagcctagtgagcaggagattaaacggatcaacaagatcagaagaagacttgtgaaagacagcaacaccaagaaggccggcaagacaggccccatgaaaaccctgctggttagagtgatgacacccgatctgagagagcggctggaaaacctgagaaagaagcctgaaaatatcccccagcccatcagcaatacatctagagccaacctgaataagctgctgaccgattacaccgaaatgaagaaggcgatcctgcatgtgtactgggaagagttccagaaggaccctgtgggcctgatgagccgggtggcccagcctgccagcaagaagatcgatcagaacaagctgaaacctgagatggacgagaagggcaacctgaccaccgccggctttgcctgctctcagtgtggccagcccctgttcgtgtacaagctggagcaggtgtctgagaagggcaaggcttacaccaactacttcggacggtgcaatgtggccgagcacgaaaagctgatcctgctggcccagctgaagcccgagaaggatagcgacgaagccgtgacatatagcctgggaaagtttgggcagagggccctggatttctacagcattcatgtgaccaaggagtccacccaccccgtgaagcccctggcccagatcgccggaaacagatacgcctccggacctgtgggaaaggccctgagcgacgcatgtatgggcacaatcgcctccttcctgtctaagtaccaggacatcatcatcgaacaccagaaggtggtgaagggcaaccagaagagactggagagcctgcgggagctggccggcaaggaaaacctggaataccctagcgtgaccctgccacctcagcctcacaccaaggagggcgttgatgcctacaacgaagtgatcgcccgggtgcgaatgtgggtgaacctgaacctgtggcagaagctgaagctaagcagagatgatgccaagcctctgctgagactgaagggattcccttcctttcctctggtcgagagacaggccaacgaagtggactggtgggacatggtgtgtaacgtgaagaagctgatcaacgagaaaaaggaggatggcaaggtgttttggcagaatctggctggctacaagagacaggaagccctgagaccatacctgagcagcgaggaagatcggaagaagggaaagaaattcgctcggtaccagctgggcgacctgctgctgcacctggaaaagaagcacggcgaggactggggaaaggtgtacgacgaggcctgggagcggattgacaagaaagtggaaggcctgagcaagcacatcaagctggaagaggaacggagaagcgaggacgcccagagcaaggccgccctgaccgactggctgcgggctaaggccagcttcgtgatcgagggcctgaaggaggccgacaaggacgagttctgcagatgcgagctgaagctgcagaagtggtacggggacctgcggggaaagcccttcgccatcgaagccgagaacagcatcctggacatcagcggcttcagcaagcagtacaactgtgccttcatctggcagaaggacggcgtgaagaagctgaacctgtacctgatcatcaactacttcaagggcggcaagctgcggttcaagaagatcaaacctgaagccttcgaagccaacagattctacaccgtgatcaacaaaaagagcggcgagatcgtgcccatggaggtgaacttcaacttcgacgaccccaacctgatcatcctgcctctggcctttggcaagagacagggcagagaattcatctggaacgacctgctgtccctggaaaccggcagcctgaagctggccaacggaagagtgatcgagaagacactgtacaacagaagaacccggcaggatgagcctgccctgttcgtggccctgaccttcgagcggcgggaggtcctggactcctccaatatcaaaccaatgaacctgatcggcgtggcaagaggcgaaaacatccccgccgtgatcgccctgaccgaccccgagggctgcccactgagccggtttaaggatagcctgggaaacccaacccacatcctgagaatcggcgagagctataaggagaagcagcggaccatccaggccaagaaggaggtggagcagcggagagccggcggctacagccggaagtacgccagcaaagccaagaatctggcagacgatatggtgagaaacaccgctagagatctgctgtactacgccgtgacccaggatgccatgctgatcttcgccaacctgagccggggcttcggccggcagggcaagcggaccttcatggccgagagacagtacacacggatggaggactggctgaccgccaagctggcctacgagggcctgagcaagacctacctgtccaagacactggcccagtacacctccaagacatgcagcaactgtgggtttaccatcaccagcgccgactacgacagggtgctggagaagctgaagaagacagcaacaggctggatgaccacaattaacggcaaggagctgaaggtggagggccagattacctactacaacagatacaagagacagaacgtagtcaaggacctgtccgtcgagctggatagactgagcgaagaatctgtgaacaacgacatctcctcctggacaaagggcagaagcggagaagctctgagcctcctgaagaaaagattctcccatagacccgtgcaggagaagttcgtgtgcctgaactgcggcttcgagacacacgcagccgagcaagccgccctgaacatcgccagatcctggctgttcctgcggagccaggagtacaagaaataccagacaaacaagacaaccggcaacaccgataagagagccttcgtcgagacctggcagtccttttaccggaagaagcttaaggaggtgtggaaacctgccgtgcggtctggcggatctggcggaggctccggcgagagcctggagagcagggtgaccctgggcagcctgaccgccgagagccaggagctgctgaccttcaaggacgtgagcgtggacttcacccaggaggagtggggccagctggcccccgcccacaggaacctgtacagggaggtgatgctggagaactacggcaacctggtgagcgtgggctaccagctgagcaagcccggcgtgatcagccagctggagaagggcgaggagccctggctgggcggcccaagcagcggcgcccctcctcccagcggcggcagcccagccggctccccaacctctaccgaggagggcacctctgagtccgccacccccgagagcggccctggcacctccaccgagcccagcgagggcagcgcacccggcagccctgccggcagccccacctccacagaggagggaaccagcaccgagcccagcgaaggcagcgccccaggcaccagcaccgagcctagtgagcaggagattaaacggatcaacaagatcagaagaagacttgtgaaagacagcaacaccaagaaggccggcaagacaggccccatgaaaaccctgctggttagagtgatgacacccgatctgagagagcggctggaaaacctgagaaagaagcctgaaaatatcccccagcccatcagcaatacatctagagccaacctgaataagctgctgaccgattacaccgaaatgaagaaggcgatcctgcatgtgtactgggaagagttccagaaggaccctgtgggcctgatgagccgggtggcccagcctgccagcaagaagatcgatcagaacaagctgaaacctgagatggacgagaagggcaacctgaccaccgccggctttgcctgctctcagtgtggccagcccctgttcgtgtacaagctggagcaggtgtctgagaagggcaaggcttacaccaactacttcggacggtgcaatgtggccgagcacgaaaagctgatcctgctggcccagctgaagcccgagaaggatagcgacgaagccgtgacatatagcctgggaaagtttgggcagagggccctggatttctacagcattcatgtgaccaaggagtccacccaccccgtgaagcccctggcccagatcgccggaaacagatacgcctccggacctgtgggaaaggccctgagcgacgcatgtatgggcacaatcgcctccttcctgtctaagtaccaggacatcatcatcgaacaccagaaggtggtgaagggcaaccagaagagactggagagcctgcgggagctggccggcaaggaaaacctggaataccctagcgtgaccctgccacctcagcctcacaccaaggagggcgttgatgcctacaacgaagtgatcgcccgggtgcgaatgtgggtgaacctgaacctgtggcagaagctgaagctaagcagagatgatgccaagcctctgctgagactgaagggattcccttcctttcctctggtcgagagacaggccaacgaagtggactggtgggacatggtgtgtaacgtgaagaagctgatcaacgagaaaaaggaggatggcaaggtgttttggcagaatctggctggctacaagagacaggaagccctgagaccatacctgagcagcgaggaagatcggaagaagggaaagaaattcgctcggtaccagctgggcgacctgctgctgcacctggaaaagaagcacggcgaggactggggaaaggtgtacgacgaggcctgggagcggattgacaagaaagtggaaggcctgagcaagcacatcaagctggaagaggaacggagaagcgaggacgcccagagcaaggccgccctgaccgactggctgcgggctaaggccagcttcgtgatcgagggcctgaaggaggccgacaaggacgagttctgcagatgcgagctgaagctgcagaagtggtacggggacctgcggggaaagcccttcgccatcgaagccgagaacagcatcctggacatcagcggcttcagcaagcagtacaactgtgccttcatctggcagaaggacggcgtgaagaagctgaacctgtacctgatcatcaactacttcaagggcggcaagctgcggttcaagaagatcaaacctgaagccttcgaagccaacagattctacaccgtgatcaacaaaaagagcggcgagatcgtgcccatggaggtgaacttcaacttcgacgaccccaacctgatcatcctgcctctggcctttggcaagagacagggcagagaattcatctggaacgacctgctgtccctggaaaccggcagcctgaagctggccaacggaagagtgatcgagaagacactgtacaacagaagaacccggcaggatgagcctgccctgttcgtggccctgaccttcgagcggcgggaggtcctggactcctccaatatcaaaccaatgaacctgatcggcgtggcaagaggcgaaaacatccccgccgtgatcgccctgaccgaccccgagggctgcccactgagccggtttaaggatagcctgggaaacccaacccacatcctgagaatcggcgagagctataaggagaagcagcggaccatccaggccaagaaggaggtggagcagcggagagccggcggctacagccggaagtacgccagcaaagccaagaatctggcagacgatatggtgagaaacaccgctagagatctgctgtactacgccgtgacccaggatgccatgctgatcttcgccaacctgagccggggcttcggccggcagggcaagcggaccttcatggccgagagacagtacacacggatggaggactggctgaccgccaagctggcctacgagggcctgagcaagacctacctgtccaagacactggcccagtacacctccaagacatgcagcaactgtgggtttaccatcaccagcgccgactacgacagggtgctggagaagctgaagaagacagcaacaggctggatgaccacaattaacggcaaggagctgaaggtggagggccagattacctactacaacagatacaagagacagaacgtagtcaaggacctgtccgtcgagctggatagactgagcgaagaatctgtgaacaacgacatctcctcctggacaaagggcagaagcggagaagctctgagcctcctgaagaaaagattctcccatagacccgtgcaggagaagttcgtgtgcctgaactgcggcttcgagacacacgcagccgagcaagccgccctgaacatcgccagatcctggctgttcctgcggagccaggagtacaagaaataccagacaaacaagacaaccggcaacaccgataagagagccttcgtcgagacctggcagtccttttaccggaagaagcttaaggaggtgtggaaacctgccgtgcggtctggcggatctggcggaggctcctggcgagagcctggagagcagggtgaccctgggcagcctgaccgccgagagccaggagctgctgaccttcaaggacgtgagcgtggacttcacccaggaggagtggggccagctggcccccgcccacaggaacctgtacagggaggtgatgctggagaactacggcaacctggtgagcgtgggctaccagctgagcaagcccggcgtgatcagccagctggagaagggcgaggagccctggctgggatctggctccggcagcggccccaagaaaaagagaaaagtctaagctgccttctgcggggcttgccttctggccatgcccttcttctctcccttgcacctgtacctcttggtctttgaataaagcctgagtaggaaggctagcaaaaaaaaaaaaaaaaaaaaaaaaaaaaaaaaaaaaaaaaaaaaaaaaaaaaaaaaaaaaaaaaaaaaaaaaaaaaaaaa

SEQ ID NO: 16015 - RNA, 9485 nt, synthetic construct
  source 1..9485: mol_type = other RNA
aggaaataagagagaaaagaagagtaagaagaaatataagagccaccatggcccctaagaagaagcgtaaagtgagccggatggaacgcctcgtctacgaggtgcggcagaagtgcagaaacatcgaggacatctgcatctcctgcggatctctgaacgtgaccctggagcacccactgttcatcggcggcatgtgccagaactgtaaaaactgttttctggagtgtgcctatcaatacgacgatgacggctaccagagctactgcaccatctgttgcggcggaagagaggtgctgatgtgtggaaataacaactgctgccggtgcttctgcgtggaatgcgtggacctgctggtgggccccggcgccgcccaggccgctattaaggaagatccttggaactgctacatgtgcggccacaagggcacatacggcctgctgagacggagagaggactggcctagcagactgcagatgttcttcgccaataaccacgaccaggagttcgacccccctaaggtgtaccctcccgtccccgccgagaagagaaagcccatccgggtcctgagcctgttcgatggcatcgccaccggtctgctggtgctgaaggacctgggcatccaggtggataggtacattgcctccgaggtgtgcgaggactccatcaccgtgggaatggtgcgtcatcagggcaagatcatgtacgtgggcgacgtgcggagcgtgacacagaagcatatccaggagtggggccctttcgacctggtgatcggcggcagcccttgcaatgacctgagcatcgtgaacccagcccggaagggcctgtacgagggaaccggcagactgttcttcgagttttacagactgctgcacgacgcccggcctaaggaaggcgacgaccggcccttcttttggctgttcgagaatgtggtggccatgggagtcagcgacaagcgggatattagccggttcctggagagcaaccccgtgatgatcgatgccaaggaagtgagcgccgcccaccgggccagatacttctggggcaatctgcctggcatgaacagacccctggccagcaccgtgaacgacaagctggagctgcaggagtgcctggagcacggccggatcgccaagttcagcaaggtgagaaccatcaccacccgaagcaacagcatcaaacaaggcaaggaccagcactttcctgtgttcatgaacgagaaggaggacatcctgtggtgtaccgagatggagagagtgttcgggttcccagtccactacacagatgtcagcaacatgtctagactggccagacagagactgctgggaagaagctggtccgtccctgtgatcagacacctgttcgcccctctgaaggagtacttcgcctgcgtgagcagcggcaacagcaacgccaacagccggggccccagcttctctagcggcctggtgccactgtccctgagagggagccacatgggccccatggagatctacaaaaccgtgagcgcctggaagcggcagcctgtgcgcgtgctgagcctgtttcggaatatcgataaagtcctgaaaagcctgggattcctggagagcggctctggctccggcggtggcaccctgaagtacgtggaggatgtgacaaacgtggtcagacgggatgtggagaagtggggccccttcgatctggtgtacggcagcacccaacccctgggcagctcttgtgaccggtgccctggctggtacatgtttcagttccaccggatcctgcagtacgccctgccgagacaggagtcccagcggccattcttttggattttcatggacaacttgctgctgaccgaggatgaccaggaaactaccactcggttcctgcagaccgaagccgtgaccctgcaggacgtgagaggccgggactaccagaacgccatgcgggtgtggtccaacatccctggactgaaaagcaagcacgcacctctgacccctaaagaagaggagtacctgcaggcccaggtgcggagcagaagcaagctggacgcccctaaggtggatctgctggtgaagaattgcctcctgcccctgagagagtacttcaagtatttcagccagaatagtctgcccctgggaggcagcggcggcggcgccctggtgacatttgaggacgtcgccgtgcggttcacccaggaggaatgggctctgctggatccttctcagaaaatcctgtaccgggacgtgatgagagagacataccggaatctgacctccgtgggcatcaactgggaatgttgggaccttgaagcctgcttcagaagcctgggaagaaacctgagagtgcaggtggtgaagagaaagtgcgagctgaccaacagcggcccctgcgccgagggcggcccaagcagcggcgcccctcctcccagcggcggcagcccagccggctccccaacctctaccgaggagggcacctctgagtccgccacccccgagagcggccctggcacctccaccgagcccagcgagggcagcgcacccggcagccctgccggcagccccacctccacagaggagggaaccagcaccgagcccagcgaaggcagcgccccaggcaccagcaccgagcctagtgagcaggagattaaacggatcaacaagatcagaagaagacttgtgaaagacagcaacaccaagaaggccggcaagacaggccccatgaaaaccctgctggttagagtgatgacacccgatctgagagagcggctggaaaacctgagaaagaagcctgaaaatatcccccagcccatcagcaatacatctagagccaacctgaataagctgctgaccgattacaccgaaatgaagaaggcgatcctgcatgtgtactgggaagagttccagaaggaccctgtgggcctgatgagccgggtggcccagcctgccagcaagaagatcgatcagaacaagctgaaacctgagatggacgagaagggcaacctgaccaccgccggctttgcctgctctcagtgtggccagcccctgttcgtgtacaagctggagcaggtgtctgagaagggcaaggcttacaccaactacttcggacggtgcaatgtggccgagcacgaaaagctgatcctgctggcccagctgaagcccgagaaggatagcgacgaagccgtgacatatagcctgggaaagtttgggcagagggccctggatttctacagcattcatgtgaccaaggagtccacccaccccgtgaagcccctggcccagatcgccggaaacagatacgcctccggacctgtgggaaaggccctgagcgacgcatgtatgggcacaatcgcctccttcctgtctaagtaccaggacatcatcatcgaacaccagaaggtggtgaagggcaaccagaagagactggagagcctgcgggagctggccggcaaggaaaacctggaataccctagcgtgaccctgccacctcagcctcacaccaaggagggcgttgatgcctacaacgaagtgatcgcccgggtgcgaatgtgggtgaacctgaacctgtggcagaagctgaagctaagcagagatgatgccaagcctctgctgagactgaagggattcccttcctttcctctggtcgagagacaggccaacgaagtggactggtgggacatggtgtgtaacgtgaagaagctgatcaacgagaaaaaggaggatggcaaggtgttttggcagaatctggctggctacaagagacaggaagccctgagaccatacctgagcagcgaggaagatcggaagaagggaaagaaattcgctcggtaccagctgggcgacctgctgctgcacctggaaaagaagcacggcgaggactggggaaaggtgtacgacgaggcctgggagcggattgacaagaaagtggaaggcctgagcaagcacatcaagctggaagaggaacggagaagcgaggacgcccagagcaaggccgccctgaccgactggctgcgggctaaggccagcttcgtgatcgagggcctgaaggaggccgacaaggacgagttctgcagatgcgagctgaagctgcagaagtggtacggggacctgcggggaaagcccttcgccatcgaagccgagaacagcatcctggacatcagcggcttcagcaagcagtacaactgtgccttcatctggcagaaggacggcgtgaagaagctgaacctgtacctgatcatcaactacttcaagggcggcaagctgcggttcaagaagatcaaacctgaagccttcgaagccaacagattctacaccgtgatcaacaaaaagagcggcgagatcgtgcccatggaggtgaacttcaacttcgacgaccccaacctgatcatcctgcctctggcctttggcaagagacagggcagagaattcatctggaacgacctgctgtccctggaaaccggcagcctgaagctggccaacggaagagtgatcgagaagacactgtacaacagaagaacccggcaggatgagcctgccctgttcgtggccctgaccttcgagcggcgggaggtcctggactcctccaatatcaaaccaatgaacctgatcggcgtggcaagaggcgaaaacatccccgccgtgatcgccctgaccgaccccgagggctgcccactgagccggtttaaggatagcctgggaaacccaacccacatcctgagaatcggcgagagctataaggagaagcagcggaccatccaggccaagaaggaggtggagcagcggagagccggcggctacagccggaagtacgccagcaaagccaagaatctggcagacgatatggtgagaaacaccgctagagatctgctgtactacgccgtgacccaggatgccatgctgatcttcgccaacctgagccggggcttcggccggcagggcaagcggaccttcatggccgagagacagtacacacggatggaggactggctgaccgccaagctggcctacgagggcctgagcaagacctacctgtccaagacactggcccagtacacctccaagacatgcagcaactgtgggtttaccatcaccagcgccgactacgacagggtgctggagaagctgaagaagacagcaacaggctggatgaccacaattaacggcaaggagctgaaggtggagggccagattacctactacaacagatacaagagacagaacgtagtcaaggacctgtccgtcgagctggatagactgagcgaagaatctgtgaacaacgacatctcctcctggacaaagggcagaagcggagaagctctgagcctcctgaagaaaagattctcccatagacccgtgcaggagaagttcgtgtgcctgaactgcggcttcgagacacacgcagccgagcaagccgccctgaacatcgccagatcctggctgttcctgcggagccaggagtacaagaaataccagacaaacaagacaaccggcaacaccgataagagagccttcgtcgagacctggcagtccttttaccggaagaagcttaaggaggtgtggaaacctgccgtgcggtctggcggatctggcggaggctccgccgccggcagggtgaccttcgaggacgtgaccgtgagcttcaccaagggcgagtggcagcagctgaaccccgagcagagggagctgtacagggacgtgatgctggagaactacggcaacctggtgagcgtgggcctggaggagaccagcaagcccagcgtgatcctgaggctggaggagggcaaggagccctggagcgaggaggaggtgctgaggggcggcaggcccgagaagaactgggacggcggcccaagcagcggcgcccctcctcccagcggcggcagcccagccggctccccaacctctaccgaggagggcacctctgagtccgccacccccgagagcggccctggcacctccaccgagcccagcgagggcagcgcacccggcagccctgccggcagccccacctccacagaggagggaaccagcaccgagcccagcgaaggcagcgccccaggcaccagcaccgagcctagtgagcaggagattaaacggatcaacaagatcagaagaagacttgtgaaagacagcaacaccaagaaggccggcaagacaggccccatgaaaaccctgctggttagagtgatgacacccgatctgagagagcggctggaaaacctgagaaagaagcctgaaaatatcccccagcccatcagcaatacatctagagccaacctgaataagctgctgaccgattacaccgaaatgaagaaggcgatcctgcatgtgtactgggaagagttccagaaggaccctgtgggcctgatgagccgggtggcccagcctgccagcaagaagatcgatcagaacaagctgaaacctgagatggacgagaagggcaacctgaccaccgccggctttgcctgctctcagtgtggccagcccctgttcgtgtacaagctggagcaggtgtctgagaagggcaaggcttacaccaactacttcggacggtgcaatgtggccgagcacgaaaagctgatcctgctggcccagctgaagcccgagaaggatagcgacgaagccgtgacatatagcctgggaaagtttgggcagagggccctggatttctacagcattcatgtgaccaaggagtccacccaccccgtgaagcccctggcccagatcgccggaaacagatacgcctccggacctgtgggaaaggccctgagcgacgcatgtatgggcacaatcgcctccttcctgtctaagtaccaggacatcatcatcgaacaccagaaggtggtgaagggcaaccagaagagactggagagcctgcgggagctggccggcaaggaaaacctggaataccctagcgtgaccctgccacctcagcctcacaccaaggagggcgttgatgcctacaacgaagtgatcgcccgggtgcgaatgtgggtgaacctgaacctgtggcagaagctgaagctaagcagagatgatgccaagcctctgctgagactgaagggattcccttcctttcctctggtcgagagacaggccaacgaagtggactggtgggacatggtgtgtaacgtgaagaagctgatcaacgagaaaaaggaggatggcaaggtgttttggcagaatctggctggctacaagagacaggaagccctgagaccatacctgagcagcgaggaagatcggaagaagggaaagaaattcgctcggtaccagctgggcgacctgctgctgcacctggaaaagaagcacggcgaggactggggaaaggtgtacgacgaggcctgggagcggattgacaagaaagtggaaggcctgagcaagcacatcaagctggaagaggaacggagaagcgaggacgcccagagcaaggccgccctgaccgactggctgcgggctaaggccagcttcgtgatcgagggcctgaaggaggccgacaaggacgagttctgcagatgcgagctgaagctgcagaagtggtacggggacctgcggggaaagcccttcgccatcgaagccgagaacagcatcctggacatcagcggcttcagcaagcagtacaactgtgccttcatctggcagaaggacggcgtgaagaagctgaacctgtacctgatcatcaactacttcaagggcggcaagctgcggttcaagaagatcaaacctgaagccttcgaagccaacagattctacaccgtgatcaacaaaaagagcggcgagatcgtgcccatggaggtgaacttcaacttcgacgaccccaacctgatcatcctgcctctggcctttggcaagagacagggcagagaattcatctggaacgacctgctgtccctggaaaccggcagcctgaagctggccaacggaagagtgatcgagaagacactgtacaacagaagaacccggcaggatgagcctgccctgttcgtggccctgaccttcgagcggcgggaggtcctggactcctccaatatcaaaccaatgaacctgatcggcgtggcaagaggcgaaaacatccccgccgtgatcgccctgaccgaccccgagggctgcccactgagccggtttaaggatagcctgggaaacccaacccacatcctgagaatcggcgagagctataaggagaagcagcggaccatccaggccaagaaggaggtggagcagcggagagccggcggctacagccggaagtacgccagcaaagccaagaatctggcagacgatatggtgagaaacaccgctagagatctgctgtactacgccgtgacccaggatgccatgctgatcttcgccaacctgagccggggcttcggccggcagggcaagcggaccttcatggccgagagacagtacacacggatggaggactggctgaccgccaagctggcctacgagggcctgagcaagacctacctgtccaagacactggcccagtacacctccaagacatgcagcaactgtgggtttaccatcaccagcgccgactacgacagggtgctggagaagctgaagaagacagcaacaggctggatgaccacaattaacggcaaggagctgaaggtggagggccagattacctactacaacagatacaagagacagaacgtagtcaaggacctgtccgtcgagctggatagactgagcgaagaatctgtgaacaacgacatctcctcctggacaaagggcagaagcggagaagctctgagcctcctgaagaaaagattctcccatagacccgtgcaggagaagttcgtgtgcctgaactgcggcttcgagacacacgcagccgagcaagccgccctgaacatcgccagatcctggctgttcctgcggagccaggagtacaagaaataccagacaaacaagacaaccggcaacaccgataagagagccttcgtcgagacctggcagtccttttaccggaagaagcttaaggaggtgtggaaacctgccgtgcggtctggcggatctggcggaggctcctgccgccggcagggtgaccttcgaggacgtgaccgtgagcttcaccaagggcgagtggcagcagctgaaccccgagcagagggagctgtacagggacgtgatgctggagaactacggcaacctggtgagcgtgggcctggaggagaccagcaagcccagcgtgatcctgaggctggaggagggcaaggagccctggagcgaggaggaggtgctgaggggcggcaggcccgagaagaactgggacggatctggctccggcagcggccccaagaaaaagagaaaagtctaagctgccttctgcggggcttgccttctggccatgcccttcttctctcccttgcacctgtacctcttggtctttgaataaagcctgagtaggaaggctagcaaaaaaaaaaaaaaaaaaaaaaaaaaaaaaaaaaaaaaaaaaaaaaaaaaaaaaaaaaaaaaaaaaaaaaaaaaaaaaaa

SEQ ID NO: 16016 - RNA, 9485 nt, synthetic construct
  source 1..9485: mol_type = other RNA
aggaaataagagagaaaagaagagtaagaagaaatataagagccaccatggcccctaagaagaagcgtaaagtgagccggatggaacgcctcgtctacgaggtgcggcagaagtgcagaaacatcgaggacatctgcatctcctgcggatctctgaacgtgaccctggagcacccactgttcatcggcggcatgtgccagaactgtaaaaactgttttctggagtgtgcctatcaatacgacgatgacggctaccagagctactgcaccatctgttgcggcggaagagaggtgctgatgtgtggaaataacaactgctgccggtgcttctgcgtggaatgcgtggacctgctggtgggccccggcgccgcccaggccgctattaaggaagatccttggaactgctacatgtgcggccacaagggcacatacggcctgctgagacggagagaggactggcctagcagactgcagatgttcttcgccaataaccacgaccaggagttcgacccccctaaggtgtaccctcccgtccccgccgagaagagaaagcccatccgggtcctgagcctgttcgatggcatcgccaccggtctgctggtgctgaaggacctgggcatccaggtggataggtacattgcctccgaggtgtgcgaggactccatcaccgtgggaatggtgcgtcatcagggcaagatcatgtacgtgggcgacgtgcggagcgtgacacagaagcatatccaggagtggggccctttcgacctggtgatcggcggcagcccttgcaatgacctgagcatcgtgaacccagcccggaagggcctgtacgagggaaccggcagactgttcttcgagttttacagactgctgcacgacgcccggcctaaggaaggcgacgaccggcccttcttttggctgttcgagaatgtggtggccatgggagtcagcgacaagcgggatattagccggttcctggagagcaaccccgtgatgatcgatgccaaggaagtgagcgccgcccaccgggccagatacttctggggcaatctgcctggcatgaacagacccctggccagcaccgtgaacgacaagctggagctgcaggagtgcctggagcacggccggatcgccaagttcagcaaggtgagaaccatcaccacccgaagcaacagcatcaaacaaggcaaggaccagcactttcctgtgttcatgaacgagaaggaggacatcctgtggtgtaccgagatggagagagtgttcgggttcccagtccactacacagatgtcagcaacatgtctagactggccagacagagactgctgggaagaagctggtccgtccctgtgatcagacacctgttcgcccctctgaaggagtacttcgcctgcgtgagcagcggcaacagcaacgccaacagccggggccccagcttctctagcggcctggtgccactgtccctgagagggagccacatgggccccatggagatctacaaaaccgtgagcgcctggaagcggcagcctgtgcgcgtgctgagcctgtttcggaatatcgataaagtcctgaaaagcctgggattcctggagagcggctctggctccggcggtggcaccctgaagtacgtggaggatgtgacaaacgtggtcagacgggatgtggagaagtggggccccttcgatctggtgtacggcagcacccaacccctgggcagctcttgtgaccggtgccctggctggtacatgtttcagttccaccggatcctgcagtacgccctgccgagacaggagtcccagcggccattcttttggattttcatggacaacttgctgctgaccgaggatgaccaggaaactaccactcggttcctgcagaccgaagccgtgaccctgcaggacgtgagaggccgggactaccagaacgccatgcgggtgtggtccaacatccctggactgaaaagcaagcacgcacctctgacccctaaagaagaggagtacctgcaggcccaggtgcggagcagaagcaagctggacgcccctaaggtggatctgctggtgaagaattgcctcctgcccctgagagagtacttcaagtatttcagccagaatagtctgcccctgggaggcagcggcggcggcgccctggtgacatttgaggacgtcgccgtgcggttcacccaggaggaatgggctctgctggatccttctcagaaaatcctgtaccgggacgtgatgagagagacataccggaatctgacctccgtgggcatcaactgggaatgttgggaccttgaagcctgcttcagaagcctgggaagaaacctgagagtgcaggtggtgaagagaaagtgcgagctgaccaacagcggcccctgcgccgagggcggcccaagcagcggcgcccctcctcccagcggcggcagcccagccggctccccaacctctaccgaggagggcacctctgagtccgccacccccgagagcggccctggcacctccaccgagcccagcgagggcagcgcacccggcagccctgccggcagccccacctccacagaggagggaaccagcaccgagcccagcgaaggcagcgccccaggcaccagcaccgagcctagtgagcaggagattaaacggatcaacaagatcagaagaagacttgtgaaagacagcaacaccaagaaggccggcaagacaggccccatgaaaaccctgctggttagagtgatgacacccgatctgagagagcggctggaaaacctgagaaagaagcctgaaaatatcccccagcccatcagcaatacatctagagccaacctgaataagctgctgaccgattacaccgaaatgaagaaggcgatcctgcatgtgtactgggaagagttccagaaggaccctgtgggcctgatgagccgggtggcccagcctgccagcaagaagatcgatcagaacaagctgaaacctgagatggacgagaagggcaacctgaccaccgccggctttgcctgctctcagtgtggccagcccctgttcgtgtacaagctggagcaggtgtctgagaagggcaaggcttacaccaactacttcggacggtgcaatgtggccgagcacgaaaagctgatcctgctggcccagctgaagcccgagaaggatagcgacgaagccgtgacatatagcctgggaaagtttgggcagagggccctggatttctacagcattcatgtgaccaaggagtccacccaccccgtgaagcccctggcccagatcgccggaaacagatacgcctccggacctgtgggaaaggccctgagcgacgcatgtatgggcacaatcgcctccttcctgtctaagtaccaggacatcatcatcgaacaccagaaggtggtgaagggcaaccagaagagactggagagcctgcgggagctggccggcaaggaaaacctggaataccctagcgtgaccctgccacctcagcctcacaccaaggagggcgttgatgcctacaacgaagtgatcgcccgggtgcgaatgtgggtgaacctgaacctgtggcagaagctgaagctaagcagagatgatgccaagcctctgctgagactgaagggattcccttcctttcctctggtcgagagacaggccaacgaagtggactggtgggacatggtgtgtaacgtgaagaagctgatcaacgagaaaaaggaggatggcaaggtgttttggcagaatctggctggctacaagagacaggaagccctgagaccatacctgagcagcgaggaagatcggaagaagggaaagaaattcgctcggtaccagctgggcgacctgctgctgcacctggaaaagaagcacggcgaggactggggaaaggtgtacgacgaggcctgggagcggattgacaagaaagtggaaggcctgagcaagcacatcaagctggaagaggaacggagaagcgaggacgcccagagcaaggccgccctgaccgactggctgcgggctaaggccagcttcgtgatcgagggcctgaaggaggccgacaaggacgagttctgcagatgcgagctgaagctgcagaagtggtacggggacctgcggggaaagcccttcgccatcgaagccgagaacagcatcctggacatcagcggcttcagcaagcagtacaactgtgccttcatctggcagaaggacggcgtgaagaagctgaacctgtacctgatcatcaactacttcaagggcggcaagctgcggttcaagaagatcaaacctgaagccttcgaagccaacagattctacaccgtgatcaacaaaaagagcggcgagatcgtgcccatggaggtgaacttcaacttcgacgaccccaacctgatcatcctgcctctggcctttggcaagagacagggcagagaattcatctggaacgacctgctgtccctggaaaccggcagcctgaagctggccaacggaagagtgatcgagaagacactgtacaacagaagaacccggcaggatgagcctgccctgttcgtggccctgaccttcgagcggcgggaggtcctggactcctccaatatcaaaccaatgaacctgatcggcgtggcaagaggcgaaaacatccccgccgtgatcgccctgaccgaccccgagggctgcccactgagccggtttaaggatagcctgggaaacccaacccacatcctgagaatcggcgagagctataaggagaagcagcggaccatccaggccaagaaggaggtggagcagcggagagccggcggctacagccggaagtacgccagcaaagccaagaatctggcagacgatatggtgagaaacaccgctagagatctgctgtactacgccgtgacccaggatgccatgctgatcttcgccaacctgagccggggcttcggccggcagggcaagcggaccttcatggccgagagacagtacacacggatggaggactggctgaccgccaagctggcctacgagggcctgagcaagacctacctgtccaagacactggcccagtacacctccaagacatgcagcaactgtgggtttaccatcaccagcgccgactacgacagggtgctggagaagctgaagaagacagcaacaggctggatgaccacaattaacggcaaggagctgaaggtggagggccagattacctactacaacagatacaagagacagaacgtagtcaaggacctgtccgtcgagctggatagactgagcgaagaatctgtgaacaacgacatctcctcctggacaaagggcagaagcggagaagctctgagcctcctgaagaaaagattctcccatagacccgtgcaggagaagttcgtgtgcctgaactgcggcttcgagacacacgcagccgagcaagccgccctgaacatcgccagatcctggctgttcctgcggagccaggagtacaagaaataccagacaaacaagacaaccggcaacaccgataagagagccttcgtcgagacctggcagtccttttaccggaagaagcttaaggaggtgtggaaacctgccgtgcggtctggcggatctggcggaggctccgcccacaggagcctgatgttcagcgacgtgagcatcgtgttcagccaggaggagtgggagtacctggacctggagcagagggacctgtacagggacgtgatgctggagaactacagcaacctggtgagcctgggctgcttcatcagcaagcccgacgtgatcagcctgctggagcagggcaaggagccctggaaggtggtgaggaagggcaggaggaggtacgccgacctggagaccaggtacggcggcccaagcagcggcgcccctcctcccagcggcggcagcccagccggctccccaacctctaccgaggagggcacctctgagtccgccacccccgagagcggccctggcacctccaccgagcccagcgagggcagcgcacccggcagccctgccggcagccccacctccacagaggagggaaccagcaccgagcccagcgaaggcagcgccccaggcaccagcaccgagcctagtgagcaggagattaaacggatcaacaagatcagaagaagacttgtgaaagacagcaacaccaagaaggccggcaagacaggccccatgaaaaccctgctggttagagtgatgacacccgatctgagagagcggctggaaaacctgagaaagaagcctgaaaatatcccccagcccatcagcaatacatctagagccaacctgaataagctgctgaccgattacaccgaaatgaagaaggcgatcctgcatgtgtactgggaagagttccagaaggaccctgtgggcctgatgagccgggtggcccagcctgccagcaagaagatcgatcagaacaagctgaaacctgagatggacgagaagggcaacctgaccaccgccggctttgcctgctctcagtgtggccagcccctgttcgtgtacaagctggagcaggtgtctgagaagggcaaggcttacaccaactacttcggacggtgcaatgtggccgagcacgaaaagctgatcctgctggcccagctgaagcccgagaaggatagcgacgaagccgtgacatatagcctgggaaagtttgggcagagggccctggatttctacagcattcatgtgaccaaggagtccacccaccccgtgaagcccctggcccagatcgccggaaacagatacgcctccggacctgtgggaaaggccctgagcgacgcatgtatgggcacaatcgcctccttcctgtctaagtaccaggacatcatcatcgaacaccagaaggtggtgaagggcaaccagaagagactggagagcctgcgggagctggccggcaaggaaaacctggaataccctagcgtgaccctgccacctcagcctcacaccaaggagggcgttgatgcctacaacgaagtgatcgcccgggtgcgaatgtgggtgaacctgaacctgtggcagaagctgaagctaagcagagatgatgccaagcctctgctgagactgaagggattcccttcctttcctctggtcgagagacaggccaacgaagtggactggtgggacatggtgtgtaacgtgaagaagctgatcaacgagaaaaaggaggatggcaaggtgttttggcagaatctggctggctacaagagacaggaagccctgagaccatacctgagcagcgaggaagatcggaagaagggaaagaaattcgctcggtaccagctgggcgacctgctgctgcacctggaaaagaagcacggcgaggactggggaaaggtgtacgacgaggcctgggagcggattgacaagaaagtggaaggcctgagcaagcacatcaagctggaagaggaacggagaagcgaggacgcccagagcaaggccgccctgaccgactggctgcgggctaaggccagcttcgtgatcgagggcctgaaggaggccgacaaggacgagttctgcagatgcgagctgaagctgcagaagtggtacggggacctgcggggaaagcccttcgccatcgaagccgagaacagcatcctggacatcagcggcttcagcaagcagtacaactgtgccttcatctggcagaaggacggcgtgaagaagctgaacctgtacctgatcatcaactacttcaagggcggcaagctgcggttcaagaagatcaaacctgaagccttcgaagccaacagattctacaccgtgatcaacaaaaagagcggcgagatcgtgcccatggaggtgaacttcaacttcgacgaccccaacctgatcatcctgcctctggcctttggcaagagacagggcagagaattcatctggaacgacctgctgtccctggaaaccggcagcctgaagctggccaacggaagagtgatcgagaagacactgtacaacagaagaacccggcaggatgagcctgccctgttcgtggccctgaccttcgagcggcgggaggtcctggactcctccaatatcaaaccaatgaacctgatcggcgtggcaagaggcgaaaacatccccgccgtgatcgccctgaccgaccccgagggctgcccactgagccggtttaaggatagcctgggaaacccaacccacatcctgagaatcggcgagagctataaggagaagcagcggaccatccaggccaagaaggaggtggagcagcggagagccggcggctacagccggaagtacgccagcaaagccaagaatctggcagacgatatggtgagaaacaccgctagagatctgctgtactacgccgtgacccaggatgccatgctgatcttcgccaacctgagccggggcttcggccggcagggcaagcggaccttcatggccgagagacagtacacacggatggaggactggctgaccgccaagctggcctacgagggcctgagcaagacctacctgtccaagacactggcccagtacacctccaagacatgcagcaactgtgggtttaccatcaccagcgccgactacgacagggtgctggagaagctgaagaagacagcaacaggctggatgaccacaattaacggcaaggagctgaaggtggagggccagattacctactacaacagatacaagagacagaacgtagtcaaggacctgtccgtcgagctggatagactgagcgaagaatctgtgaacaacgacatctcctcctggacaaagggcagaagcggagaagctctgagcctcctgaagaaaagattctcccatagacccgtgcaggagaagttcgtgtgcctgaactgcggcttcgagacacacgcagccgagcaagccgccctgaacatcgccagatcctggctgttcctgcggagccaggagtacaagaaataccagacaaacaagacaaccggcaacaccgataagagagccttcgtcgagacctggcagtccttttaccggaagaagcttaaggaggtgtggaaacctgccgtgcggtctggcggatctggcggaggctcctgcccacaggagcctgatgttcagcgacgtgagcatcgtgttcagccaggaggagtgggagtacctggacctggagcagagggacctgtacagggacgtgatgctggagaactacagcaacctggtgagcctgggctgcttcatcagcaagcccgacgtgatcagcctgctggagcagggcaaggagccctggaaggtggtgaggaagggcaggaggaggtacgccgacctggagaccaggtacggatctggctccggcagcggccccaagaaaaagagaaaagtctaagctgccttctgcggggcttgccttctggccatgcccttcttctctcccttgcacctgtacctcttggtctttgaataaagcctgagtaggaaggctagcaaaaaaaaaaaaaaaaaaaaaaaaaaaaaaaaaaaaaaaaaaaaaaaaaaaaaaaaaaaaaaaaaaaaaaaaaaaaaaaa

SEQ ID NO: 16017 - RNA, 9485 nt, synthetic construct
  source 1..9485: mol_type = other RNA
aggaaataagagagaaaagaagagtaagaagaaatataagagccaccatggcccctaagaagaagcgtaaagtgagccggatggaacgcctcgtctacgaggtgcggcagaagtgcagaaacatcgaggacatctgcatctcctgcggatctctgaacgtgaccctggagcacccactgttcatcggcggcatgtgccagaactgtaaaaactgttttctggagtgtgcctatcaatacgacgatgacggctaccagagctactgcaccatctgttgcggcggaagagaggtgctgatgtgtggaaataacaactgctgccggtgcttctgcgtggaatgcgtggacctgctggtgggccccggcgccgcccaggccgctattaaggaagatccttggaactgctacatgtgcggccacaagggcacatacggcctgctgagacggagagaggactggcctagcagactgcagatgttcttcgccaataaccacgaccaggagttcgacccccctaaggtgtaccctcccgtccccgccgagaagagaaagcccatccgggtcctgagcctgttcgatggcatcgccaccggtctgctggtgctgaaggacctgggcatccaggtggataggtacattgcctccgaggtgtgcgaggactccatcaccgtgggaatggtgcgtcatcagggcaagatcatgtacgtgggcgacgtgcggagcgtgacacagaagcatatccaggagtggggccctttcgacctggtgatcggcggcagcccttgcaatgacctgagcatcgtgaacccagcccggaagggcctgtacgagggaaccggcagactgttcttcgagttttacagactgctgcacgacgcccggcctaaggaaggcgacgaccggcccttcttttggctgttcgagaatgtggtggccatgggagtcagcgacaagcgggatattagccggttcctggagagcaaccccgtgatgatcgatgccaaggaagtgagcgccgcccaccgggccagatacttctggggcaatctgcctggcatgaacagacccctggccagcaccgtgaacgacaagctggagctgcaggagtgcctggagcacggccggatcgccaagttcagcaaggtgagaaccatcaccacccgaagcaacagcatcaaacaaggcaaggaccagcactttcctgtgttcatgaacgagaaggaggacatcctgtggtgtaccgagatggagagagtgttcgggttcccagtccactacacagatgtcagcaacatgtctagactggccagacagagactgctgggaagaagctggtccgtccctgtgatcagacacctgttcgcccctctgaaggagtacttcgcctgcgtgagcagcggcaacagcaacgccaacagccggggccccagcttctctagcggcctggtgccactgtccctgagagggagccacatgggccccatggagatctacaaaaccgtgagcgcctggaagcggcagcctgtgcgcgtgctgagcctgtttcggaatatcgataaagtcctgaaaagcctgggattcctggagagcggctctggctccggcggtggcaccctgaagtacgtggaggatgtgacaaacgtggtcagacgggatgtggagaagtggggccccttcgatctggtgtacggcagcacccaacccctgggcagctcttgtgaccggtgccctggctggtacatgtttcagttccaccggatcctgcagtacgccctgccgagacaggagtcccagcggccattcttttggattttcatggacaacttgctgctgaccgaggatgaccaggaaactaccactcggttcctgcagaccgaagccgtgaccctgcaggacgtgagaggccgggactaccagaacgccatgcgggtgtggtccaacatccctggactgaaaagcaagcacgcacctctgacccctaaagaagaggagtacctgcaggcccaggtgcggagcagaagcaagctggacgcccctaaggtggatctgctggtgaagaattgcctcctgcccctgagagagtacttcaagtatttcagccagaatagtctgcccctgggaggcagcggcggcggcgccctggtgacatttgaggacgtcgccgtgcggttcacccaggaggaatgggctctgctggatccttctcagaaaatcctgtaccgggacgtgatgagagagacataccggaatctgacctccgtgggcatcaactgggaatgttgggaccttgaagcctgcttcagaagcctgggaagaaacctgagagtgcaggtggtgaagagaaagtgcgagctgaccaacagcggcccctgcgccgagggcggcccaagcagcggcgcccctcctcccagcggcggcagcccagccggctccccaacctctaccgaggagggcacctctgagtccgccacccccgagagcggccctggcacctccaccgagcccagcgagggcagcgcacccggcagccctgccggcagccccacctccacagaggagggaaccagcaccgagcccagcgaaggcagcgccccaggcaccagcaccgagcctagtgagcaggagattaaacggatcaacaagatcagaagaagacttgtgaaagacagcaacaccaagaaggccggcaagacaggccccatgaaaaccctgctggttagagtgatgacacccgatctgagagagcggctggaaaacctgagaaagaagcctgaaaatatcccccagcccatcagcaatacatctagagccaacctgaataagctgctgaccgattacaccgaaatgaagaaggcgatcctgcatgtgtactgggaagagttccagaaggaccctgtgggcctgatgagccgggtggcccagcctgccagcaagaagatcgatcagaacaagctgaaacctgagatggacgagaagggcaacctgaccaccgccggctttgcctgctctcagtgtggccagcccctgttcgtgtacaagctggagcaggtgtctgagaagggcaaggcttacaccaactacttcggacggtgcaatgtggccgagcacgaaaagctgatcctgctggcccagctgaagcccgagaaggatagcgacgaagccgtgacatatagcctgggaaagtttgggcagagggccctggatttctacagcattcatgtgaccaaggagtccacccaccccgtgaagcccctggcccagatcgccggaaacagatacgcctccggacctgtgggaaaggccctgagcgacgcatgtatgggcacaatcgcctccttcctgtctaagtaccaggacatcatcatcgaacaccagaaggtggtgaagggcaaccagaagagactggagagcctgcgggagctggccggcaaggaaaacctggaataccctagcgtgaccctgccacctcagcctcacaccaaggagggcgttgatgcctacaacgaagtgatcgcccgggtgcgaatgtgggtgaacctgaacctgtggcagaagctgaagctaagcagagatgatgccaagcctctgctgagactgaagggattcccttcctttcctctggtcgagagacaggccaacgaagtggactggtgggacatggtgtgtaacgtgaagaagctgatcaacgagaaaaaggaggatggcaaggtgttttggcagaatctggctggctacaagagacaggaagccctgagaccatacctgagcagcgaggaagatcggaagaagggaaagaaattcgctcggtaccagctgggcgacctgctgctgcacctggaaaagaagcacggcgaggactggggaaaggtgtacgacgaggcctgggagcggattgacaagaaagtggaaggcctgagcaagcacatcaagctggaagaggaacggagaagcgaggacgcccagagcaaggccgccctgaccgactggctgcgggctaaggccagcttcgtgatcgagggcctgaaggaggccgacaaggacgagttctgcagatgcgagctgaagctgcagaagtggtacggggacctgcggggaaagcccttcgccatcgaagccgagaacagcatcctggacatcagcggcttcagcaagcagtacaactgtgccttcatctggcagaaggacggcgtgaagaagctgaacctgtacctgatcatcaactacttcaagggcggcaagctgcggttcaagaagatcaaacctgaagccttcgaagccaacagattctacaccgtgatcaacaaaaagagcggcgagatcgtgcccatggaggtgaacttcaacttcgacgaccccaacctgatcatcctgcctctggcctttggcaagagacagggcagagaattcatctggaacgacctgctgtccctggaaaccggcagcctgaagctggccaacggaagagtgatcgagaagacactgtacaacagaagaacccggcaggatgagcctgccctgttcgtggccctgaccttcgagcggcgggaggtcctggactcctccaatatcaaaccaatgaacctgatcggcgtggcaagaggcgaaaacatccccgccgtgatcgccctgaccgaccccgagggctgcccactgagccggtttaaggatagcctgggaaacccaacccacatcctgagaatcggcgagagctataaggagaagcagcggaccatccaggccaagaaggaggtggagcagcggagagccggcggctacagccggaagtacgccagcaaagccaagaatctggcagacgatatggtgagaaacaccgctagagatctgctgtactacgccgtgacccaggatgccatgctgatcttcgccaacctgagccggggcttcggccggcagggcaagcggaccttcatggccgagagacagtacacacggatggaggactggctgaccgccaagctggcctacgagggcctgagcaagacctacctgtccaagacactggcccagtacacctccaagacatgcagcaactgtgggtttaccatcaccagcgccgactacgacagggtgctggagaagctgaagaagacagcaacaggctggatgaccacaattaacggcaaggagctgaaggtggagggccagattacctactacaacagatacaagagacagaacgtagtcaaggacctgtccgtcgagctggatagactgagcgaagaatctgtgaacaacgacatctcctcctggacaaagggcagaagcggagaagctctgagcctcctgaagaaaagattctcccatagacccgtgcaggagaagttcgtgtgcctgaactgcggcttcgagacacacgcagccgagcaagccgccctgaacatcgccagatcctggctgttcctgcggagccaggagtacaagaaataccagacaaacaagacaaccggcaacaccgataagagagccttcgtcgagacctggcagtccttttaccggaagaagcttaaggaggtgtggaaacctgccgtgcggtctggcggatctggcggaggctccatgaccaaggcccaggagagcctgaccctgaaggacgtggccgtggacttcacctgggaggagtggcagctgctgggccccgcccagaagaggctgtacagggacgtgatgctggagaactacagcaacctggtgagcgtgggctaccaggccagcaagcccgacgccctgaccaagctggagcagggcgagcccctgtggaccctggaggacgagatccacagccccgcccaccccgagatcggcggcccaagcagcggcgcccctcctcccagcggcggcagcccagccggctccccaacctctaccgaggagggcacctctgagtccgccacccccgagagcggccctggcacctccaccgagcccagcgagggcagcgcacccggcagccctgccggcagccccacctccacagaggagggaaccagcaccgagcccagcgaaggcagcgccccaggcaccagcaccgagcctagtgagcaggagattaaacggatcaacaagatcagaagaagacttgtgaaagacagcaacaccaagaaggccggcaagacaggccccatgaaaaccctgctggttagagtgatgacacccgatctgagagagcggctggaaaacctgagaaagaagcctgaaaatatcccccagcccatcagcaatacatctagagccaacctgaataagctgctgaccgattacaccgaaatgaagaaggcgatcctgcatgtgtactgggaagagttccagaaggaccctgtgggcctgatgagccgggtggcccagcctgccagcaagaagatcgatcagaacaagctgaaacctgagatggacgagaagggcaacctgaccaccgccggctttgcctgctctcagtgtggccagcccctgttcgtgtacaagctggagcaggtgtctgagaagggcaaggcttacaccaactacttcggacggtgcaatgtggccgagcacgaaaagctgatcctgctggcccagctgaagcccgagaaggatagcgacgaagccgtgacatatagcctgggaaagtttgggcagagggccctggatttctacagcattcatgtgaccaaggagtccacccaccccgtgaagcccctggcccagatcgccggaaacagatacgcctccggacctgtgggaaaggccctgagcgacgcatgtatgggcacaatcgcctccttcctgtctaagtaccaggacatcatcatcgaacaccagaaggtggtgaagggcaaccagaagagactggagagcctgcgggagctggccggcaaggaaaacctggaataccctagcgtgaccctgccacctcagcctcacaccaaggagggcgttgatgcctacaacgaagtgatcgcccgggtgcgaatgtgggtgaacctgaacctgtggcagaagctgaagctaagcagagatgatgccaagcctctgctgagactgaagggattcccttcctttcctctggtcgagagacaggccaacgaagtggactggtgggacatggtgtgtaacgtgaagaagctgatcaacgagaaaaaggaggatggcaaggtgttttggcagaatctggctggctacaagagacaggaagccctgagaccatacctgagcagcgaggaagatcggaagaagggaaagaaattcgctcggtaccagctgggcgacctgctgctgcacctggaaaagaagcacggcgaggactggggaaaggtgtacgacgaggcctgggagcggattgacaagaaagtggaaggcctgagcaagcacatcaagctggaagaggaacggagaagcgaggacgcccagagcaaggccgccctgaccgactggctgcgggctaaggccagcttcgtgatcgagggcctgaaggaggccgacaaggacgagttctgcagatgcgagctgaagctgcagaagtggtacggggacctgcggggaaagcccttcgccatcgaagccgagaacagcatcctggacatcagcggcttcagcaagcagtacaactgtgccttcatctggcagaaggacggcgtgaagaagctgaacctgtacctgatcatcaactacttcaagggcggcaagctgcggttcaagaagatcaaacctgaagccttcgaagccaacagattctacaccgtgatcaacaaaaagagcggcgagatcgtgcccatggaggtgaacttcaacttcgacgaccccaacctgatcatcctgcctctggcctttggcaagagacagggcagagaattcatctggaacgacctgctgtccctggaaaccggcagcctgaagctggccaacggaagagtgatcgagaagacactgtacaacagaagaacccggcaggatgagcctgccctgttcgtggccctgaccttcgagcggcgggaggtcctggactcctccaatatcaaaccaatgaacctgatcggcgtggcaagaggcgaaaacatccccgccgtgatcgccctgaccgaccccgagggctgcccactgagccggtttaaggatagcctgggaaacccaacccacatcctgagaatcggcgagagctataaggagaagcagcggaccatccaggccaagaaggaggtggagcagcggagagccggcggctacagccggaagtacgccagcaaagccaagaatctggcagacgatatggtgagaaacaccgctagagatctgctgtactacgccgtgacccaggatgccatgctgatcttcgccaacctgagccggggcttcggccggcagggcaagcggaccttcatggccgagagacagtacacacggatggaggactggctgaccgccaagctggcctacgagggcctgagcaagacctacctgtccaagacactggcccagtacacctccaagacatgcagcaactgtgggtttaccatcaccagcgccgactacgacagggtgctggagaagctgaagaagacagcaacaggctggatgaccacaattaacggcaaggagctgaaggtggagggccagattacctactacaacagatacaagagacagaacgtagtcaaggacctgtccgtcgagctggatagactgagcgaagaatctgtgaacaacgacatctcctcctggacaaagggcagaagcggagaagctctgagcctcctgaagaaaagattctcccatagacccgtgcaggagaagttcgtgtgcctgaactgcggcttcgagacacacgcagccgagcaagccgccctgaacatcgccagatcctggctgttcctgcggagccaggagtacaagaaataccagacaaacaagacaaccggcaacaccgataagagagccttcgtcgagacctggcagtccttttaccggaagaagcttaaggaggtgtggaaacctgccgtgcggtctggcggatctggcggaggctcctatgaccaaggcccaggagagcctgaccctgaaggacgtggccgtggacttcacctgggaggagtggcagctgctgggccccgcccagaagaggctgtacagggacgtgatgctggagaactacagcaacctggtgagcgtgggctaccaggccagcaagcccgacgccctgaccaagctggagcagggcgagcccctgtggaccctggaggacgagatccacagccccgcccaccccgagatcggatctggctccggcagcggccccaagaaaaagagaaaagtctaagctgccttctgcggggcttgccttctggccatgcccttcttctctcccttgcacctgtacctcttggtctttgaataaagcctgagtaggaaggctagcaaaaaaaaaaaaaaaaaaaaaaaaaaaaaaaaaaaaaaaaaaaaaaaaaaaaaaaaaaaaaaaaaaaaaaaaaaaaaaaa

SEQ ID NO: 16018 - RNA, 9485 nt, synthetic construct
  source 1..9485: mol_type = other RNA
aggaaataagagagaaaagaagagtaagaagaaatataagagccaccatggcccctaagaagaagcgtaaagtgagccggatggaacgcctcgtctacgaggtgcggcagaagtgcagaaacatcgaggacatctgcatctcctgcggatctctgaacgtgaccctggagcacccactgttcatcggcggcatgtgccagaactgtaaaaactgttttctggagtgtgcctatcaatacgacgatgacggctaccagagctactgcaccatctgttgcggcggaagagaggtgctgatgtgtggaaataacaactgctgccggtgcttctgcgtggaatgcgtggacctgctggtgggccccggcgccgcccaggccgctattaaggaagatccttggaactgctacatgtgcggccacaagggcacatacggcctgctgagacggagagaggactggcctagcagactgcagatgttcttcgccaataaccacgaccaggagttcgacccccctaaggtgtaccctcccgtccccgccgagaagagaaagcccatccgggtcctgagcctgttcgatggcatcgccaccggtctgctggtgctgaaggacctgggcatccaggtggataggtacattgcctccgaggtgtgcgaggactccatcaccgtgggaatggtgcgtcatcagggcaagatcatgtacgtgggcgacgtgcggagcgtgacacagaagcatatccaggagtggggccctttcgacctggtgatcggcggcagcccttgcaatgacctgagcatcgtgaacccagcccggaagggcctgtacgagggaaccggcagactgttcttcgagttttacagactgctgcacgacgcccggcctaaggaaggcgacgaccggcccttcttttggctgttcgagaatgtggtggccatgggagtcagcgacaagcgggatattagccggttcctggagagcaaccccgtgatgatcgatgccaaggaagtgagcgccgcccaccgggccagatacttctggggcaatctgcctggcatgaacagacccctggccagcaccgtgaacgacaagctggagctgcaggagtgcctggagcacggccggatcgccaagttcagcaaggtgagaaccatcaccacccgaagcaacagcatcaaacaaggcaaggaccagcactttcctgtgttcatgaacgagaaggaggacatcctgtggtgtaccgagatggagagagtgttcgggttcccagtccactacacagatgtcagcaacatgtctagactggccagacagagactgctgggaagaagctggtccgtccctgtgatcagacacctgttcgcccctctgaaggagtacttcgcctgcgtgagcagcggcaacagcaacgccaacagccggggccccagcttctctagcggcctggtgccactgtccctgagagggagccacatgggccccatggagatctacaaaaccgtgagcgcctggaagcggcagcctgtgcgcgtgctgagcctgtttcggaatatcgataaagtcctgaaaagcctgggattcctggagagcggctctggctccggcggtggcaccctgaagtacgtggaggatgtgacaaacgtggtcagacgggatgtggagaagtggggccccttcgatctggtgtacggcagcacccaacccctgggcagctcttgtgaccggtgccctggctggtacatgtttcagttccaccggatcctgcagtacgccctgccgagacaggagtcccagcggccattcttttggattttcatggacaacttgctgctgaccgaggatgaccaggaaactaccactcggttcctgcagaccgaagccgtgaccctgcaggacgtgagaggccgggactaccagaacgccatgcgggtgtggtccaacatccctggactgaaaagcaagcacgcacctctgacccctaaagaagaggagtacctgcaggcccaggtgcggagcagaagcaagctggacgcccctaaggtggatctgctggtgaagaattgcctcctgcccctgagagagtacttcaagtatttcagccagaatagtctgcccctgggaggcagcggcggcggcgccctggtgacatttgaggacgtcgccgtgcggttcacccaggaggaatgggctctgctggatccttctcagaaaatcctgtaccgggacgtgatgagagagacataccggaatctgacctccgtgggcatcaactgggaatgttgggaccttgaagcctgcttcagaagcctgggaagaaacctgagagtgcaggtggtgaagagaaagtgcgagctgaccaacagcggcccctgcgccgagggcggcccaagcagcggcgcccctcctcccagcggcggcagcccagccggctccccaacctctaccgaggagggcacctctgagtccgccacccccgagagcggccctggcacctccaccgagcccagcgagggcagcgcacccggcagccctgccggcagccccacctccacagaggagggaaccagcaccgagcccagcgaaggcagcgccccaggcaccagcaccgagcctagtgagcaggagattaaacggatcaacaagatcagaagaagacttgtgaaagacagcaacaccaagaaggccggcaagacaggccccatgaaaaccctgctggttagagtgatgacacccgatctgagagagcggctggaaaacctgagaaagaagcctgaaaatatcccccagcccatcagcaatacatctagagccaacctgaataagctgctgaccgattacaccgaaatgaagaaggcgatcctgcatgtgtactgggaagagttccagaaggaccctgtgggcctgatgagccgggtggcccagcctgccagcaagaagatcgatcagaacaagctgaaacctgagatggacgagaagggcaacctgaccaccgccggctttgcctgctctcagtgtggccagcccctgttcgtgtacaagctggagcaggtgtctgagaagggcaaggcttacaccaactacttcggacggtgcaatgtggccgagcacgaaaagctgatcctgctggcccagctgaagcccgagaaggatagcgacgaagccgtgacatatagcctgggaaagtttgggcagagggccctggatttctacagcattcatgtgaccaaggagtccacccaccccgtgaagcccctggcccagatcgccggaaacagatacgcctccggacctgtgggaaaggccctgagcgacgcatgtatgggcacaatcgcctccttcctgtctaagtaccaggacatcatcatcgaacaccagaaggtggtgaagggcaaccagaagagactggagagcctgcgggagctggccggcaaggaaaacctggaataccctagcgtgaccctgccacctcagcctcacaccaaggagggcgttgatgcctacaacgaagtgatcgcccgggtgcgaatgtgggtgaacctgaacctgtggcagaagctgaagctaagcagagatgatgccaagcctctgctgagactgaagggattcccttcctttcctctggtcgagagacaggccaacgaagtggactggtgggacatggtgtgtaacgtgaagaagctgatcaacgagaaaaaggaggatggcaaggtgttttggcagaatctggctggctacaagagacaggaagccctgagaccatacctgagcagcgaggaagatcggaagaagggaaagaaattcgctcggtaccagctgggcgacctgctgctgcacctggaaaagaagcacggcgaggactggggaaaggtgtacgacgaggcctgggagcggattgacaagaaagtggaaggcctgagcaagcacatcaagctggaagaggaacggagaagcgaggacgcccagagcaaggccgccctgaccgactggctgcgggctaaggccagcttcgtgatcgagggcctgaaggaggccgacaaggacgagttctgcagatgcgagctgaagctgcagaagtggtacggggacctgcggggaaagcccttcgccatcgaagccgagaacagcatcctggacatcagcggcttcagcaagcagtacaactgtgccttcatctggcagaaggacggcgtgaagaagctgaacctgtacctgatcatcaactacttcaagggcggcaagctgcggttcaagaagatcaaacctgaagccttcgaagccaacagattctacaccgtgatcaacaaaaagagcggcgagatcgtgcccatggaggtgaacttcaacttcgacgaccccaacctgatcatcctgcctctggcctttggcaagagacagggcagagaattcatctggaacgacctgctgtccctggaaaccggcagcctgaagctggccaacggaagagtgatcgagaagacactgtacaacagaagaacccggcaggatgagcctgccctgttcgtggccctgaccttcgagcggcgggaggtcctggactcctccaatatcaaaccaatgaacctgatcggcgtggcaagaggcgaaaacatccccgccgtgatcgccctgaccgaccccgagggctgcccactgagccggtttaaggatagcctgggaaacccaacccacatcctgagaatcggcgagagctataaggagaagcagcggaccatccaggccaagaaggaggtggagcagcggagagccggcggctacagccggaagtacgccagcaaagccaagaatctggcagacgatatggtgagaaacaccgctagagatctgctgtactacgccgtgacccaggatgccatgctgatcttcgccaacctgagccggggcttcggccggcagggcaagcggaccttcatggccgagagacagtacacacggatggaggactggctgaccgccaagctggcctacgagggcctgagcaagacctacctgtccaagacactggcccagtacacctccaagacatgcagcaactgtgggtttaccatcaccagcgccgactacgacagggtgctggagaagctgaagaagacagcaacaggctggatgaccacaattaacggcaaggagctgaaggtggagggccagattacctactacaacagatacaagagacagaacgtagtcaaggacctgtccgtcgagctggatagactgagcgaagaatctgtgaacaacgacatctcctcctggacaaagggcagaagcggagaagctctgagcctcctgaagaaaagattctcccatagacccgtgcaggagaagttcgtgtgcctgaactgcggcttcgagacacacgcagccgagcaagccgccctgaacatcgccagatcctggctgttcctgcggagccaggagtacaagaaataccagacaaacaagacaaccggcaacaccgataagagagccttcgtcgagacctggcagtccttttaccggaagaagcttaaggaggtgtggaaacctgccgtgcggtctggcggatctggcggaggctccatgatgaccgccgtgagcctgaccaccaggccccaggagagcgtggccttcgaggacgtggccgtgtacttcaccaccaaggagtgggccatcatggtgcccgccgagagggccctgtacagggacgtgatgctggagaactacgaggccgtggccttcgtggtgccccccaccagcaagcccgccctggtgagccacctggagcagggcaaggagagctgcttcacccagccccagggcgtgggcggcccaagcagcggcgcccctcctcccagcggcggcagcccagccggctccccaacctctaccgaggagggcacctctgagtccgccacccccgagagcggccctggcacctccaccgagcccagcgagggcagcgcacccggcagccctgccggcagccccacctccacagaggagggaaccagcaccgagcccagcgaaggcagcgccccaggcaccagcaccgagcctagtgagcaggagattaaacggatcaacaagatcagaagaagacttgtgaaagacagcaacaccaagaaggccggcaagacaggccccatgaaaaccctgctggttagagtgatgacacccgatctgagagagcggctggaaaacctgagaaagaagcctgaaaatatcccccagcccatcagcaatacatctagagccaacctgaataagctgctgaccgattacaccgaaatgaagaaggcgatcctgcatgtgtactgggaagagttccagaaggaccctgtgggcctgatgagccgggtggcccagcctgccagcaagaagatcgatcagaacaagctgaaacctgagatggacgagaagggcaacctgaccaccgccggctttgcctgctctcagtgtggccagcccctgttcgtgtacaagctggagcaggtgtctgagaagggcaaggcttacaccaactacttcggacggtgcaatgtggccgagcacgaaaagctgatcctgctggcccagctgaagcccgagaaggatagcgacgaagccgtgacatatagcctgggaaagtttgggcagagggccctggatttctacagcattcatgtgaccaaggagtccacccaccccgtgaagcccctggcccagatcgccggaaacagatacgcctccggacctgtgggaaaggccctgagcgacgcatgtatgggcacaatcgcctccttcctgtctaagtaccaggacatcatcatcgaacaccagaaggtggtgaagggcaaccagaagagactggagagcctgcgggagctggccggcaaggaaaacctggaataccctagcgtgaccctgccacctcagcctcacaccaaggagggcgttgatgcctacaacgaagtgatcgcccgggtgcgaatgtgggtgaacctgaacctgtggcagaagctgaagctaagcagagatgatgccaagcctctgctgagactgaagggattcccttcctttcctctggtcgagagacaggccaacgaagtggactggtgggacatggtgtgtaacgtgaagaagctgatcaacgagaaaaaggaggatggcaaggtgttttggcagaatctggctggctacaagagacaggaagccctgagaccatacctgagcagcgaggaagatcggaagaagggaaagaaattcgctcggtaccagctgggcgacctgctgctgcacctggaaaagaagcacggcgaggactggggaaaggtgtacgacgaggcctgggagcggattgacaagaaagtggaaggcctgagcaagcacatcaagctggaagaggaacggagaagcgaggacgcccagagcaaggccgccctgaccgactggctgcgggctaaggccagcttcgtgatcgagggcctgaaggaggccgacaaggacgagttctgcagatgcgagctgaagctgcagaagtggtacggggacctgcggggaaagcccttcgccatcgaagccgagaacagcatcctggacatcagcggcttcagcaagcagtacaactgtgccttcatctggcagaaggacggcgtgaagaagctgaacctgtacctgatcatcaactacttcaagggcggcaagctgcggttcaagaagatcaaacctgaagccttcgaagccaacagattctacaccgtgatcaacaaaaagagcggcgagatcgtgcccatggaggtgaacttcaacttcgacgaccccaacctgatcatcctgcctctggcctttggcaagagacagggcagagaattcatctggaacgacctgctgtccctggaaaccggcagcctgaagctggccaacggaagagtgatcgagaagacactgtacaacagaagaacccggcaggatgagcctgccctgttcgtggccctgaccttcgagcggcgggaggtcctggactcctccaatatcaaaccaatgaacctgatcggcgtggcaagaggcgaaaacatccccgccgtgatcgccctgaccgaccccgagggctgcccactgagccggtttaaggatagcctgggaaacccaacccacatcctgagaatcggcgagagctataaggagaagcagcggaccatccaggccaagaaggaggtggagcagcggagagccggcggctacagccggaagtacgccagcaaagccaagaatctggcagacgatatggtgagaaacaccgctagagatctgctgtactacgccgtgacccaggatgccatgctgatcttcgccaacctgagccggggcttcggccggcagggcaagcggaccttcatggccgagagacagtacacacggatggaggactggctgaccgccaagctggcctacgagggcctgagcaagacctacctgtccaagacactggcccagtacacctccaagacatgcagcaactgtgggtttaccatcaccagcgccgactacgacagggtgctggagaagctgaagaagacagcaacaggctggatgaccacaattaacggcaaggagctgaaggtggagggccagattacctactacaacagatacaagagacagaacgtagtcaaggacctgtccgtcgagctggatagactgagcgaagaatctgtgaacaacgacatctcctcctggacaaagggcagaagcggagaagctctgagcctcctgaagaaaagattctcccatagacccgtgcaggagaagttcgtgtgcctgaactgcggcttcgagacacacgcagccgagcaagccgccctgaacatcgccagatcctggctgttcctgcggagccaggagtacaagaaataccagacaaacaagacaaccggcaacaccgataagagagccttcgtcgagacctggcagtccttttaccggaagaagcttaaggaggtgtggaaacctgccgtgcggtctggcggatctggcggaggctcctatgatgaccgccgtgagcctgaccaccaggccccaggagagcgtggccttcgaggacgtggccgtgtacttcaccaccaaggagtgggccatcatggtgcccgccgagagggccctgtacagggacgtgatgctggagaactacgaggccgtggccttcgtggtgccccccaccagcaagcccgccctggtgagccacctggagcagggcaaggagagctgcttcacccagccccagggcgtgggatctggctccggcagcggccccaagaaaaagagaaaagtctaagctgccttctgcggggcttgccttctggccatgcccttcttctctcccttgcacctgtacctcttggtctttgaataaagcctgagtaggaaggctagcaaaaaaaaaaaaaaaaaaaaaaaaaaaaaaaaaaaaaaaaaaaaaaaaaaaaaaaaaaaaaaaaaaaaaaaaaaaaaaaa

SEQ ID NO: 16019 - RNA, 9485 nt, synthetic construct
  source 1..9485: mol_type = other RNA
aggaaataagagagaaaagaagagtaagaagaaatataagagccaccatggcccctaagaagaagcgtaaagtgagccggatggaacgcctcgtctacgaggtgcggcagaagtgcagaaacatcgaggacatctgcatctcctgcggatctctgaacgtgaccctggagcacccactgttcatcggcggcatgtgccagaactgtaaaaactgttttctggagtgtgcctatcaatacgacgatgacggctaccagagctactgcaccatctgttgcggcggaagagaggtgctgatgtgtggaaataacaactgctgccggtgcttctgcgtggaatgcgtggacctgctggtgggccccggcgccgcccaggccgctattaaggaagatccttggaactgctacatgtgcggccacaagggcacatacggcctgctgagacggagagaggactggcctagcagactgcagatgttcttcgccaataaccacgaccaggagttcgacccccctaaggtgtaccctcccgtccccgccgagaagagaaagcccatccgggtcctgagcctgttcgatggcatcgccaccggtctgctggtgctgaaggacctgggcatccaggtggataggtacattgcctccgaggtgtgcgaggactccatcaccgtgggaatggtgcgtcatcagggcaagatcatgtacgtgggcgacgtgcggagcgtgacacagaagcatatccaggagtggggccctttcgacctggtgatcggcggcagcccttgcaatgacctgagcatcgtgaacccagcccggaagggcctgtacgagggaaccggcagactgttcttcgagttttacagactgctgcacgacgcccggcctaaggaaggcgacgaccggcccttcttttggctgttcgagaatgtggtggccatgggagtcagcgacaagcgggatattagccggttcctggagagcaaccccgtgatgatcgatgccaaggaagtgagcgccgcccaccgggccagatacttctggggcaatctgcctggcatgaacagacccctggccagcaccgtgaacgacaagctggagctgcaggagtgcctggagcacggccggatcgccaagttcagcaaggtgagaaccatcaccacccgaagcaacagcatcaaacaaggcaaggaccagcactttcctgtgttcatgaacgagaaggaggacatcctgtggtgtaccgagatggagagagtgttcgggttcccagtccactacacagatgtcagcaacatgtctagactggccagacagagactgctgggaagaagctggtccgtccctgtgatcagacacctgttcgcccctctgaaggagtacttcgcctgcgtgagcagcggcaacagcaacgccaacagccggggccccagcttctctagcggcctggtgccactgtccctgagagggagccacatgggccccatggagatctacaaaaccgtgagcgcctggaagcggcagcctgtgcgcgtgctgagcctgtttcggaatatcgataaagtcctgaaaagcctgggattcctggagagcggctctggctccggcggtggcaccctgaagtacgtggaggatgtgacaaacgtggtcagacgggatgtggagaagtggggccccttcgatctggtgtacggcagcacccaacccctgggcagctcttgtgaccggtgccctggctggtacatgtttcagttccaccggatcctgcagtacgccctgccgagacaggagtcccagcggccattcttttggattttcatggacaacttgctgctgaccgaggatgaccaggaaactaccactcggttcctgcagaccgaagccgtgaccctgcaggacgtgagaggccgggactaccagaacgccatgcgggtgtggtccaacatccctggactgaaaagcaagcacgcacctctgacccctaaagaagaggagtacctgcaggcccaggtgcggagcagaagcaagctggacgcccctaaggtggatctgctggtgaagaattgcctcctgcccctgagagagtacttcaagtatttcagccagaatagtctgcccctgggaggcagcggcggcggcgccctggtgacatttgaggacgtcgccgtgcggttcacccaggaggaatgggctctgctggatccttctcagaaaatcctgtaccgggacgtgatgagagagacataccggaatctgacctccgtgggcatcaactgggaatgttgggaccttgaagcctgcttcagaagcctgggaagaaacctgagagtgcaggtggtgaagagaaagtgcgagctgaccaacagcggcccctgcgccgagggcggcccaagcagcggcgcccctcctcccagcggcggcagcccagccggctccccaacctctaccgaggagggcacctctgagtccgccacccccgagagcggccctggcacctccaccgagcccagcgagggcagcgcacccggcagccctgccggcagccccacctccacagaggagggaaccagcaccgagcccagcgaaggcagcgccccaggcaccagcaccgagcctagtgagcaggagattaaacggatcaacaagatcagaagaagacttgtgaaagacagcaacaccaagaaggccggcaagacaggccccatgaaaaccctgctggttagagtgatgacacccgatctgagagagcggctggaaaacctgagaaagaagcctgaaaatatcccccagcccatcagcaatacatctagagccaacctgaataagctgctgaccgattacaccgaaatgaagaaggcgatcctgcatgtgtactgggaagagttccagaaggaccctgtgggcctgatgagccgggtggcccagcctgccagcaagaagatcgatcagaacaagctgaaacctgagatggacgagaagggcaacctgaccaccgccggctttgcctgctctcagtgtggccagcccctgttcgtgtacaagctggagcaggtgtctgagaagggcaaggcttacaccaactacttcggacggtgcaatgtggccgagcacgaaaagctgatcctgctggcccagctgaagcccgagaaggatagcgacgaagccgtgacatatagcctgggaaagtttgggcagagggccctggatttctacagcattcatgtgaccaaggagtccacccaccccgtgaagcccctggcccagatcgccggaaacagatacgcctccggacctgtgggaaaggccctgagcgacgcatgtatgggcacaatcgcctccttcctgtctaagtaccaggacatcatcatcgaacaccagaaggtggtgaagggcaaccagaagagactggagagcctgcgggagctggccggcaaggaaaacctggaataccctagcgtgaccctgccacctcagcctcacaccaaggagggcgttgatgcctacaacgaagtgatcgcccgggtgcgaatgtgggtgaacctgaacctgtggcagaagctgaagctaagcagagatgatgccaagcctctgctgagactgaagggattcccttcctttcctctggtcgagagacaggccaacgaagtggactggtgggacatggtgtgtaacgtgaagaagctgatcaacgagaaaaaggaggatggcaaggtgttttggcagaatctggctggctacaagagacaggaagccctgagaccatacctgagcagcgaggaagatcggaagaagggaaagaaattcgctcggtaccagctgggcgacctgctgctgcacctggaaaagaagcacggcgaggactggggaaaggtgtacgacgaggcctgggagcggattgacaagaaagtggaaggcctgagcaagcacatcaagctggaagaggaacggagaagcgaggacgcccagagcaaggccgccctgaccgactggctgcgggctaaggccagcttcgtgatcgagggcctgaaggaggccgacaaggacgagttctgcagatgcgagctgaagctgcagaagtggtacggggacctgcggggaaagcccttcgccatcgaagccgagaacagcatcctggacatcagcggcttcagcaagcagtacaactgtgccttcatctggcagaaggacggcgtgaagaagctgaacctgtacctgatcatcaactacttcaagggcggcaagctgcggttcaagaagatcaaacctgaagccttcgaagccaacagattctacaccgtgatcaacaaaaagagcggcgagatcgtgcccatggaggtgaacttcaacttcgacgaccccaacctgatcatcctgcctctggcctttggcaagagacagggcagagaattcatctggaacgacctgctgtccctggaaaccggcagcctgaagctggccaacggaagagtgatcgagaagacactgtacaacagaagaacccggcaggatgagcctgccctgttcgtggccctgaccttcgagcggcgggaggtcctggactcctccaatatcaaaccaatgaacctgatcggcgtggcaagaggcgaaaacatccccgccgtgatcgccctgaccgaccccgagggctgcccactgagccggtttaaggatagcctgggaaacccaacccacatcctgagaatcggcgagagctataaggagaagcagcggaccatccaggccaagaaggaggtggagcagcggagagccggcggctacagccggaagtacgccagcaaagccaagaatctggcagacgatatggtgagaaacaccgctagagatctgctgtactacgccgtgacccaggatgccatgctgatcttcgccaacctgagccggggcttcggccggcagggcaagcggaccttcatggccgagagacagtacacacggatggaggactggctgaccgccaagctggcctacgagggcctgagcaagacctacctgtccaagacactggcccagtacacctccaagacatgcagcaactgtgggtttaccatcaccagcgccgactacgacagggtgctggagaagctgaagaagacagcaacaggctggatgaccacaattaacggcaaggagctgaaggtggagggccagattacctactacaacagatacaagagacagaacgtagtcaaggacctgtccgtcgagctggatagactgagcgaagaatctgtgaacaacgacatctcctcctggacaaagggcagaagcggagaagctctgagcctcctgaagaaaagattctcccatagacccgtgcaggagaagttcgtgtgcctgaactgcggcttcgagacacacgcagccgagcaagccgccctgaacatcgccagatcctggctgttcctgcggagccaggagtacaagaaataccagacaaacaagacaaccggcaacaccgataagagagccttcgtcgagacctggcagtccttttaccggaagaagcttaaggaggtgtggaaacctgccgtgcggtctggcggatctggcggaggctcccagatgcaggtgaagttcgaggacatcgccatcagcttcagccaggaggagtgggagtacctgaacgaggagcagaaggagctgtacagggaggtgatggaggagaactaccagaccctgctgagcctggccaccgacagccccaccttcacccccaagatcatcagctacatcaagaggggcgaggagccctacatcaggggcgagcccgacagcgaggagagggagagcggcaagagcagcggcggcccaagcagcggcgcccctcctcccagcggcggcagcccagccggctccccaacctctaccgaggagggcacctctgagtccgccacccccgagagcggccctggcacctccaccgagcccagcgagggcagcgcacccggcagccctgccggcagccccacctccacagaggagggaaccagcaccgagcccagcgaaggcagcgccccaggcaccagcaccgagcctagtgagcaggagattaaacggatcaacaagatcagaagaagacttgtgaaagacagcaacaccaagaaggccggcaagacaggccccatgaaaaccctgctggttagagtgatgacacccgatctgagagagcggctggaaaacctgagaaagaagcctgaaaatatcccccagcccatcagcaatacatctagagccaacctgaataagctgctgaccgattacaccgaaatgaagaaggcgatcctgcatgtgtactgggaagagttccagaaggaccctgtgggcctgatgagccgggtggcccagcctgccagcaagaagatcgatcagaacaagctgaaacctgagatggacgagaagggcaacctgaccaccgccggctttgcctgctctcagtgtggccagcccctgttcgtgtacaagctggagcaggtgtctgagaagggcaaggcttacaccaactacttcggacggtgcaatgtggccgagcacgaaaagctgatcctgctggcccagctgaagcccgagaaggatagcgacgaagccgtgacatatagcctgggaaagtttgggcagagggccctggatttctacagcattcatgtgaccaaggagtccacccaccccgtgaagcccctggcccagatcgccggaaacagatacgcctccggacctgtgggaaaggccctgagcgacgcatgtatgggcacaatcgcctccttcctgtctaagtaccaggacatcatcatcgaacaccagaaggtggtgaagggcaaccagaagagactggagagcctgcgggagctggccggcaaggaaaacctggaataccctagcgtgaccctgccacctcagcctcacaccaaggagggcgttgatgcctacaacgaagtgatcgcccgggtgcgaatgtgggtgaacctgaacctgtggcagaagctgaagctaagcagagatgatgccaagcctctgctgagactgaagggattcccttcctttcctctggtcgagagacaggccaacgaagtggactggtgggacatggtgtgtaacgtgaagaagctgatcaacgagaaaaaggaggatggcaaggtgttttggcagaatctggctggctacaagagacaggaagccctgagaccatacctgagcagcgaggaagatcggaagaagggaaagaaattcgctcggtaccagctgggcgacctgctgctgcacctggaaaagaagcacggcgaggactggggaaaggtgtacgacgaggcctgggagcggattgacaagaaagtggaaggcctgagcaagcacatcaagctggaagaggaacggagaagcgaggacgcccagagcaaggccgccctgaccgactggctgcgggctaaggccagcttcgtgatcgagggcctgaaggaggccgacaaggacgagttctgcagatgcgagctgaagctgcagaagtggtacggggacctgcggggaaagcccttcgccatcgaagccgagaacagcatcctggacatcagcggcttcagcaagcagtacaactgtgccttcatctggcagaaggacggcgtgaagaagctgaacctgtacctgatcatcaactacttcaagggcggcaagctgcggttcaagaagatcaaacctgaagccttcgaagccaacagattctacaccgtgatcaacaaaaagagcggcgagatcgtgcccatggaggtgaacttcaacttcgacgaccccaacctgatcatcctgcctctggcctttggcaagagacagggcagagaattcatctggaacgacctgctgtccctggaaaccggcagcctgaagctggccaacggaagagtgatcgagaagacactgtacaacagaagaacccggcaggatgagcctgccctgttcgtggccctgaccttcgagcggcgggaggtcctggactcctccaatatcaaaccaatgaacctgatcggcgtggcaagaggcgaaaacatccccgccgtgatcgccctgaccgaccccgagggctgcccactgagccggtttaaggatagcctgggaaacccaacccacatcctgagaatcggcgagagctataaggagaagcagcggaccatccaggccaagaaggaggtggagcagcggagagccggcggctacagccggaagtacgccagcaaagccaagaatctggcagacgatatggtgagaaacaccgctagagatctgctgtactacgccgtgacccaggatgccatgctgatcttcgccaacctgagccggggcttcggccggcagggcaagcggaccttcatggccgagagacagtacacacggatggaggactggctgaccgccaagctggcctacgagggcctgagcaagacctacctgtccaagacactggcccagtacacctccaagacatgcagcaactgtgggtttaccatcaccagcgccgactacgacagggtgctggagaagctgaagaagacagcaacaggctggatgaccacaattaacggcaaggagctgaaggtggagggccagattacctactacaacagatacaagagacagaacgtagtcaaggacctgtccgtcgagctggatagactgagcgaagaatctgtgaacaacgacatctcctcctggacaaagggcagaagcggagaagctctgagcctcctgaagaaaagattctcccatagacccgtgcaggagaagttcgtgtgcctgaactgcggcttcgagacacacgcagccgagcaagccgccctgaacatcgccagatcctggctgttcctgcggagccaggagtacaagaaataccagacaaacaagacaaccggcaacaccgataagagagccttcgtcgagacctggcagtccttttaccggaagaagcttaaggaggtgtggaaacctgccgtgcggtctggcggatctggcggaggctcctcagatgcaggtgaagttcgaggacatcgccatcagcttcagccaggaggagtgggagtacctgaacgaggagcagaaggagctgtacagggaggtgatggaggagaactaccagaccctgctgagcctggccaccgacagccccaccttcacccccaagatcatcagctacatcaagaggggcgaggagccctacatcaggggcgagcccgacagcgaggagagggagagcggcaagagcagcggatctggctccggcagcggccccaagaaaaagagaaaagtctaagctgccttctgcggggcttgccttctggccatgcccttcttctctcccttgcacctgtacctcttggtctttgaataaagcctgagtaggaaggctagcaaaaaaaaaaaaaaaaaaaaaaaaaaaaaaaaaaaaaaaaaaaaaaaaaaaaaaaaaaaaaaaaaaaaaaaaaaaaaaaa

SEQ ID NO: 16020 - RNA, 9485 nt, synthetic construct
  source 1..9485: mol_type = other RNA
aggaaataagagagaaaagaagagtaagaagaaatataagagccaccatggcccctaagaagaagcgtaaagtgagccggatggaacgcctcgtctacgaggtgcggcagaagtgcagaaacatcgaggacatctgcatctcctgcggatctctgaacgtgaccctggagcacccactgttcatcggcggcatgtgccagaactgtaaaaactgttttctggagtgtgcctatcaatacgacgatgacggctaccagagctactgcaccatctgttgcggcggaagagaggtgctgatgtgtggaaataacaactgctgccggtgcttctgcgtggaatgcgtggacctgctggtgggccccggcgccgcccaggccgctattaaggaagatccttggaactgctacatgtgcggccacaagggcacatacggcctgctgagacggagagaggactggcctagcagactgcagatgttcttcgccaataaccacgaccaggagttcgacccccctaaggtgtaccctcccgtccccgccgagaagagaaagcccatccgggtcctgagcctgttcgatggcatcgccaccggtctgctggtgctgaaggacctgggcatccaggtggataggtacattgcctccgaggtgtgcgaggactccatcaccgtgggaatggtgcgtcatcagggcaagatcatgtacgtgggcgacgtgcggagcgtgacacagaagcatatccaggagtggggccctttcgacctggtgatcggcggcagcccttgcaatgacctgagcatcgtgaacccagcccggaagggcctgtacgagggaaccggcagactgttcttcgagttttacagactgctgcacgacgcccggcctaaggaaggcgacgaccggcccttcttttggctgttcgagaatgtggtggccatgggagtcagcgacaagcgggatattagccggttcctggagagcaaccccgtgatgatcgatgccaaggaagtgagcgccgcccaccgggccagatacttctggggcaatctgcctggcatgaacagacccctggccagcaccgtgaacgacaagctggagctgcaggagtgcctggagcacggccggatcgccaagttcagcaaggtgagaaccatcaccacccgaagcaacagcatcaaacaaggcaaggaccagcactttcctgtgttcatgaacgagaaggaggacatcctgtggtgtaccgagatggagagagtgttcgggttcccagtccactacacagatgtcagcaacatgtctagactggccagacagagactgctgggaagaagctggtccgtccctgtgatcagacacctgttcgcccctctgaaggagtacttcgcctgcgtgagcagcggcaacagcaacgccaacagccggggccccagcttctctagcggcctggtgccactgtccctgagagggagccacatgggccccatggagatctacaaaaccgtgagcgcctggaagcggcagcctgtgcgcgtgctgagcctgtttcggaatatcgataaagtcctgaaaagcctgggattcctggagagcggctctggctccggcggtggcaccctgaagtacgtggaggatgtgacaaacgtggtcagacgggatgtggagaagtggggccccttcgatctggtgtacggcagcacccaacccctgggcagctcttgtgaccggtgccctggctggtacatgtttcagttccaccggatcctgcagtacgccctgccgagacaggagtcccagcggccattcttttggattttcatggacaacttgctgctgaccgaggatgaccaggaaactaccactcggttcctgcagaccgaagccgtgaccctgcaggacgtgagaggccgggactaccagaacgccatgcgggtgtggtccaacatccctggactgaaaagcaagcacgcacctctgacccctaaagaagaggagtacctgcaggcccaggtgcggagcagaagcaagctggacgcccctaaggtggatctgctggtgaagaattgcctcctgcccctgagagagtacttcaagtatttcagccagaatagtctgcccctgggaggcagcggcggcggcgccctggtgacatttgaggacgtcgccgtgcggttcacccaggaggaatgggctctgctggatccttctcagaaaatcctgtaccgggacgtgatgagagagacataccggaatctgacctccgtgggcatcaactgggaatgttgggaccttgaagcctgcttcagaagcctgggaagaaacctgagagtgcaggtggtgaagagaaagtgcgagctgaccaacagcggcccctgcgccgagggcggcccaagcagcggcgcccctcctcccagcggcggcagcccagccggctccccaacctctaccgaggagggcacctctgagtccgccacccccgagagcggccctggcacctccaccgagcccagcgagggcagcgcacccggcagccctgccggcagccccacctccacagaggagggaaccagcaccgagcccagcgaaggcagcgccccaggcaccagcaccgagcctagtgagcaggagattaaacggatcaacaagatcagaagaagacttgtgaaagacagcaacaccaagaaggccggcaagacaggccccatgaaaaccctgctggttagagtgatgacacccgatctgagagagcggctggaaaacctgagaaagaagcctgaaaatatcccccagcccatcagcaatacatctagagccaacctgaataagctgctgaccgattacaccgaaatgaagaaggcgatcctgcatgtgtactgggaagagttccagaaggaccctgtgggcctgatgagccgggtggcccagcctgccagcaagaagatcgatcagaacaagctgaaacctgagatggacgagaagggcaacctgaccaccgccggctttgcctgctctcagtgtggccagcccctgttcgtgtacaagctggagcaggtgtctgagaagggcaaggcttacaccaactacttcggacggtgcaatgtggccgagcacgaaaagctgatcctgctggcccagctgaagcccgagaaggatagcgacgaagccgtgacatatagcctgggaaagtttgggcagagggccctggatttctacagcattcatgtgaccaaggagtccacccaccccgtgaagcccctggcccagatcgccggaaacagatacgcctccggacctgtgggaaaggccctgagcgacgcatgtatgggcacaatcgcctccttcctgtctaagtaccaggacatcatcatcgaacaccagaaggtggtgaagggcaaccagaagagactggagagcctgcgggagctggccggcaaggaaaacctggaataccctagcgtgaccctgccacctcagcctcacaccaaggagggcgttgatgcctacaacgaagtgatcgcccgggtgcgaatgtgggtgaacctgaacctgtggcagaagctgaagctaagcagagatgatgccaagcctctgctgagactgaagggattcccttcctttcctctggtcgagagacaggccaacgaagtggactggtgggacatggtgtgtaacgtgaagaagctgatcaacgagaaaaaggaggatggcaaggtgttttggcagaatctggctggctacaagagacaggaagccctgagaccatacctgagcagcgaggaagatcggaagaagggaaagaaattcgctcggtaccagctgggcgacctgctgctgcacctggaaaagaagcacggcgaggactggggaaaggtgtacgacgaggcctgggagcggattgacaagaaagtggaaggcctgagcaagcacatcaagctggaagaggaacggagaagcgaggacgcccagagcaaggccgccctgaccgactggctgcgggctaaggccagcttcgtgatcgagggcctgaaggaggccgacaaggacgagttctgcagatgcgagctgaagctgcagaagtggtacggggacctgcggggaaagcccttcgccatcgaagccgagaacagcatcctggacatcagcggcttcagcaagcagtacaactgtgccttcatctggcagaaggacggcgtgaagaagctgaacctgtacctgatcatcaactacttcaagggcggcaagctgcggttcaagaagatcaaacctgaagccttcgaagccaacagattctacaccgtgatcaacaaaaagagcggcgagatcgtgcccatggaggtgaacttcaacttcgacgaccccaacctgatcatcctgcctctggcctttggcaagagacagggcagagaattcatctggaacgacctgctgtccctggaaaccggcagcctgaagctggccaacggaagagtgatcgagaagacactgtacaacagaagaacccggcaggatgagcctgccctgttcgtggccctgaccttcgagcggcgggaggtcctggactcctccaatatcaaaccaatgaacctgatcggcgtggcaagaggcgaaaacatccccgccgtgatcgccctgaccgaccccgagggctgcccactgagccggtttaaggatagcctgggaaacccaacccacatcctgagaatcggcgagagctataaggagaagcagcggaccatccaggccaagaaggaggtggagcagcggagagccggcggctacagccggaagtacgccagcaaagccaagaatctggcagacgatatggtgagaaacaccgctagagatctgctgtactacgccgtgacccaggatgccatgctgatcttcgccaacctgagccggggcttcggccggcagggcaagcggaccttcatggccgagagacagtacacacggatggaggactggctgaccgccaagctggcctacgagggcctgagcaagacctacctgtccaagacactggcccagtacacctccaagacatgcagcaactgtgggtttaccatcaccagcgccgactacgacagggtgctggagaagctgaagaagacagcaacaggctggatgaccacaattaacggcaaggagctgaaggtggagggccagattacctactacaacagatacaagagacagaacgtagtcaaggacctgtccgtcgagctggatagactgagcgaagaatctgtgaacaacgacatctcctcctggacaaagggcagaagcggagaagctctgagcctcctgaagaaaagattctcccatagacccgtgcaggagaagttcgtgtgcctgaactgcggcttcgagacacacgcagccgagcaagccgccctgaacatcgccagatcctggctgttcctgcggagccaggagtacaagaaataccagacaaacaagacaaccggcaacaccgataagagagccttcgtcgagacctggcagtccttttaccggaagaagcttaaggaggtgtggaaacctgccgtgcggtctggcggatctggcggaggctccgtgcaggccagcctgagcttcgaggacgtggccgtgcacttcacctgggaggagtggcagctgctggaccccagccagaaggacctgtacaggaacgtgatgtgggagaactactgcaacctggtgagcgtgggctaccagacccccaagcccgacagcttcttccagctggagcagggcgagcccccctggaccgtggagggcgccggccagagccagacctgccccggcaccagggccagcggcggcccaagcagcggcgcccctcctcccagcggcggcagcccagccggctccccaacctctaccgaggagggcacctctgagtccgccacccccgagagcggccctggcacctccaccgagcccagcgagggcagcgcacccggcagccctgccggcagccccacctccacagaggagggaaccagcaccgagcccagcgaaggcagcgccccaggcaccagcaccgagcctagtgagcaggagattaaacggatcaacaagatcagaagaagacttgtgaaagacagcaacaccaagaaggccggcaagacaggccccatgaaaaccctgctggttagagtgatgacacccgatctgagagagcggctggaaaacctgagaaagaagcctgaaaatatcccccagcccatcagcaatacatctagagccaacctgaataagctgctgaccgattacaccgaaatgaagaaggcgatcctgcatgtgtactgggaagagttccagaaggaccctgtgggcctgatgagccgggtggcccagcctgccagcaagaagatcgatcagaacaagctgaaacctgagatggacgagaagggcaacctgaccaccgccggctttgcctgctctcagtgtggccagcccctgttcgtgtacaagctggagcaggtgtctgagaagggcaaggcttacaccaactacttcggacggtgcaatgtggccgagcacgaaaagctgatcctgctggcccagctgaagcccgagaaggatagcgacgaagccgtgacatatagcctgggaaagtttgggcagagggccctggatttctacagcattcatgtgaccaaggagtccacccaccccgtgaagcccctggcccagatcgccggaaacagatacgcctccggacctgtgggaaaggccctgagcgacgcatgtatgggcacaatcgcctccttcctgtctaagtaccaggacatcatcatcgaacaccagaaggtggtgaagggcaaccagaagagactggagagcctgcgggagctggccggcaaggaaaacctggaataccctagcgtgaccctgccacctcagcctcacaccaaggagggcgttgatgcctacaacgaagtgatcgcccgggtgcgaatgtgggtgaacctgaacctgtggcagaagctgaagctaagcagagatgatgccaagcctctgctgagactgaagggattcccttcctttcctctggtcgagagacaggccaacgaagtggactggtgggacatggtgtgtaacgtgaagaagctgatcaacgagaaaaaggaggatggcaaggtgttttggcagaatctggctggctacaagagacaggaagccctgagaccatacctgagcagcgaggaagatcggaagaagggaaagaaattcgctcggtaccagctgggcgacctgctgctgcacctggaaaagaagcacggcgaggactggggaaaggtgtacgacgaggcctgggagcggattgacaagaaagtggaaggcctgagcaagcacatcaagctggaagaggaacggagaagcgaggacgcccagagcaaggccgccctgaccgactggctgcgggctaaggccagcttcgtgatcgagggcctgaaggaggccgacaaggacgagttctgcagatgcgagctgaagctgcagaagtggtacggggacctgcggggaaagcccttcgccatcgaagccgagaacagcatcctggacatcagcggcttcagcaagcagtacaactgtgccttcatctggcagaaggacggcgtgaagaagctgaacctgtacctgatcatcaactacttcaagggcggcaagctgcggttcaagaagatcaaacctgaagccttcgaagccaacagattctacaccgtgatcaacaaaaagagcggcgagatcgtgcccatggaggtgaacttcaacttcgacgaccccaacctgatcatcctgcctctggcctttggcaagagacagggcagagaattcatctggaacgacctgctgtccctggaaaccggcagcctgaagctggccaacggaagagtgatcgagaagacactgtacaacagaagaacccggcaggatgagcctgccctgttcgtggccctgaccttcgagcggcgggaggtcctggactcctccaatatcaaaccaatgaacctgatcggcgtggcaagaggcgaaaacatccccgccgtgatcgccctgaccgaccccgagggctgcccactgagccggtttaaggatagcctgggaaacccaacccacatcctgagaatcggcgagagctataaggagaagcagcggaccatccaggccaagaaggaggtggagcagcggagagccggcggctacagccggaagtacgccagcaaagccaagaatctggcagacgatatggtgagaaacaccgctagagatctgctgtactacgccgtgacccaggatgccatgctgatcttcgccaacctgagccggggcttcggccggcagggcaagcggaccttcatggccgagagacagtacacacggatggaggactggctgaccgccaagctggcctacgagggcctgagcaagacctacctgtccaagacactggcccagtacacctccaagacatgcagcaactgtgggtttaccatcaccagcgccgactacgacagggtgctggagaagctgaagaagacagcaacaggctggatgaccacaattaacggcaaggagctgaaggtggagggccagattacctactacaacagatacaagagacagaacgtagtcaaggacctgtccgtcgagctggatagactgagcgaagaatctgtgaacaacgacatctcctcctggacaaagggcagaagcggagaagctctgagcctcctgaagaaaagattctcccatagacccgtgcaggagaagttcgtgtgcctgaactgcggcttcgagacacacgcagccgagcaagccgccctgaacatcgccagatcctggctgttcctgcggagccaggagtacaagaaataccagacaaacaagacaaccggcaacaccgataagagagccttcgtcgagacctggcagtccttttaccggaagaagcttaaggaggtgtggaaacctgccgtgcggtctggcggatctggcggaggctcctgtgcaggccagcctgagcttcgaggacgtggccgtgcacttcacctgggaggagtggcagctgctggaccccagccagaaggacctgtacaggaacgtgatgtgggagaactactgcaacctggtgagcgtgggctaccagacccccaagcccgacagcttcttccagctggagcagggcgagcccccctggaccgtggagggcgccggccagagccagacctgccccggcaccagggccagcggatctggctccggcagcggccccaagaaaaagagaaaagtctaagctgccttctgcggggcttgccttctggccatgcccttcttctctcccttgcacctgtacctcttggtctttgaataaagcctgagtaggaaggctagcaaaaaaaaaaaaaaaaaaaaaaaaaaaaaaaaaaaaaaaaaaaaaaaaaaaaaaaaaaaaaaaaaaaaaaaaaaaaaaaa

SEQ ID NO: 16021 - RNA, 9485 nt, synthetic construct
  source 1..9485: mol_type = other RNA
aggaaataagagagaaaagaagagtaagaagaaatataagagccaccatggcccctaagaagaagcgtaaagtgagccggatggaacgcctcgtctacgaggtgcggcagaagtgcagaaacatcgaggacatctgcatctcctgcggatctctgaacgtgaccctggagcacccactgttcatcggcggcatgtgccagaactgtaaaaactgttttctggagtgtgcctatcaatacgacgatgacggctaccagagctactgcaccatctgttgcggcggaagagaggtgctgatgtgtggaaataacaactgctgccggtgcttctgcgtggaatgcgtggacctgctggtgggccccggcgccgcccaggccgctattaaggaagatccttggaactgctacatgtgcggccacaagggcacatacggcctgctgagacggagagaggactggcctagcagactgcagatgttcttcgccaataaccacgaccaggagttcgacccccctaaggtgtaccctcccgtccccgccgagaagagaaagcccatccgggtcctgagcctgttcgatggcatcgccaccggtctgctggtgctgaaggacctgggcatccaggtggataggtacattgcctccgaggtgtgcgaggactccatcaccgtgggaatggtgcgtcatcagggcaagatcatgtacgtgggcgacgtgcggagcgtgacacagaagcatatccaggagtggggccctttcgacctggtgatcggcggcagcccttgcaatgacctgagcatcgtgaacccagcccggaagggcctgtacgagggaaccggcagactgttcttcgagttttacagactgctgcacgacgcccggcctaaggaaggcgacgaccggcccttcttttggctgttcgagaatgtggtggccatgggagtcagcgacaagcgggatattagccggttcctggagagcaaccccgtgatgatcgatgccaaggaagtgagcgccgcccaccgggccagatacttctggggcaatctgcctggcatgaacagacccctggccagcaccgtgaacgacaagctggagctgcaggagtgcctggagcacggccggatcgccaagttcagcaaggtgagaaccatcaccacccgaagcaacagcatcaaacaaggcaaggaccagcactttcctgtgttcatgaacgagaaggaggacatcctgtggtgtaccgagatggagagagtgttcgggttcccagtccactacacagatgtcagcaacatgtctagactggccagacagagactgctgggaagaagctggtccgtccctgtgatcagacacctgttcgcccctctgaaggagtacttcgcctgcgtgagcagcggcaacagcaacgccaacagccggggccccagcttctctagcggcctggtgccactgtccctgagagggagccacatgggccccatggagatctacaaaaccgtgagcgcctggaagcggcagcctgtgcgcgtgctgagcctgtttcggaatatcgataaagtcctgaaaagcctgggattcctggagagcggctctggctccggcggtggcaccctgaagtacgtggaggatgtgacaaacgtggtcagacgggatgtggagaagtggggccccttcgatctggtgtacggcagcacccaacccctgggcagctcttgtgaccggtgccctggctggtacatgtttcagttccaccggatcctgcagtacgccctgccgagacaggagtcccagcggccattcttttggattttcatggacaacttgctgctgaccgaggatgaccaggaaactaccactcggttcctgcagaccgaagccgtgaccctgcaggacgtgagaggccgggactaccagaacgccatgcgggtgtggtccaacatccctggactgaaaagcaagcacgcacctctgacccctaaagaagaggagtacctgcaggcccaggtgcggagcagaagcaagctggacgcccctaaggtggatctgctggtgaagaattgcctcctgcccctgagagagtacttcaagtatttcagccagaatagtctgcccctgggaggcagcggcggcggcgccctggtgacatttgaggacgtcgccgtgcggttcacccaggaggaatgggctctgctggatccttctcagaaaatcctgtaccgggacgtgatgagagagacataccggaatctgacctccgtgggcatcaactgggaatgttgggaccttgaagcctgcttcagaagcctgggaagaaacctgagagtgcaggtggtgaagagaaagtgcgagctgaccaacagcggcccctgcgccgagggcggcccaagcagcggcgcccctcctcccagcggcggcagcccagccggctccccaacctctaccgaggagggcacctctgagtccgccacccccgagagcggccctggcacctccaccgagcccagcgagggcagcgcacccggcagccctgccggcagccccacctccacagaggagggaaccagcaccgagcccagcgaaggcagcgccccaggcaccagcaccgagcctagtgagcaggagattaaacggatcaacaagatcagaagaagacttgtgaaagacagcaacaccaagaaggccggcaagacaggccccatgaaaaccctgctggttagagtgatgacacccgatctgagagagcggctggaaaacctgagaaagaagcctgaaaatatcccccagcccatcagcaatacatctagagccaacctgaataagctgctgaccgattacaccgaaatgaagaaggcgatcctgcatgtgtactgggaagagttccagaaggaccctgtgggcctgatgagccgggtggcccagcctgccagcaagaagatcgatcagaacaagctgaaacctgagatggacgagaagggcaacctgaccaccgccggctttgcctgctctcagtgtggccagcccctgttcgtgtacaagctggagcaggtgtctgagaagggcaaggcttacaccaactacttcggacggtgcaatgtggccgagcacgaaaagctgatcctgctggcccagctgaagcccgagaaggatagcgacgaagccgtgacatatagcctgggaaagtttgggcagagggccctggatttctacagcattcatgtgaccaaggagtccacccaccccgtgaagcccctggcccagatcgccggaaacagatacgcctccggacctgtgggaaaggccctgagcgacgcatgtatgggcacaatcgcctccttcctgtctaagtaccaggacatcatcatcgaacaccagaaggtggtgaagggcaaccagaagagactggagagcctgcgggagctggccggcaaggaaaacctggaataccctagcgtgaccctgccacctcagcctcacaccaaggagggcgttgatgcctacaacgaagtgatcgcccgggtgcgaatgtgggtgaacctgaacctgtggcagaagctgaagctaagcagagatgatgccaagcctctgctgagactgaagggattcccttcctttcctctggtcgagagacaggccaacgaagtggactggtgggacatggtgtgtaacgtgaagaagctgatcaacgagaaaaaggaggatggcaaggtgttttggcagaatctggctggctacaagagacaggaagccctgagaccatacctgagcagcgaggaagatcggaagaagggaaagaaattcgctcggtaccagctgggcgacctgctgctgcacctggaaaagaagcacggcgaggactggggaaaggtgtacgacgaggcctgggagcggattgacaagaaagtggaaggcctgagcaagcacatcaagctggaagaggaacggagaagcgaggacgcccagagcaaggccgccctgaccgactggctgcgggctaaggccagcttcgtgatcgagggcctgaaggaggccgacaaggacgagttctgcagatgcgagctgaagctgcagaagtggtacggggacctgcggggaaagcccttcgccatcgaagccgagaacagcatcctggacatcagcggcttcagcaagcagtacaactgtgccttcatctggcagaaggacggcgtgaagaagctgaacctgtacctgatcatcaactacttcaagggcggcaagctgcggttcaagaagatcaaacctgaagccttcgaagccaacagattctacaccgtgatcaacaaaaagagcggcgagatcgtgcccatggaggtgaacttcaacttcgacgaccccaacctgatcatcctgcctctggcctttggcaagagacagggcagagaattcatctggaacgacctgctgtccctggaaaccggcagcctgaagctggccaacggaagagtgatcgagaagacactgtacaacagaagaacccggcaggatgagcctgccctgttcgtggccctgaccttcgagcggcgggaggtcctggactcctccaatatcaaaccaatgaacctgatcggcgtggcaagaggcgaaaacatccccgccgtgatcgccctgaccgaccccgagggctgcccactgagccggtttaaggatagcctgggaaacccaacccacatcctgagaatcggcgagagctataaggagaagcagcggaccatccaggccaagaaggaggtggagcagcggagagccggcggctacagccggaagtacgccagcaaagccaagaatctggcagacgatatggtgagaaacaccgctagagatctgctgtactacgccgtgacccaggatgccatgctgatcttcgccaacctgagccggggcttcggccggcagggcaagcggaccttcatggccgagagacagtacacacggatggaggactggctgaccgccaagctggcctacgagggcctgagcaagacctacctgtccaagacactggcccagtacacctccaagacatgcagcaactgtgggtttaccatcaccagcgccgactacgacagggtgctggagaagctgaagaagacagcaacaggctggatgaccacaattaacggcaaggagctgaaggtggagggccagattacctactacaacagatacaagagacagaacgtagtcaaggacctgtccgtcgagctggatagactgagcgaagaatctgtgaacaacgacatctcctcctggacaaagggcagaagcggagaagctctgagcctcctgaagaaaagattctcccatagacccgtgcaggagaagttcgtgtgcctgaactgcggcttcgagacacacgcagccgagcaagccgccctgaacatcgccagatcctggctgttcctgcggagccaggagtacaagaaataccagacaaacaagacaaccggcaacaccgataagagagccttcgtcgagacctggcagtccttttaccggaagaagcttaaggaggtgtggaaacctgccgtgcggtctggcggatctggcggaggctccatgatgttccaggacagcgtggccttcgaggacgtggccgtgaccttcacccaggaggagtgggccctgctggaccccagccagaagaacctgtacagggacgtgatgcaggagaccttcaagaacctggccagcatcggcaagaagtggaaggcccagaacatctacgtggagtacaagaacctgaggaggaacctgaggatcgtgggcgagaggctgttcgagagcaaggagggccaccagggcggcccaagcagcggcgcccctcctcccagcggcggcagcccagccggctccccaacctctaccgaggagggcacctctgagtccgccacccccgagagcggccctggcacctccaccgagcccagcgagggcagcgcacccggcagccctgccggcagccccacctccacagaggagggaaccagcaccgagcccagcgaaggcagcgccccaggcaccagcaccgagcctagtgagcaggagattaaacggatcaacaagatcagaagaagacttgtgaaagacagcaacaccaagaaggccggcaagacaggccccatgaaaaccctgctggttagagtgatgacacccgatctgagagagcggctggaaaacctgagaaagaagcctgaaaatatcccccagcccatcagcaatacatctagagccaacctgaataagctgctgaccgattacaccgaaatgaagaaggcgatcctgcatgtgtactgggaagagttccagaaggaccctgtgggcctgatgagccgggtggcccagcctgccagcaagaagatcgatcagaacaagctgaaacctgagatggacgagaagggcaacctgaccaccgccggctttgcctgctctcagtgtggccagcccctgttcgtgtacaagctggagcaggtgtctgagaagggcaaggcttacaccaactacttcggacggtgcaatgtggccgagcacgaaaagctgatcctgctggcccagctgaagcccgagaaggatagcgacgaagccgtgacatatagcctgggaaagtttgggcagagggccctggatttctacagcattcatgtgaccaaggagtccacccaccccgtgaagcccctggcccagatcgccggaaacagatacgcctccggacctgtgggaaaggccctgagcgacgcatgtatgggcacaatcgcctccttcctgtctaagtaccaggacatcatcatcgaacaccagaaggtggtgaagggcaaccagaagagactggagagcctgcgggagctggccggcaaggaaaacctggaataccctagcgtgaccctgccacctcagcctcacaccaaggagggcgttgatgcctacaacgaagtgatcgcccgggtgcgaatgtgggtgaacctgaacctgtggcagaagctgaagctaagcagagatgatgccaagcctctgctgagactgaagggattcccttcctttcctctggtcgagagacaggccaacgaagtggactggtgggacatggtgtgtaacgtgaagaagctgatcaacgagaaaaaggaggatggcaaggtgttttggcagaatctggctggctacaagagacaggaagccctgagaccatacctgagcagcgaggaagatcggaagaagggaaagaaattcgctcggtaccagctgggcgacctgctgctgcacctggaaaagaagcacggcgaggactggggaaaggtgtacgacgaggcctgggagcggattgacaagaaagtggaaggcctgagcaagcacatcaagctggaagaggaacggagaagcgaggacgcccagagcaaggccgccctgaccgactggctgcgggctaaggccagcttcgtgatcgagggcctgaaggaggccgacaaggacgagttctgcagatgcgagctgaagctgcagaagtggtacggggacctgcggggaaagcccttcgccatcgaagccgagaacagcatcctggacatcagcggcttcagcaagcagtacaactgtgccttcatctggcagaaggacggcgtgaagaagctgaacctgtacctgatcatcaactacttcaagggcggcaagctgcggttcaagaagatcaaacctgaagccttcgaagccaacagattctacaccgtgatcaacaaaaagagcggcgagatcgtgcccatggaggtgaacttcaacttcgacgaccccaacctgatcatcctgcctctggcctttggcaagagacagggcagagaattcatctggaacgacctgctgtccctggaaaccggcagcctgaagctggccaacggaagagtgatcgagaagacactgtacaacagaagaacccggcaggatgagcctgccctgttcgtggccctgaccttcgagcggcgggaggtcctggactcctccaatatcaaaccaatgaacctgatcggcgtggcaagaggcgaaaacatccccgccgtgatcgccctgaccgaccccgagggctgcccactgagccggtttaaggatagcctgggaaacccaacccacatcctgagaatcggcgagagctataaggagaagcagcggaccatccaggccaagaaggaggtggagcagcggagagccggcggctacagccggaagtacgccagcaaagccaagaatctggcagacgatatggtgagaaacaccgctagagatctgctgtactacgccgtgacccaggatgccatgctgatcttcgccaacctgagccggggcttcggccggcagggcaagcggaccttcatggccgagagacagtacacacggatggaggactggctgaccgccaagctggcctacgagggcctgagcaagacctacctgtccaagacactggcccagtacacctccaagacatgcagcaactgtgggtttaccatcaccagcgccgactacgacagggtgctggagaagctgaagaagacagcaacaggctggatgaccacaattaacggcaaggagctgaaggtggagggccagattacctactacaacagatacaagagacagaacgtagtcaaggacctgtccgtcgagctggatagactgagcgaagaatctgtgaacaacgacatctcctcctggacaaagggcagaagcggagaagctctgagcctcctgaagaaaagattctcccatagacccgtgcaggagaagttcgtgtgcctgaactgcggcttcgagacacacgcagccgagcaagccgccctgaacatcgccagatcctggctgttcctgcggagccaggagtacaagaaataccagacaaacaagacaaccggcaacaccgataagagagccttcgtcgagacctggcagtccttttaccggaagaagcttaaggaggtgtggaaacctgccgtgcggtctggcggatctggcggaggctcctatgatgttccaggacagcgtggccttcgaggacgtggccgtgaccttcacccaggaggagtgggccctgctggaccccagccagaagaacctgtacagggacgtgatgcaggagaccttcaagaacctggccagcatcggcaagaagtggaaggcccagaacatctacgtggagtacaagaacctgaggaggaacctgaggatcgtgggcgagaggctgttcgagagcaaggagggccaccagggatctggctccggcagcggccccaagaaaaagagaaaagtctaagctgccttctgcggggcttgccttctggccatgcccttcttctctcccttgcacctgtacctcttggtctttgaataaagcctgagtaggaaggctagcaaaaaaaaaaaaaaaaaaaaaaaaaaaaaaaaaaaaaaaaaaaaaaaaaaaaaaaaaaaaaaaaaaaaaaaaaaaaaaaa

SEQ ID NO: 16022 - RNA, 9485 nt, synthetic construct
  source 1..9485: mol_type = other RNA
aggaaataagagagaaaagaagagtaagaagaaatataagagccaccatggcccctaagaagaagcgtaaagtgagccggatggaacgcctcgtctacgaggtgcggcagaagtgcagaaacatcgaggacatctgcatctcctgcggatctctgaacgtgaccctggagcacccactgttcatcggcggcatgtgccagaactgtaaaaactgttttctggagtgtgcctatcaatacgacgatgacggctaccagagctactgcaccatctgttgcggcggaagagaggtgctgatgtgtggaaataacaactgctgccggtgcttctgcgtggaatgcgtggacctgctggtgggccccggcgccgcccaggccgctattaaggaagatccttggaactgctacatgtgcggccacaagggcacatacggcctgctgagacggagagaggactggcctagcagactgcagatgttcttcgccaataaccacgaccaggagttcgacccccctaaggtgtaccctcccgtccccgccgagaagagaaagcccatccgggtcctgagcctgttcgatggcatcgccaccggtctgctggtgctgaaggacctgggcatccaggtggataggtacattgcctccgaggtgtgcgaggactccatcaccgtgggaatggtgcgtcatcagggcaagatcatgtacgtgggcgacgtgcggagcgtgacacagaagcatatccaggagtggggccctttcgacctggtgatcggcggcagcccttgcaatgacctgagcatcgtgaacccagcccggaagggcctgtacgagggaaccggcagactgttcttcgagttttacagactgctgcacgacgcccggcctaaggaaggcgacgaccggcccttcttttggctgttcgagaatgtggtggccatgggagtcagcgacaagcgggatattagccggttcctggagagcaaccccgtgatgatcgatgccaaggaagtgagcgccgcccaccgggccagatacttctggggcaatctgcctggcatgaacagacccctggccagcaccgtgaacgacaagctggagctgcaggagtgcctggagcacggccggatcgccaagttcagcaaggtgagaaccatcaccacccgaagcaacagcatcaaacaaggcaaggaccagcactttcctgtgttcatgaacgagaaggaggacatcctgtggtgtaccgagatggagagagtgttcgggttcccagtccactacacagatgtcagcaacatgtctagactggccagacagagactgctgggaagaagctggtccgtccctgtgatcagacacctgttcgcccctctgaaggagtacttcgcctgcgtgagcagcggcaacagcaacgccaacagccggggccccagcttctctagcggcctggtgccactgtccctgagagggagccacatgggccccatggagatctacaaaaccgtgagcgcctggaagcggcagcctgtgcgcgtgctgagcctgtttcggaatatcgataaagtcctgaaaagcctgggattcctggagagcggctctggctccggcggtggcaccctgaagtacgtggaggatgtgacaaacgtggtcagacgggatgtggagaagtggggccccttcgatctggtgtacggcagcacccaacccctgggcagctcttgtgaccggtgccctggctggtacatgtttcagttccaccggatcctgcagtacgccctgccgagacaggagtcccagcggccattcttttggattttcatggacaacttgctgctgaccgaggatgaccaggaaactaccactcggttcctgcagaccgaagccgtgaccctgcaggacgtgagaggccgggactaccagaacgccatgcgggtgtggtccaacatccctggactgaaaagcaagcacgcacctctgacccctaaagaagaggagtacctgcaggcccaggtgcggagcagaagcaagctggacgcccctaaggtggatctgctggtgaagaattgcctcctgcccctgagagagtacttcaagtatttcagccagaatagtctgcccctgggaggcagcggcggcggcgccctggtgacatttgaggacgtcgccgtgcggttcacccaggaggaatgggctctgctggatccttctcagaaaatcctgtaccgggacgtgatgagagagacataccggaatctgacctccgtgggcatcaactgggaatgttgggaccttgaagcctgcttcagaagcctgggaagaaacctgagagtgcaggtggtgaagagaaagtgcgagctgaccaacagcggcccctgcgccgagggcggcccaagcagcggcgcccctcctcccagcggcggcagcccagccggctccccaacctctaccgaggagggcacctctgagtccgccacccccgagagcggccctggcacctccaccgagcccagcgagggcagcgcacccggcagccctgccggcagccccacctccacagaggagggaaccagcaccgagcccagcgaaggcagcgccccaggcaccagcaccgagcctagtgagcaggagattaaacggatcaacaagatcagaagaagacttgtgaaagacagcaacaccaagaaggccggcaagacaggccccatgaaaaccctgctggttagagtgatgacacccgatctgagagagcggctggaaaacctgagaaagaagcctgaaaatatcccccagcccatcagcaatacatctagagccaacctgaataagctgctgaccgattacaccgaaatgaagaaggcgatcctgcatgtgtactgggaagagttccagaaggaccctgtgggcctgatgagccgggtggcccagcctgccagcaagaagatcgatcagaacaagctgaaacctgagatggacgagaagggcaacctgaccaccgccggctttgcctgctctcagtgtggccagcccctgttcgtgtacaagctggagcaggtgtctgagaagggcaaggcttacaccaactacttcggacggtgcaatgtggccgagcacgaaaagctgatcctgctggcccagctgaagcccgagaaggatagcgacgaagccgtgacatatagcctgggaaagtttgggcagagggccctggatttctacagcattcatgtgaccaaggagtccacccaccccgtgaagcccctggcccagatcgccggaaacagatacgcctccggacctgtgggaaaggccctgagcgacgcatgtatgggcacaatcgcctccttcctgtctaagtaccaggacatcatcatcgaacaccagaaggtggtgaagggcaaccagaagagactggagagcctgcgggagctggccggcaaggaaaacctggaataccctagcgtgaccctgccacctcagcctcacaccaaggagggcgttgatgcctacaacgaagtgatcgcccgggtgcgaatgtgggtgaacctgaacctgtggcagaagctgaagctaagcagagatgatgccaagcctctgctgagactgaagggattcccttcctttcctctggtcgagagacaggccaacgaagtggactggtgggacatggtgtgtaacgtgaagaagctgatcaacgagaaaaaggaggatggcaaggtgttttggcagaatctggctggctacaagagacaggaagccctgagaccatacctgagcagcgaggaagatcggaagaagggaaagaaattcgctcggtaccagctgggcgacctgctgctgcacctggaaaagaagcacggcgaggactggggaaaggtgtacgacgaggcctgggagcggattgacaagaaagtggaaggcctgagcaagcacatcaagctggaagaggaacggagaagcgaggacgcccagagcaaggccgccctgaccgactggctgcgggctaaggccagcttcgtgatcgagggcctgaaggaggccgacaaggacgagttctgcagatgcgagctgaagctgcagaagtggtacggggacctgcggggaaagcccttcgccatcgaagccgagaacagcatcctggacatcagcggcttcagcaagcagtacaactgtgccttcatctggcagaaggacggcgtgaagaagctgaacctgtacctgatcatcaactacttcaagggcggcaagctgcggttcaagaagatcaaacctgaagccttcgaagccaacagattctacaccgtgatcaacaaaaagagcggcgagatcgtgcccatggaggtgaacttcaacttcgacgaccccaacctgatcatcctgcctctggcctttggcaagagacagggcagagaattcatctggaacgacctgctgtccctggaaaccggcagcctgaagctggccaacggaagagtgatcgagaagacactgtacaacagaagaacccggcaggatgagcctgccctgttcgtggccctgaccttcgagcggcgggaggtcctggactcctccaatatcaaaccaatgaacctgatcggcgtggcaagaggcgaaaacatccccgccgtgatcgccctgaccgaccccgagggctgcccactgagccggtttaaggatagcctgggaaacccaacccacatcctgagaatcggcgagagctataaggagaagcagcggaccatccaggccaagaaggaggtggagcagcggagagccggcggctacagccggaagtacgccagcaaagccaagaatctggcagacgatatggtgagaaacaccgctagagatctgctgtactacgccgtgacccaggatgccatgctgatcttcgccaacctgagccggggcttcggccggcagggcaagcggaccttcatggccgagagacagtacacacggatggaggactggctgaccgccaagctggcctacgagggcctgagcaagacctacctgtccaagacactggcccagtacacctccaagacatgcagcaactgtgggtttaccatcaccagcgccgactacgacagggtgctggagaagctgaagaagacagcaacaggctggatgaccacaattaacggcaaggagctgaaggtggagggccagattacctactacaacagatacaagagacagaacgtagtcaaggacctgtccgtcgagctggatagactgagcgaagaatctgtgaacaacgacatctcctcctggacaaagggcagaagcggagaagctctgagcctcctgaagaaaagattctcccatagacccgtgcaggagaagttcgtgtgcctgaactgcggcttcgagacacacgcagccgagcaagccgccctgaacatcgccagatcctggctgttcctgcggagccaggagtacaagaaataccagacaaacaagacaaccggcaacaccgataagagagccttcgtcgagacctggcagtccttttaccggaagaagcttaaggaggtgtggaaacctgccgtgcggtctggcggatctggcggaggctccggcctggtgatgttcaaggacgtggccatcgacgtgagccaggaggagtgggagtgcctgaaccccgcccagaggaacctgtacaaggacgtgatgctggagaactacagcaacctggtgagcctgggcctgagcgtgagcaagcccgccatgatcaccagcctggagcagggcaaggagccctggatggtgctgagggaggtgaccggcgagaggtgccccgacctggtgagcaagtgcgagggcggcccaagcagcggcgcccctcctcccagcggcggcagcccagccggctccccaacctctaccgaggagggcacctctgagtccgccacccccgagagcggccctggcacctccaccgagcccagcgagggcagcgcacccggcagccctgccggcagccccacctccacagaggagggaaccagcaccgagcccagcgaaggcagcgccccaggcaccagcaccgagcctagtgagcaggagattaaacggatcaacaagatcagaagaagacttgtgaaagacagcaacaccaagaaggccggcaagacaggccccatgaaaaccctgctggttagagtgatgacacccgatctgagagagcggctggaaaacctgagaaagaagcctgaaaatatcccccagcccatcagcaatacatctagagccaacctgaataagctgctgaccgattacaccgaaatgaagaaggcgatcctgcatgtgtactgggaagagttccagaaggaccctgtgggcctgatgagccgggtggcccagcctgccagcaagaagatcgatcagaacaagctgaaacctgagatggacgagaagggcaacctgaccaccgccggctttgcctgctctcagtgtggccagcccctgttcgtgtacaagctggagcaggtgtctgagaagggcaaggcttacaccaactacttcggacggtgcaatgtggccgagcacgaaaagctgatcctgctggcccagctgaagcccgagaaggatagcgacgaagccgtgacatatagcctgggaaagtttgggcagagggccctggatttctacagcattcatgtgaccaaggagtccacccaccccgtgaagcccctggcccagatcgccggaaacagatacgcctccggacctgtgggaaaggccctgagcgacgcatgtatgggcacaatcgcctccttcctgtctaagtaccaggacatcatcatcgaacaccagaaggtggtgaagggcaaccagaagagactggagagcctgcgggagctggccggcaaggaaaacctggaataccctagcgtgaccctgccacctcagcctcacaccaaggagggcgttgatgcctacaacgaagtgatcgcccgggtgcgaatgtgggtgaacctgaacctgtggcagaagctgaagctaagcagagatgatgccaagcctctgctgagactgaagggattcccttcctttcctctggtcgagagacaggccaacgaagtggactggtgggacatggtgtgtaacgtgaagaagctgatcaacgagaaaaaggaggatggcaaggtgttttggcagaatctggctggctacaagagacaggaagccctgagaccatacctgagcagcgaggaagatcggaagaagggaaagaaattcgctcggtaccagctgggcgacctgctgctgcacctggaaaagaagcacggcgaggactggggaaaggtgtacgacgaggcctgggagcggattgacaagaaagtggaaggcctgagcaagcacatcaagctggaagaggaacggagaagcgaggacgcccagagcaaggccgccctgaccgactggctgcgggctaaggccagcttcgtgatcgagggcctgaaggaggccgacaaggacgagttctgcagatgcgagctgaagctgcagaagtggtacggggacctgcggggaaagcccttcgccatcgaagccgagaacagcatcctggacatcagcggcttcagcaagcagtacaactgtgccttcatctggcagaaggacggcgtgaagaagctgaacctgtacctgatcatcaactacttcaagggcggcaagctgcggttcaagaagatcaaacctgaagccttcgaagccaacagattctacaccgtgatcaacaaaaagagcggcgagatcgtgcccatggaggtgaacttcaacttcgacgaccccaacctgatcatcctgcctctggcctttggcaagagacagggcagagaattcatctggaacgacctgctgtccctggaaaccggcagcctgaagctggccaacggaagagtgatcgagaagacactgtacaacagaagaacccggcaggatgagcctgccctgttcgtggccctgaccttcgagcggcgggaggtcctggactcctccaatatcaaaccaatgaacctgatcggcgtggcaagaggcgaaaacatccccgccgtgatcgccctgaccgaccccgagggctgcccactgagccggtttaaggatagcctgggaaacccaacccacatcctgagaatcggcgagagctataaggagaagcagcggaccatccaggccaagaaggaggtggagcagcggagagccggcggctacagccggaagtacgccagcaaagccaagaatctggcagacgatatggtgagaaacaccgctagagatctgctgtactacgccgtgacccaggatgccatgctgatcttcgccaacctgagccggggcttcggccggcagggcaagcggaccttcatggccgagagacagtacacacggatggaggactggctgaccgccaagctggcctacgagggcctgagcaagacctacctgtccaagacactggcccagtacacctccaagacatgcagcaactgtgggtttaccatcaccagcgccgactacgacagggtgctggagaagctgaagaagacagcaacaggctggatgaccacaattaacggcaaggagctgaaggtggagggccagattacctactacaacagatacaagagacagaacgtagtcaaggacctgtccgtcgagctggatagactgagcgaagaatctgtgaacaacgacatctcctcctggacaaagggcagaagcggagaagctctgagcctcctgaagaaaagattctcccatagacccgtgcaggagaagttcgtgtgcctgaactgcggcttcgagacacacgcagccgagcaagccgccctgaacatcgccagatcctggctgttcctgcggagccaggagtacaagaaataccagacaaacaagacaaccggcaacaccgataagagagccttcgtcgagacctggcagtccttttaccggaagaagcttaaggaggtgtggaaacctgccgtgcggtctggcggatctggcggaggctcctggcctggtgatgttcaaggacgtggccatcgacgtgagccaggaggagtgggagtgcctgaaccccgcccagaggaacctgtacaaggacgtgatgctggagaactacagcaacctggtgagcctgggcctgagcgtgagcaagcccgccatgatcaccagcctggagcagggcaaggagccctggatggtgctgagggaggtgaccggcgagaggtgccccgacctggtgagcaagtgcgagggatctggctccggcagcggccccaagaaaaagagaaaagtctaagctgccttctgcggggcttgccttctggccatgcccttcttctctcccttgcacctgtacctcttggtctttgaataaagcctgagtaggaaggctagcaaaaaaaaaaaaaaaaaaaaaaaaaaaaaaaaaaaaaaaaaaaaaaaaaaaaaaaaaaaaaaaaaaaaaaaaaaaaaaaa

SEQ ID NO: 16023 - RNA, 9485 nt, synthetic construct
  source 1..9485: mol_type = other RNA
aggaaataagagagaaaagaagagtaagaagaaatataagagccaccatggcccctaagaagaagcgtaaagtgagccggatggaacgcctcgtctacgaggtgcggcagaagtgcagaaacatcgaggacatctgcatctcctgcggatctctgaacgtgaccctggagcacccactgttcatcggcggcatgtgccagaactgtaaaaactgttttctggagtgtgcctatcaatacgacgatgacggctaccagagctactgcaccatctgttgcggcggaagagaggtgctgatgtgtggaaataacaactgctgccggtgcttctgcgtggaatgcgtggacctgctggtgggccccggcgccgcccaggccgctattaaggaagatccttggaactgctacatgtgcggccacaagggcacatacggcctgctgagacggagagaggactggcctagcagactgcagatgttcttcgccaataaccacgaccaggagttcgacccccctaaggtgtaccctcccgtccccgccgagaagagaaagcccatccgggtcctgagcctgttcgatggcatcgccaccggtctgctggtgctgaaggacctgggcatccaggtggataggtacattgcctccgaggtgtgcgaggactccatcaccgtgggaatggtgcgtcatcagggcaagatcatgtacgtgggcgacgtgcggagcgtgacacagaagcatatccaggagtggggccctttcgacctggtgatcggcggcagcccttgcaatgacctgagcatcgtgaacccagcccggaagggcctgtacgagggaaccggcagactgttcttcgagttttacagactgctgcacgacgcccggcctaaggaaggcgacgaccggcccttcttttggctgttcgagaatgtggtggccatgggagtcagcgacaagcgggatattagccggttcctggagagcaaccccgtgatgatcgatgccaaggaagtgagcgccgcccaccgggccagatacttctggggcaatctgcctggcatgaacagacccctggccagcaccgtgaacgacaagctggagctgcaggagtgcctggagcacggccggatcgccaagttcagcaaggtgagaaccatcaccacccgaagcaacagcatcaaacaaggcaaggaccagcactttcctgtgttcatgaacgagaaggaggacatcctgtggtgtaccgagatggagagagtgttcgggttcccagtccactacacagatgtcagcaacatgtctagactggccagacagagactgctgggaagaagctggtccgtccctgtgatcagacacctgttcgcccctctgaaggagtacttcgcctgcgtgagcagcggcaacagcaacgccaacagccggggccccagcttctctagcggcctggtgccactgtccctgagagggagccacatgggccccatggagatctacaaaaccgtgagcgcctggaagcggcagcctgtgcgcgtgctgagcctgtttcggaatatcgataaagtcctgaaaagcctgggattcctggagagcggctctggctccggcggtggcaccctgaagtacgtggaggatgtgacaaacgtggtcagacgggatgtggagaagtggggccccttcgatctggtgtacggcagcacccaacccctgggcagctcttgtgaccggtgccctggctggtacatgtttcagttccaccggatcctgcagtacgccctgccgagacaggagtcccagcggccattcttttggattttcatggacaacttgctgctgaccgaggatgaccaggaaactaccactcggttcctgcagaccgaagccgtgaccctgcaggacgtgagaggccgggactaccagaacgccatgcgggtgtggtccaacatccctggactgaaaagcaagcacgcacctctgacccctaaagaagaggagtacctgcaggcccaggtgcggagcagaagcaagctggacgcccctaaggtggatctgctggtgaagaattgcctcctgcccctgagagagtacttcaagtatttcagccagaatagtctgcccctgggaggcagcggcggcggcgccctggtgacatttgaggacgtcgccgtgcggttcacccaggaggaatgggctctgctggatccttctcagaaaatcctgtaccgggacgtgatgagagagacataccggaatctgacctccgtgggcatcaactgggaatgttgggaccttgaagcctgcttcagaagcctgggaagaaacctgagagtgcaggtggtgaagagaaagtgcgagctgaccaacagcggcccctgcgccgagggcggcccaagcagcggcgcccctcctcccagcggcggcagcccagccggctccccaacctctaccgaggagggcacctctgagtccgccacccccgagagcggccctggcacctccaccgagcccagcgagggcagcgcacccggcagccctgccggcagccccacctccacagaggagggaaccagcaccgagcccagcgaaggcagcgccccaggcaccagcaccgagcctagtgagcaggagattaaacggatcaacaagatcagaagaagacttgtgaaagacagcaacaccaagaaggccggcaagacaggccccatgaaaaccctgctggttagagtgatgacacccgatctgagagagcggctggaaaacctgagaaagaagcctgaaaatatcccccagcccatcagcaatacatctagagccaacctgaataagctgctgaccgattacaccgaaatgaagaaggcgatcctgcatgtgtactgggaagagttccagaaggaccctgtgggcctgatgagccgggtggcccagcctgccagcaagaagatcgatcagaacaagctgaaacctgagatggacgagaagggcaacctgaccaccgccggctttgcctgctctcagtgtggccagcccctgttcgtgtacaagctggagcaggtgtctgagaagggcaaggcttacaccaactacttcggacggtgcaatgtggccgagcacgaaaagctgatcctgctggcccagctgaagcccgagaaggatagcgacgaagccgtgacatatagcctgggaaagtttgggcagagggccctggatttctacagcattcatgtgaccaaggagtccacccaccccgtgaagcccctggcccagatcgccggaaacagatacgcctccggacctgtgggaaaggccctgagcgacgcatgtatgggcacaatcgcctccttcctgtctaagtaccaggacatcatcatcgaacaccagaaggtggtgaagggcaaccagaagagactggagagcctgcgggagctggccggcaaggaaaacctggaataccctagcgtgaccctgccacctcagcctcacaccaaggagggcgttgatgcctacaacgaagtgatcgcccgggtgcgaatgtgggtgaacctgaacctgtggcagaagctgaagctaagcagagatgatgccaagcctctgctgagactgaagggattcccttcctttcctctggtcgagagacaggccaacgaagtggactggtgggacatggtgtgtaacgtgaagaagctgatcaacgagaaaaaggaggatggcaaggtgttttggcagaatctggctggctacaagagacaggaagccctgagaccatacctgagcagcgaggaagatcggaagaagggaaagaaattcgctcggtaccagctgggcgacctgctgctgcacctggaaaagaagcacggcgaggactggggaaaggtgtacgacgaggcctgggagcggattgacaagaaagtggaaggcctgagcaagcacatcaagctggaagaggaacggagaagcgaggacgcccagagcaaggccgccctgaccgactggctgcgggctaaggccagcttcgtgatcgagggcctgaaggaggccgacaaggacgagttctgcagatgcgagctgaagctgcagaagtggtacggggacctgcggggaaagcccttcgccatcgaagccgagaacagcatcctggacatcagcggcttcagcaagcagtacaactgtgccttcatctggcagaaggacggcgtgaagaagctgaacctgtacctgatcatcaactacttcaagggcggcaagctgcggttcaagaagatcaaacctgaagccttcgaagccaacagattctacaccgtgatcaacaaaaagagcggcgagatcgtgcccatggaggtgaacttcaacttcgacgaccccaacctgatcatcctgcctctggcctttggcaagagacagggcagagaattcatctggaacgacctgctgtccctggaaaccggcagcctgaagctggccaacggaagagtgatcgagaagacactgtacaacagaagaacccggcaggatgagcctgccctgttcgtggccctgaccttcgagcggcgggaggtcctggactcctccaatatcaaaccaatgaacctgatcggcgtggcaagaggcgaaaacatccccgccgtgatcgccctgaccgaccccgagggctgcccactgagccggtttaaggatagcctgggaaacccaacccacatcctgagaatcggcgagagctataaggagaagcagcggaccatccaggccaagaaggaggtggagcagcggagagccggcggctacagccggaagtacgccagcaaagccaagaatctggcagacgatatggtgagaaacaccgctagagatctgctgtactacgccgtgacccaggatgccatgctgatcttcgccaacctgagccggggcttcggccggcagggcaagcggaccttcatggccgagagacagtacacacggatggaggactggctgaccgccaagctggcctacgagggcctgagcaagacctacctgtccaagacactggcccagtacacctccaagacatgcagcaactgtgggtttaccatcaccagcgccgactacgacagggtgctggagaagctgaagaagacagcaacaggctggatgaccacaattaacggcaaggagctgaaggtggagggccagattacctactacaacagatacaagagacagaacgtagtcaaggacctgtccgtcgagctggatagactgagcgaagaatctgtgaacaacgacatctcctcctggacaaagggcagaagcggagaagctctgagcctcctgaagaaaagattctcccatagacccgtgcaggagaagttcgtgtgcctgaactgcggcttcgagacacacgcagccgagcaagccgccctgaacatcgccagatcctggctgttcctgcggagccaggagtacaagaaataccagacaaacaagacaaccggcaacaccgataagagagccttcgtcgagacctggcagtccttttaccggaagaagcttaaggaggtgtggaaacctgccgtgcggtctggcggatctggcggaggctccgcccaggagaccgtgaccttcaaggacgtggccgtggacttcacccaggaggagtggggccagctggaccccgtgcagaggaccctgtacagggacgtgatgctggagacctacggccacctgctgagcgtgggcaaccagatcgccaagcccgaggtgatcagcctgctggagcagggcgaggagccctggagcatggagagggtgtaccccccccagaggacctgccccgagtggatgaggggcggcccaagcagcggcgcccctcctcccagcggcggcagcccagccggctccccaacctctaccgaggagggcacctctgagtccgccacccccgagagcggccctggcacctccaccgagcccagcgagggcagcgcacccggcagccctgccggcagccccacctccacagaggagggaaccagcaccgagcccagcgaaggcagcgccccaggcaccagcaccgagcctagtgagcaggagattaaacggatcaacaagatcagaagaagacttgtgaaagacagcaacaccaagaaggccggcaagacaggccccatgaaaaccctgctggttagagtgatgacacccgatctgagagagcggctggaaaacctgagaaagaagcctgaaaatatcccccagcccatcagcaatacatctagagccaacctgaataagctgctgaccgattacaccgaaatgaagaaggcgatcctgcatgtgtactgggaagagttccagaaggaccctgtgggcctgatgagccgggtggcccagcctgccagcaagaagatcgatcagaacaagctgaaacctgagatggacgagaagggcaacctgaccaccgccggctttgcctgctctcagtgtggccagcccctgttcgtgtacaagctggagcaggtgtctgagaagggcaaggcttacaccaactacttcggacggtgcaatgtggccgagcacgaaaagctgatcctgctggcccagctgaagcccgagaaggatagcgacgaagccgtgacatatagcctgggaaagtttgggcagagggccctggatttctacagcattcatgtgaccaaggagtccacccaccccgtgaagcccctggcccagatcgccggaaacagatacgcctccggacctgtgggaaaggccctgagcgacgcatgtatgggcacaatcgcctccttcctgtctaagtaccaggacatcatcatcgaacaccagaaggtggtgaagggcaaccagaagagactggagagcctgcgggagctggccggcaaggaaaacctggaataccctagcgtgaccctgccacctcagcctcacaccaaggagggcgttgatgcctacaacgaagtgatcgcccgggtgcgaatgtgggtgaacctgaacctgtggcagaagctgaagctaagcagagatgatgccaagcctctgctgagactgaagggattcccttcctttcctctggtcgagagacaggccaacgaagtggactggtgggacatggtgtgtaacgtgaagaagctgatcaacgagaaaaaggaggatggcaaggtgttttggcagaatctggctggctacaagagacaggaagccctgagaccatacctgagcagcgaggaagatcggaagaagggaaagaaattcgctcggtaccagctgggcgacctgctgctgcacctggaaaagaagcacggcgaggactggggaaaggtgtacgacgaggcctgggagcggattgacaagaaagtggaaggcctgagcaagcacatcaagctggaagaggaacggagaagcgaggacgcccagagcaaggccgccctgaccgactggctgcgggctaaggccagcttcgtgatcgagggcctgaaggaggccgacaaggacgagttctgcagatgcgagctgaagctgcagaagtggtacggggacctgcggggaaagcccttcgccatcgaagccgagaacagcatcctggacatcagcggcttcagcaagcagtacaactgtgccttcatctggcagaaggacggcgtgaagaagctgaacctgtacctgatcatcaactacttcaagggcggcaagctgcggttcaagaagatcaaacctgaagccttcgaagccaacagattctacaccgtgatcaacaaaaagagcggcgagatcgtgcccatggaggtgaacttcaacttcgacgaccccaacctgatcatcctgcctctggcctttggcaagagacagggcagagaattcatctggaacgacctgctgtccctggaaaccggcagcctgaagctggccaacggaagagtgatcgagaagacactgtacaacagaagaacccggcaggatgagcctgccctgttcgtggccctgaccttcgagcggcgggaggtcctggactcctccaatatcaaaccaatgaacctgatcggcgtggcaagaggcgaaaacatccccgccgtgatcgccctgaccgaccccgagggctgcccactgagccggtttaaggatagcctgggaaacccaacccacatcctgagaatcggcgagagctataaggagaagcagcggaccatccaggccaagaaggaggtggagcagcggagagccggcggctacagccggaagtacgccagcaaagccaagaatctggcagacgatatggtgagaaacaccgctagagatctgctgtactacgccgtgacccaggatgccatgctgatcttcgccaacctgagccggggcttcggccggcagggcaagcggaccttcatggccgagagacagtacacacggatggaggactggctgaccgccaagctggcctacgagggcctgagcaagacctacctgtccaagacactggcccagtacacctccaagacatgcagcaactgtgggtttaccatcaccagcgccgactacgacagggtgctggagaagctgaagaagacagcaacaggctggatgaccacaattaacggcaaggagctgaaggtggagggccagattacctactacaacagatacaagagacagaacgtagtcaaggacctgtccgtcgagctggatagactgagcgaagaatctgtgaacaacgacatctcctcctggacaaagggcagaagcggagaagctctgagcctcctgaagaaaagattctcccatagacccgtgcaggagaagttcgtgtgcctgaactgcggcttcgagacacacgcagccgagcaagccgccctgaacatcgccagatcctggctgttcctgcggagccaggagtacaagaaataccagacaaacaagacaaccggcaacaccgataagagagccttcgtcgagacctggcagtccttttaccggaagaagcttaaggaggtgtggaaacctgccgtgcggtctggcggatctggcggaggctcctgcccaggagaccgtgaccttcaaggacgtggccgtggacttcacccaggaggagtggggccagctggaccccgtgcagaggaccctgtacagggacgtgatgctggagacctacggccacctgctgagcgtgggcaaccagatcgccaagcccgaggtgatcagcctgctggagcagggcgaggagccctggagcatggagagggtgtaccccccccagaggacctgccccgagtggatgaggggatctggctccggcagcggccccaagaaaaagagaaaagtctaagctgccttctgcggggcttgccttctggccatgcccttcttctctcccttgcacctgtacctcttggtctttgaataaagcctgagtaggaaggctagcaaaaaaaaaaaaaaaaaaaaaaaaaaaaaaaaaaaaaaaaaaaaaaaaaaaaaaaaaaaaaaaaaaaaaaaaaaaaaaaa

SEQ ID NO: 16024 - RNA, 9485 nt, synthetic construct
  source 1..9485: mol_type = other RNA
aggaaataagagagaaaagaagagtaagaagaaatataagagccaccatggcccctaagaagaagcgtaaagtgagccggatggaacgcctcgtctacgaggtgcggcagaagtgcagaaacatcgaggacatctgcatctcctgcggatctctgaacgtgaccctggagcacccactgttcatcggcggcatgtgccagaactgtaaaaactgttttctggagtgtgcctatcaatacgacgatgacggctaccagagctactgcaccatctgttgcggcggaagagaggtgctgatgtgtggaaataacaactgctgccggtgcttctgcgtggaatgcgtggacctgctggtgggccccggcgccgcccaggccgctattaaggaagatccttggaactgctacatgtgcggccacaagggcacatacggcctgctgagacggagagaggactggcctagcagactgcagatgttcttcgccaataaccacgaccaggagttcgacccccctaaggtgtaccctcccgtccccgccgagaagagaaagcccatccgggtcctgagcctgttcgatggcatcgccaccggtctgctggtgctgaaggacctgggcatccaggtggataggtacattgcctccgaggtgtgcgaggactccatcaccgtgggaatggtgcgtcatcagggcaagatcatgtacgtgggcgacgtgcggagcgtgacacagaagcatatccaggagtggggccctttcgacctggtgatcggcggcagcccttgcaatgacctgagcatcgtgaacccagcccggaagggcctgtacgagggaaccggcagactgttcttcgagttttacagactgctgcacgacgcccggcctaaggaaggcgacgaccggcccttcttttggctgttcgagaatgtggtggccatgggagtcagcgacaagcgggatattagccggttcctggagagcaaccccgtgatgatcgatgccaaggaagtgagcgccgcccaccgggccagatacttctggggcaatctgcctggcatgaacagacccctggccagcaccgtgaacgacaagctggagctgcaggagtgcctggagcacggccggatcgccaagttcagcaaggtgagaaccatcaccacccgaagcaacagcatcaaacaaggcaaggaccagcactttcctgtgttcatgaacgagaaggaggacatcctgtggtgtaccgagatggagagagtgttcgggttcccagtccactacacagatgtcagcaacatgtctagactggccagacagagactgctgggaagaagctggtccgtccctgtgatcagacacctgttcgcccctctgaaggagtacttcgcctgcgtgagcagcggcaacagcaacgccaacagccggggccccagcttctctagcggcctggtgccactgtccctgagagggagccacatgggccccatggagatctacaaaaccgtgagcgcctggaagcggcagcctgtgcgcgtgctgagcctgtttcggaatatcgataaagtcctgaaaagcctgggattcctggagagcggctctggctccggcggtggcaccctgaagtacgtggaggatgtgacaaacgtggtcagacgggatgtggagaagtggggccccttcgatctggtgtacggcagcacccaacccctgggcagctcttgtgaccggtgccctggctggtacatgtttcagttccaccggatcctgcagtacgccctgccgagacaggagtcccagcggccattcttttggattttcatggacaacttgctgctgaccgaggatgaccaggaaactaccactcggttcctgcagaccgaagccgtgaccctgcaggacgtgagaggccgggactaccagaacgccatgcgggtgtggtccaacatccctggactgaaaagcaagcacgcacctctgacccctaaagaagaggagtacctgcaggcccaggtgcggagcagaagcaagctggacgcccctaaggtggatctgctggtgaagaattgcctcctgcccctgagagagtacttcaagtatttcagccagaatagtctgcccctgggaggcagcggcggcggcgccctggtgacatttgaggacgtcgccgtgcggttcacccaggaggaatgggctctgctggatccttctcagaaaatcctgtaccgggacgtgatgagagagacataccggaatctgacctccgtgggcatcaactgggaatgttgggaccttgaagcctgcttcagaagcctgggaagaaacctgagagtgcaggtggtgaagagaaagtgcgagctgaccaacagcggcccctgcgccgagggcggcccaagcagcggcgcccctcctcccagcggcggcagcccagccggctccccaacctctaccgaggagggcacctctgagtccgccacccccgagagcggccctggcacctccaccgagcccagcgagggcagcgcacccggcagccctgccggcagccccacctccacagaggagggaaccagcaccgagcccagcgaaggcagcgccccaggcaccagcaccgagcctagtgagcaggagattaaacggatcaacaagatcagaagaagacttgtgaaagacagcaacaccaagaaggccggcaagacaggccccatgaaaaccctgctggttagagtgatgacacccgatctgagagagcggctggaaaacctgagaaagaagcctgaaaatatcccccagcccatcagcaatacatctagagccaacctgaataagctgctgaccgattacaccgaaatgaagaaggcgatcctgcatgtgtactgggaagagttccagaaggaccctgtgggcctgatgagccgggtggcccagcctgccagcaagaagatcgatcagaacaagctgaaacctgagatggacgagaagggcaacctgaccaccgccggctttgcctgctctcagtgtggccagcccctgttcgtgtacaagctggagcaggtgtctgagaagggcaaggcttacaccaactacttcggacggtgcaatgtggccgagcacgaaaagctgatcctgctggcccagctgaagcccgagaaggatagcgacgaagccgtgacatatagcctgggaaagtttgggcagagggccctggatttctacagcattcatgtgaccaaggagtccacccaccccgtgaagcccctggcccagatcgccggaaacagatacgcctccggacctgtgggaaaggccctgagcgacgcatgtatgggcacaatcgcctccttcctgtctaagtaccaggacatcatcatcgaacaccagaaggtggtgaagggcaaccagaagagactggagagcctgcgggagctggccggcaaggaaaacctggaataccctagcgtgaccctgccacctcagcctcacaccaaggagggcgttgatgcctacaacgaagtgatcgcccgggtgcgaatgtgggtgaacctgaacctgtggcagaagctgaagctaagcagagatgatgccaagcctctgctgagactgaagggattcccttcctttcctctggtcgagagacaggccaacgaagtggactggtgggacatggtgtgtaacgtgaagaagctgatcaacgagaaaaaggaggatggcaaggtgttttggcagaatctggctggctacaagagacaggaagccctgagaccatacctgagcagcgaggaagatcggaagaagggaaagaaattcgctcggtaccagctgggcgacctgctgctgcacctggaaaagaagcacggcgaggactggggaaaggtgtacgacgaggcctgggagcggattgacaagaaagtggaaggcctgagcaagcacatcaagctggaagaggaacggagaagcgaggacgcccagagcaaggccgccctgaccgactggctgcgggctaaggccagcttcgtgatcgagggcctgaaggaggccgacaaggacgagttctgcagatgcgagctgaagctgcagaagtggtacggggacctgcggggaaagcccttcgccatcgaagccgagaacagcatcctggacatcagcggcttcagcaagcagtacaactgtgccttcatctggcagaaggacggcgtgaagaagctgaacctgtacctgatcatcaactacttcaagggcggcaagctgcggttcaagaagatcaaacctgaagccttcgaagccaacagattctacaccgtgatcaacaaaaagagcggcgagatcgtgcccatggaggtgaacttcaacttcgacgaccccaacctgatcatcctgcctctggcctttggcaagagacagggcagagaattcatctggaacgacctgctgtccctggaaaccggcagcctgaagctggccaacggaagagtgatcgagaagacactgtacaacagaagaacccggcaggatgagcctgccctgttcgtggccctgaccttcgagcggcgggaggtcctggactcctccaatatcaaaccaatgaacctgatcggcgtggcaagaggcgaaaacatccccgccgtgatcgccctgaccgaccccgagggctgcccactgagccggtttaaggatagcctgggaaacccaacccacatcctgagaatcggcgagagctataaggagaagcagcggaccatccaggccaagaaggaggtggagcagcggagagccggcggctacagccggaagtacgccagcaaagccaagaatctggcagacgatatggtgagaaacaccgctagagatctgctgtactacgccgtgacccaggatgccatgctgatcttcgccaacctgagccggggcttcggccggcagggcaagcggaccttcatggccgagagacagtacacacggatggaggactggctgaccgccaagctggcctacgagggcctgagcaagacctacctgtccaagacactggcccagtacacctccaagacatgcagcaactgtgggtttaccatcaccagcgccgactacgacagggtgctggagaagctgaagaagacagcaacaggctggatgaccacaattaacggcaaggagctgaaggtggagggccagattacctactacaacagatacaagagacagaacgtagtcaaggacctgtccgtcgagctggatagactgagcgaagaatctgtgaacaacgacatctcctcctggacaaagggcagaagcggagaagctctgagcctcctgaagaaaagattctcccatagacccgtgcaggagaagttcgtgtgcctgaactgcggcttcgagacacacgcagccgagcaagccgccctgaacatcgccagatcctggctgttcctgcggagccaggagtacaagaaataccagacaaacaagacaaccggcaacaccgataagagagccttcgtcgagacctggcagtccttttaccggaagaagcttaaggaggtgtggaaacctgccgtgcggtctggcggatctggcggaggctccgccagggccagcctgagcttcgaggacgtggccgtgggcttcagctgggaggagtggcagctgctggcccccagccagaaggacctgtacagggacgtgatgctggagaactacaggaacctggtgagcgtgggctaccaggccagcaagcccgacagcgtgttccagctggagcagggcgagcccccctggatggtggagggcgccgcccagagccagacctgccagggctaccccgccaccggcggcccaagcagcggcgcccctcctcccagcggcggcagcccagccggctccccaacctctaccgaggagggcacctctgagtccgccacccccgagagcggccctggcacctccaccgagcccagcgagggcagcgcacccggcagccctgccggcagccccacctccacagaggagggaaccagcaccgagcccagcgaaggcagcgccccaggcaccagcaccgagcctagtgagcaggagattaaacggatcaacaagatcagaagaagacttgtgaaagacagcaacaccaagaaggccggcaagacaggccccatgaaaaccctgctggttagagtgatgacacccgatctgagagagcggctggaaaacctgagaaagaagcctgaaaatatcccccagcccatcagcaatacatctagagccaacctgaataagctgctgaccgattacaccgaaatgaagaaggcgatcctgcatgtgtactgggaagagttccagaaggaccctgtgggcctgatgagccgggtggcccagcctgccagcaagaagatcgatcagaacaagctgaaacctgagatggacgagaagggcaacctgaccaccgccggctttgcctgctctcagtgtggccagcccctgttcgtgtacaagctggagcaggtgtctgagaagggcaaggcttacaccaactacttcggacggtgcaatgtggccgagcacgaaaagctgatcctgctggcccagctgaagcccgagaaggatagcgacgaagccgtgacatatagcctgggaaagtttgggcagagggccctggatttctacagcattcatgtgaccaaggagtccacccaccccgtgaagcccctggcccagatcgccggaaacagatacgcctccggacctgtgggaaaggccctgagcgacgcatgtatgggcacaatcgcctccttcctgtctaagtaccaggacatcatcatcgaacaccagaaggtggtgaagggcaaccagaagagactggagagcctgcgggagctggccggcaaggaaaacctggaataccctagcgtgaccctgccacctcagcctcacaccaaggagggcgttgatgcctacaacgaagtgatcgcccgggtgcgaatgtgggtgaacctgaacctgtggcagaagctgaagctaagcagagatgatgccaagcctctgctgagactgaagggattcccttcctttcctctggtcgagagacaggccaacgaagtggactggtgggacatggtgtgtaacgtgaagaagctgatcaacgagaaaaaggaggatggcaaggtgttttggcagaatctggctggctacaagagacaggaagccctgagaccatacctgagcagcgaggaagatcggaagaagggaaagaaattcgctcggtaccagctgggcgacctgctgctgcacctggaaaagaagcacggcgaggactggggaaaggtgtacgacgaggcctgggagcggattgacaagaaagtggaaggcctgagcaagcacatcaagctggaagaggaacggagaagcgaggacgcccagagcaaggccgccctgaccgactggctgcgggctaaggccagcttcgtgatcgagggcctgaaggaggccgacaaggacgagttctgcagatgcgagctgaagctgcagaagtggtacggggacctgcggggaaagcccttcgccatcgaagccgagaacagcatcctggacatcagcggcttcagcaagcagtacaactgtgccttcatctggcagaaggacggcgtgaagaagctgaacctgtacctgatcatcaactacttcaagggcggcaagctgcggttcaagaagatcaaacctgaagccttcgaagccaacagattctacaccgtgatcaacaaaaagagcggcgagatcgtgcccatggaggtgaacttcaacttcgacgaccccaacctgatcatcctgcctctggcctttggcaagagacagggcagagaattcatctggaacgacctgctgtccctggaaaccggcagcctgaagctggccaacggaagagtgatcgagaagacactgtacaacagaagaacccggcaggatgagcctgccctgttcgtggccctgaccttcgagcggcgggaggtcctggactcctccaatatcaaaccaatgaacctgatcggcgtggcaagaggcgaaaacatccccgccgtgatcgccctgaccgaccccgagggctgcccactgagccggtttaaggatagcctgggaaacccaacccacatcctgagaatcggcgagagctataaggagaagcagcggaccatccaggccaagaaggaggtggagcagcggagagccggcggctacagccggaagtacgccagcaaagccaagaatctggcagacgatatggtgagaaacaccgctagagatctgctgtactacgccgtgacccaggatgccatgctgatcttcgccaacctgagccggggcttcggccggcagggcaagcggaccttcatggccgagagacagtacacacggatggaggactggctgaccgccaagctggcctacgagggcctgagcaagacctacctgtccaagacactggcccagtacacctccaagacatgcagcaactgtgggtttaccatcaccagcgccgactacgacagggtgctggagaagctgaagaagacagcaacaggctggatgaccacaattaacggcaaggagctgaaggtggagggccagattacctactacaacagatacaagagacagaacgtagtcaaggacctgtccgtcgagctggatagactgagcgaagaatctgtgaacaacgacatctcctcctggacaaagggcagaagcggagaagctctgagcctcctgaagaaaagattctcccatagacccgtgcaggagaagttcgtgtgcctgaactgcggcttcgagacacacgcagccgagcaagccgccctgaacatcgccagatcctggctgttcctgcggagccaggagtacaagaaataccagacaaacaagacaaccggcaacaccgataagagagccttcgtcgagacctggcagtccttttaccggaagaagcttaaggaggtgtggaaacctgccgtgcggtctggcggatctggcggaggctcctgccagggccagcctgagcttcgaggacgtggccgtgggcttcagctgggaggagtggcagctgctggcccccagccagaaggacctgtacagggacgtgatgctggagaactacaggaacctggtgagcgtgggctaccaggccagcaagcccgacagcgtgttccagctggagcagggcgagcccccctggatggtggagggcgccgcccagagccagacctgccagggctaccccgccaccggatctggctccggcagcggccccaagaaaaagagaaaagtctaagctgccttctgcggggcttgccttctggccatgcccttcttctctcccttgcacctgtacctcttggtctttgaataaagcctgagtaggaaggctagcaaaaaaaaaaaaaaaaaaaaaaaaaaaaaaaaaaaaaaaaaaaaaaaaaaaaaaaaaaaaaaaaaaaaaaaaaaaaaaaa

SEQ ID NO: 16025 - RNA, 9485 nt, synthetic construct
  source 1..9485: mol_type = other RNA
aggaaataagagagaaaagaagagtaagaagaaatataagagccaccatggcccctaagaagaagcgtaaagtgagccggatggaacgcctcgtctacgaggtgcggcagaagtgcagaaacatcgaggacatctgcatctcctgcggatctctgaacgtgaccctggagcacccactgttcatcggcggcatgtgccagaactgtaaaaactgttttctggagtgtgcctatcaatacgacgatgacggctaccagagctactgcaccatctgttgcggcggaagagaggtgctgatgtgtggaaataacaactgctgccggtgcttctgcgtggaatgcgtggacctgctggtgggccccggcgccgcccaggccgctattaaggaagatccttggaactgctacatgtgcggccacaagggcacatacggcctgctgagacggagagaggactggcctagcagactgcagatgttcttcgccaataaccacgaccaggagttcgacccccctaaggtgtaccctcccgtccccgccgagaagagaaagcccatccgggtcctgagcctgttcgatggcatcgccaccggtctgctggtgctgaaggacctgggcatccaggtggataggtacattgcctccgaggtgtgcgaggactccatcaccgtgggaatggtgcgtcatcagggcaagatcatgtacgtgggcgacgtgcggagcgtgacacagaagcatatccaggagtggggccctttcgacctggtgatcggcggcagcccttgcaatgacctgagcatcgtgaacccagcccggaagggcctgtacgagggaaccggcagactgttcttcgagttttacagactgctgcacgacgcccggcctaaggaaggcgacgaccggcccttcttttggctgttcgagaatgtggtggccatgggagtcagcgacaagcgggatattagccggttcctggagagcaaccccgtgatgatcgatgccaaggaagtgagcgccgcccaccgggccagatacttctggggcaatctgcctggcatgaacagacccctggccagcaccgtgaacgacaagctggagctgcaggagtgcctggagcacggccggatcgccaagttcagcaaggtgagaaccatcaccacccgaagcaacagcatcaaacaaggcaaggaccagcactttcctgtgttcatgaacgagaaggaggacatcctgtggtgtaccgagatggagagagtgttcgggttcccagtccactacacagatgtcagcaacatgtctagactggccagacagagactgctgggaagaagctggtccgtccctgtgatcagacacctgttcgcccctctgaaggagtacttcgcctgcgtgagcagcggcaacagcaacgccaacagccggggccccagcttctctagcggcctggtgccactgtccctgagagggagccacatgggccccatggagatctacaaaaccgtgagcgcctggaagcggcagcctgtgcgcgtgctgagcctgtttcggaatatcgataaagtcctgaaaagcctgggattcctggagagcggctctggctccggcggtggcaccctgaagtacgtggaggatgtgacaaacgtggtcagacgggatgtggagaagtggggccccttcgatctggtgtacggcagcacccaacccctgggcagctcttgtgaccggtgccctggctggtacatgtttcagttccaccggatcctgcagtacgccctgccgagacaggagtcccagcggccattcttttggattttcatggacaacttgctgctgaccgaggatgaccaggaaactaccactcggttcctgcagaccgaagccgtgaccctgcaggacgtgagaggccgggactaccagaacgccatgcgggtgtggtccaacatccctggactgaaaagcaagcacgcacctctgacccctaaagaagaggagtacctgcaggcccaggtgcggagcagaagcaagctggacgcccctaaggtggatctgctggtgaagaattgcctcctgcccctgagagagtacttcaagtatttcagccagaatagtctgcccctgggaggcagcggcggcggcgccctggtgacatttgaggacgtcgccgtgcggttcacccaggaggaatgggctctgctggatccttctcagaaaatcctgtaccgggacgtgatgagagagacataccggaatctgacctccgtgggcatcaactgggaatgttgggaccttgaagcctgcttcagaagcctgggaagaaacctgagagtgcaggtggtgaagagaaagtgcgagctgaccaacagcggcccctgcgccgagggcggcccaagcagcggcgcccctcctcccagcggcggcagcccagccggctccccaacctctaccgaggagggcacctctgagtccgccacccccgagagcggccctggcacctccaccgagcccagcgagggcagcgcacccggcagccctgccggcagccccacctccacagaggagggaaccagcaccgagcccagcgaaggcagcgccccaggcaccagcaccgagcctagtgagcaggagattaaacggatcaacaagatcagaagaagacttgtgaaagacagcaacaccaagaaggccggcaagacaggccccatgaaaaccctgctggttagagtgatgacacccgatctgagagagcggctggaaaacctgagaaagaagcctgaaaatatcccccagcccatcagcaatacatctagagccaacctgaataagctgctgaccgattacaccgaaatgaagaaggcgatcctgcatgtgtactgggaagagttccagaaggaccctgtgggcctgatgagccgggtggcccagcctgccagcaagaagatcgatcagaacaagctgaaacctgagatggacgagaagggcaacctgaccaccgccggctttgcctgctctcagtgtggccagcccctgttcgtgtacaagctggagcaggtgtctgagaagggcaaggcttacaccaactacttcggacggtgcaatgtggccgagcacgaaaagctgatcctgctggcccagctgaagcccgagaaggatagcgacgaagccgtgacatatagcctgggaaagtttgggcagagggccctggatttctacagcattcatgtgaccaaggagtccacccaccccgtgaagcccctggcccagatcgccggaaacagatacgcctccggacctgtgggaaaggccctgagcgacgcatgtatgggcacaatcgcctccttcctgtctaagtaccaggacatcatcatcgaacaccagaaggtggtgaagggcaaccagaagagactggagagcctgcgggagctggccggcaaggaaaacctggaataccctagcgtgaccctgccacctcagcctcacaccaaggagggcgttgatgcctacaacgaagtgatcgcccgggtgcgaatgtgggtgaacctgaacctgtggcagaagctgaagctaagcagagatgatgccaagcctctgctgagactgaagggattcccttcctttcctctggtcgagagacaggccaacgaagtggactggtgggacatggtgtgtaacgtgaagaagctgatcaacgagaaaaaggaggatggcaaggtgttttggcagaatctggctggctacaagagacaggaagccctgagaccatacctgagcagcgaggaagatcggaagaagggaaagaaattcgctcggtaccagctgggcgacctgctgctgcacctggaaaagaagcacggcgaggactggggaaaggtgtacgacgaggcctgggagcggattgacaagaaagtggaaggcctgagcaagcacatcaagctggaagaggaacggagaagcgaggacgcccagagcaaggccgccctgaccgactggctgcgggctaaggccagcttcgtgatcgagggcctgaaggaggccgacaaggacgagttctgcagatgcgagctgaagctgcagaagtggtacggggacctgcggggaaagcccttcgccatcgaagccgagaacagcatcctggacatcagcggcttcagcaagcagtacaactgtgccttcatctggcagaaggacggcgtgaagaagctgaacctgtacctgatcatcaactacttcaagggcggcaagctgcggttcaagaagatcaaacctgaagccttcgaagccaacagattctacaccgtgatcaacaaaaagagcggcgagatcgtgcccatggaggtgaacttcaacttcgacgaccccaacctgatcatcctgcctctggcctttggcaagagacagggcagagaattcatctggaacgacctgctgtccctggaaaccggcagcctgaagctggccaacggaagagtgatcgagaagacactgtacaacagaagaacccggcaggatgagcctgccctgttcgtggccctgaccttcgagcggcgggaggtcctggactcctccaatatcaaaccaatgaacctgatcggcgtggcaagaggcgaaaacatccccgccgtgatcgccctgaccgaccccgagggctgcccactgagccggtttaaggatagcctgggaaacccaacccacatcctgagaatcggcgagagctataaggagaagcagcggaccatccaggccaagaaggaggtggagcagcggagagccggcggctacagccggaagtacgccagcaaagccaagaatctggcagacgatatggtgagaaacaccgctagagatctgctgtactacgccgtgacccaggatgccatgctgatcttcgccaacctgagccggggcttcggccggcagggcaagcggaccttcatggccgagagacagtacacacggatggaggactggctgaccgccaagctggcctacgagggcctgagcaagacctacctgtccaagacactggcccagtacacctccaagacatgcagcaactgtgggtttaccatcaccagcgccgactacgacagggtgctggagaagctgaagaagacagcaacaggctggatgaccacaattaacggcaaggagctgaaggtggagggccagattacctactacaacagatacaagagacagaacgtagtcaaggacctgtccgtcgagctggatagactgagcgaagaatctgtgaacaacgacatctcctcctggacaaagggcagaagcggagaagctctgagcctcctgaagaaaagattctcccatagacccgtgcaggagaagttcgtgtgcctgaactgcggcttcgagacacacgcagccgagcaagccgccctgaacatcgccagatcctggctgttcctgcggagccaggagtacaagaaataccagacaaacaagacaaccggcaacaccgataagagagccttcgtcgagacctggcagtccttttaccggaagaagcttaaggaggtgtggaaacctgccgtgcggtctggcggatctggcggaggctccctgcaggtgagcgtgagcttcgaggacgtgaccgtggacttcagcagggaggagtggcagcacctggaccccgcccagaggaggctgtactgggacgtgaccctggagaactacagccacctgctgagcgtgggctaccaggtgcccaagcccgaggtgatcctgaagctggagcagggcgagggcccctggaccctggagggcgagaccccccaccagagctgcagcgacgaggacatcggcggcggcccaagcagcggcgcccctcctcccagcggcggcagcccagccggctccccaacctctaccgaggagggcacctctgagtccgccacccccgagagcggccctggcacctccaccgagcccagcgagggcagcgcacccggcagccctgccggcagccccacctccacagaggagggaaccagcaccgagcccagcgaaggcagcgccccaggcaccagcaccgagcctagtgagcaggagattaaacggatcaacaagatcagaagaagacttgtgaaagacagcaacaccaagaaggccggcaagacaggccccatgaaaaccctgctggttagagtgatgacacccgatctgagagagcggctggaaaacctgagaaagaagcctgaaaatatcccccagcccatcagcaatacatctagagccaacctgaataagctgctgaccgattacaccgaaatgaagaaggcgatcctgcatgtgtactgggaagagttccagaaggaccctgtgggcctgatgagccgggtggcccagcctgccagcaagaagatcgatcagaacaagctgaaacctgagatggacgagaagggcaacctgaccaccgccggctttgcctgctctcagtgtggccagcccctgttcgtgtacaagctggagcaggtgtctgagaagggcaaggcttacaccaactacttcggacggtgcaatgtggccgagcacgaaaagctgatcctgctggcccagctgaagcccgagaaggatagcgacgaagccgtgacatatagcctgggaaagtttgggcagagggccctggatttctacagcattcatgtgaccaaggagtccacccaccccgtgaagcccctggcccagatcgccggaaacagatacgcctccggacctgtgggaaaggccctgagcgacgcatgtatgggcacaatcgcctccttcctgtctaagtaccaggacatcatcatcgaacaccagaaggtggtgaagggcaaccagaagagactggagagcctgcgggagctggccggcaaggaaaacctggaataccctagcgtgaccctgccacctcagcctcacaccaaggagggcgttgatgcctacaacgaagtgatcgcccgggtgcgaatgtgggtgaacctgaacctgtggcagaagctgaagctaagcagagatgatgccaagcctctgctgagactgaagggattcccttcctttcctctggtcgagagacaggccaacgaagtggactggtgggacatggtgtgtaacgtgaagaagctgatcaacgagaaaaaggaggatggcaaggtgttttggcagaatctggctggctacaagagacaggaagccctgagaccatacctgagcagcgaggaagatcggaagaagggaaagaaattcgctcggtaccagctgggcgacctgctgctgcacctggaaaagaagcacggcgaggactggggaaaggtgtacgacgaggcctgggagcggattgacaagaaagtggaaggcctgagcaagcacatcaagctggaagaggaacggagaagcgaggacgcccagagcaaggccgccctgaccgactggctgcgggctaaggccagcttcgtgatcgagggcctgaaggaggccgacaaggacgagttctgcagatgcgagctgaagctgcagaagtggtacggggacctgcggggaaagcccttcgccatcgaagccgagaacagcatcctggacatcagcggcttcagcaagcagtacaactgtgccttcatctggcagaaggacggcgtgaagaagctgaacctgtacctgatcatcaactacttcaagggcggcaagctgcggttcaagaagatcaaacctgaagccttcgaagccaacagattctacaccgtgatcaacaaaaagagcggcgagatcgtgcccatggaggtgaacttcaacttcgacgaccccaacctgatcatcctgcctctggcctttggcaagagacagggcagagaattcatctggaacgacctgctgtccctggaaaccggcagcctgaagctggccaacggaagagtgatcgagaagacactgtacaacagaagaacccggcaggatgagcctgccctgttcgtggccctgaccttcgagcggcgggaggtcctggactcctccaatatcaaaccaatgaacctgatcggcgtggcaagaggcgaaaacatccccgccgtgatcgccctgaccgaccccgagggctgcccactgagccggtttaaggatagcctgggaaacccaacccacatcctgagaatcggcgagagctataaggagaagcagcggaccatccaggccaagaaggaggtggagcagcggagagccggcggctacagccggaagtacgccagcaaagccaagaatctggcagacgatatggtgagaaacaccgctagagatctgctgtactacgccgtgacccaggatgccatgctgatcttcgccaacctgagccggggcttcggccggcagggcaagcggaccttcatggccgagagacagtacacacggatggaggactggctgaccgccaagctggcctacgagggcctgagcaagacctacctgtccaagacactggcccagtacacctccaagacatgcagcaactgtgggtttaccatcaccagcgccgactacgacagggtgctggagaagctgaagaagacagcaacaggctggatgaccacaattaacggcaaggagctgaaggtggagggccagattacctactacaacagatacaagagacagaacgtagtcaaggacctgtccgtcgagctggatagactgagcgaagaatctgtgaacaacgacatctcctcctggacaaagggcagaagcggagaagctctgagcctcctgaagaaaagattctcccatagacccgtgcaggagaagttcgtgtgcctgaactgcggcttcgagacacacgcagccgagcaagccgccctgaacatcgccagatcctggctgttcctgcggagccaggagtacaagaaataccagacaaacaagacaaccggcaacaccgataagagagccttcgtcgagacctggcagtccttttaccggaagaagcttaaggaggtgtggaaacctgccgtgcggtctggcggatctggcggaggctcctctgcaggtgagcgtgagcttcgaggacgtgaccgtggacttcagcagggaggagtggcagcacctggaccccgcccagaggaggctgtactgggacgtgaccctggagaactacagccacctgctgagcgtgggctaccaggtgcccaagcccgaggtgatcctgaagctggagcagggcgagggcccctggaccctggagggcgagaccccccaccagagctgcagcgacgaggacatcggcggatctggctccggcagcggccccaagaaaaagagaaaagtctaagctgccttctgcggggcttgccttctggccatgcccttcttctctcccttgcacctgtacctcttggtctttgaataaagcctgagtaggaaggctagcaaaaaaaaaaaaaaaaaaaaaaaaaaaaaaaaaaaaaaaaaaaaaaaaaaaaaaaaaaaaaaaaaaaaaaaaaaaaaaaa

SEQ ID NO: 16026 - RNA, 9485 nt, synthetic construct
  source 1..9485: mol_type = other RNA
aggaaataagagagaaaagaagagtaagaagaaatataagagccaccatggcccctaagaagaagcgtaaagtgagccggatggaacgcctcgtctacgaggtgcggcagaagtgcagaaacatcgaggacatctgcatctcctgcggatctctgaacgtgaccctggagcacccactgttcatcggcggcatgtgccagaactgtaaaaactgttttctggagtgtgcctatcaatacgacgatgacggctaccagagctactgcaccatctgttgcggcggaagagaggtgctgatgtgtggaaataacaactgctgccggtgcttctgcgtggaatgcgtggacctgctggtgggccccggcgccgcccaggccgctattaaggaagatccttggaactgctacatgtgcggccacaagggcacatacggcctgctgagacggagagaggactggcctagcagactgcagatgttcttcgccaataaccacgaccaggagttcgacccccctaaggtgtaccctcccgtccccgccgagaagagaaagcccatccgggtcctgagcctgttcgatggcatcgccaccggtctgctggtgctgaaggacctgggcatccaggtggataggtacattgcctccgaggtgtgcgaggactccatcaccgtgggaatggtgcgtcatcagggcaagatcatgtacgtgggcgacgtgcggagcgtgacacagaagcatatccaggagtggggccctttcgacctggtgatcggcggcagcccttgcaatgacctgagcatcgtgaacccagcccggaagggcctgtacgagggaaccggcagactgttcttcgagttttacagactgctgcacgacgcccggcctaaggaaggcgacgaccggcccttcttttggctgttcgagaatgtggtggccatgggagtcagcgacaagcgggatattagccggttcctggagagcaaccccgtgatgatcgatgccaaggaagtgagcgccgcccaccgggccagatacttctggggcaatctgcctggcatgaacagacccctggccagcaccgtgaacgacaagctggagctgcaggagtgcctggagcacggccggatcgccaagttcagcaaggtgagaaccatcaccacccgaagcaacagcatcaaacaaggcaaggaccagcactttcctgtgttcatgaacgagaaggaggacatcctgtggtgtaccgagatggagagagtgttcgggttcccagtccactacacagatgtcagcaacatgtctagactggccagacagagactgctgggaagaagctggtccgtccctgtgatcagacacctgttcgcccctctgaaggagtacttcgcctgcgtgagcagcggcaacagcaacgccaacagccggggccccagcttctctagcggcctggtgccactgtccctgagagggagccacatgggccccatggagatctacaaaaccgtgagcgcctggaagcggcagcctgtgcgcgtgctgagcctgtttcggaatatcgataaagtcctgaaaagcctgggattcctggagagcggctctggctccggcggtggcaccctgaagtacgtggaggatgtgacaaacgtggtcagacgggatgtggagaagtggggccccttcgatctggtgtacggcagcacccaacccctgggcagctcttgtgaccggtgccctggctggtacatgtttcagttccaccggatcctgcagtacgccctgccgagacaggagtcccagcggccattcttttggattttcatggacaacttgctgctgaccgaggatgaccaggaaactaccactcggttcctgcagaccgaagccgtgaccctgcaggacgtgagaggccgggactaccagaacgccatgcgggtgtggtccaacatccctggactgaaaagcaagcacgcacctctgacccctaaagaagaggagtacctgcaggcccaggtgcggagcagaagcaagctggacgcccctaaggtggatctgctggtgaagaattgcctcctgcccctgagagagtacttcaagtatttcagccagaatagtctgcccctgggaggcagcggcggcggcgccctggtgacatttgaggacgtcgccgtgcggttcacccaggaggaatgggctctgctggatccttctcagaaaatcctgtaccgggacgtgatgagagagacataccggaatctgacctccgtgggcatcaactgggaatgttgggaccttgaagcctgcttcagaagcctgggaagaaacctgagagtgcaggtggtgaagagaaagtgcgagctgaccaacagcggcccctgcgccgagggcggcccaagcagcggcgcccctcctcccagcggcggcagcccagccggctccccaacctctaccgaggagggcacctctgagtccgccacccccgagagcggccctggcacctccaccgagcccagcgagggcagcgcacccggcagccctgccggcagccccacctccacagaggagggaaccagcaccgagcccagcgaaggcagcgccccaggcaccagcaccgagcctagtgagcaggagattaaacggatcaacaagatcagaagaagacttgtgaaagacagcaacaccaagaaggccggcaagacaggccccatgaaaaccctgctggttagagtgatgacacccgatctgagagagcggctggaaaacctgagaaagaagcctgaaaatatcccccagcccatcagcaatacatctagagccaacctgaataagctgctgaccgattacaccgaaatgaagaaggcgatcctgcatgtgtactgggaagagttccagaaggaccctgtgggcctgatgagccgggtggcccagcctgccagcaagaagatcgatcagaacaagctgaaacctgagatggacgagaagggcaacctgaccaccgccggctttgcctgctctcagtgtggccagcccctgttcgtgtacaagctggagcaggtgtctgagaagggcaaggcttacaccaactacttcggacggtgcaatgtggccgagcacgaaaagctgatcctgctggcccagctgaagcccgagaaggatagcgacgaagccgtgacatatagcctgggaaagtttgggcagagggccctggatttctacagcattcatgtgaccaaggagtccacccaccccgtgaagcccctggcccagatcgccggaaacagatacgcctccggacctgtgggaaaggccctgagcgacgcatgtatgggcacaatcgcctccttcctgtctaagtaccaggacatcatcatcgaacaccagaaggtggtgaagggcaaccagaagagactggagagcctgcgggagctggccggcaaggaaaacctggaataccctagcgtgaccctgccacctcagcctcacaccaaggagggcgttgatgcctacaacgaagtgatcgcccgggtgcgaatgtgggtgaacctgaacctgtggcagaagctgaagctaagcagagatgatgccaagcctctgctgagactgaagggattcccttcctttcctctggtcgagagacaggccaacgaagtggactggtgggacatggtgtgtaacgtgaagaagctgatcaacgagaaaaaggaggatggcaaggtgttttggcagaatctggctggctacaagagacaggaagccctgagaccatacctgagcagcgaggaagatcggaagaagggaaagaaattcgctcggtaccagctgggcgacctgctgctgcacctggaaaagaagcacggcgaggactggggaaaggtgtacgacgaggcctgggagcggattgacaagaaagtggaaggcctgagcaagcacatcaagctggaagaggaacggagaagcgaggacgcccagagcaaggccgccctgaccgactggctgcgggctaaggccagcttcgtgatcgagggcctgaaggaggccgacaaggacgagttctgcagatgcgagctgaagctgcagaagtggtacggggacctgcggggaaagcccttcgccatcgaagccgagaacagcatcctggacatcagcggcttcagcaagcagtacaactgtgccttcatctggcagaaggacggcgtgaagaagctgaacctgtacctgatcatcaactacttcaagggcggcaagctgcggttcaagaagatcaaacctgaagccttcgaagccaacagattctacaccgtgatcaacaaaaagagcggcgagatcgtgcccatggaggtgaacttcaacttcgacgaccccaacctgatcatcctgcctctggcctttggcaagagacagggcagagaattcatctggaacgacctgctgtccctggaaaccggcagcctgaagctggccaacggaagagtgatcgagaagacactgtacaacagaagaacccggcaggatgagcctgccctgttcgtggccctgaccttcgagcggcgggaggtcctggactcctccaatatcaaaccaatgaacctgatcggcgtggcaagaggcgaaaacatccccgccgtgatcgccctgaccgaccccgagggctgcccactgagccggtttaaggatagcctgggaaacccaacccacatcctgagaatcggcgagagctataaggagaagcagcggaccatccaggccaagaaggaggtggagcagcggagagccggcggctacagccggaagtacgccagcaaagccaagaatctggcagacgatatggtgagaaacaccgctagagatctgctgtactacgccgtgacccaggatgccatgctgatcttcgccaacctgagccggggcttcggccggcagggcaagcggaccttcatggccgagagacagtacacacggatggaggactggctgaccgccaagctggcctacgagggcctgagcaagacctacctgtccaagacactggcccagtacacctccaagacatgcagcaactgtgggtttaccatcaccagcgccgactacgacagggtgctggagaagctgaagaagacagcaacaggctggatgaccacaattaacggcaaggagctgaaggtggagggccagattacctactacaacagatacaagagacagaacgtagtcaaggacctgtccgtcgagctggatagactgagcgaagaatctgtgaacaacgacatctcctcctggacaaagggcagaagcggagaagctctgagcctcctgaagaaaagattctcccatagacccgtgcaggagaagttcgtgtgcctgaactgcggcttcgagacacacgcagccgagcaagccgccctgaacatcgccagatcctggctgttcctgcggagccaggagtacaagaaataccagacaaacaagacaaccggcaacaccgataagagagccttcgtcgagacctggcagtccttttaccggaagaagcttaaggaggtgtggaaacctgccgtgcggtctggcggatctggcggaggctccagctggggccccctgagcttcatggacgtgttcgtggacttcacctgggaggagtggcagctgctggaccccgcccagaagtgcctgtacaggagcgtgatgctggagaactacagcaacctggtgagcctgggctaccagcacaccaagcccgacatcatcttcaagctggagcagggcgaggagctgtgcatggtgcaggcccaggtgcccaaccagacctgccccaacaccgtgtggaagggcggcccaagcagcggcgcccctcctcccagcggcggcagcccagccggctccccaacctctaccgaggagggcacctctgagtccgccacccccgagagcggccctggcacctccaccgagcccagcgagggcagcgcacccggcagccctgccggcagccccacctccacagaggagggaaccagcaccgagcccagcgaaggcagcgccccaggcaccagcaccgagcctagtgagcaggagattaaacggatcaacaagatcagaagaagacttgtgaaagacagcaacaccaagaaggccggcaagacaggccccatgaaaaccctgctggttagagtgatgacacccgatctgagagagcggctggaaaacctgagaaagaagcctgaaaatatcccccagcccatcagcaatacatctagagccaacctgaataagctgctgaccgattacaccgaaatgaagaaggcgatcctgcatgtgtactgggaagagttccagaaggaccctgtgggcctgatgagccgggtggcccagcctgccagcaagaagatcgatcagaacaagctgaaacctgagatggacgagaagggcaacctgaccaccgccggctttgcctgctctcagtgtggccagcccctgttcgtgtacaagctggagcaggtgtctgagaagggcaaggcttacaccaactacttcggacggtgcaatgtggccgagcacgaaaagctgatcctgctggcccagctgaagcccgagaaggatagcgacgaagccgtgacatatagcctgggaaagtttgggcagagggccctggatttctacagcattcatgtgaccaaggagtccacccaccccgtgaagcccctggcccagatcgccggaaacagatacgcctccggacctgtgggaaaggccctgagcgacgcatgtatgggcacaatcgcctccttcctgtctaagtaccaggacatcatcatcgaacaccagaaggtggtgaagggcaaccagaagagactggagagcctgcgggagctggccggcaaggaaaacctggaataccctagcgtgaccctgccacctcagcctcacaccaaggagggcgttgatgcctacaacgaagtgatcgcccgggtgcgaatgtgggtgaacctgaacctgtggcagaagctgaagctaagcagagatgatgccaagcctctgctgagactgaagggattcccttcctttcctctggtcgagagacaggccaacgaagtggactggtgggacatggtgtgtaacgtgaagaagctgatcaacgagaaaaaggaggatggcaaggtgttttggcagaatctggctggctacaagagacaggaagccctgagaccatacctgagcagcgaggaagatcggaagaagggaaagaaattcgctcggtaccagctgggcgacctgctgctgcacctggaaaagaagcacggcgaggactggggaaaggtgtacgacgaggcctgggagcggattgacaagaaagtggaaggcctgagcaagcacatcaagctggaagaggaacggagaagcgaggacgcccagagcaaggccgccctgaccgactggctgcgggctaaggccagcttcgtgatcgagggcctgaaggaggccgacaaggacgagttctgcagatgcgagctgaagctgcagaagtggtacggggacctgcggggaaagcccttcgccatcgaagccgagaacagcatcctggacatcagcggcttcagcaagcagtacaactgtgccttcatctggcagaaggacggcgtgaagaagctgaacctgtacctgatcatcaactacttcaagggcggcaagctgcggttcaagaagatcaaacctgaagccttcgaagccaacagattctacaccgtgatcaacaaaaagagcggcgagatcgtgcccatggaggtgaacttcaacttcgacgaccccaacctgatcatcctgcctctggcctttggcaagagacagggcagagaattcatctggaacgacctgctgtccctggaaaccggcagcctgaagctggccaacggaagagtgatcgagaagacactgtacaacagaagaacccggcaggatgagcctgccctgttcgtggccctgaccttcgagcggcgggaggtcctggactcctccaatatcaaaccaatgaacctgatcggcgtggcaagaggcgaaaacatccccgccgtgatcgccctgaccgaccccgagggctgcccactgagccggtttaaggatagcctgggaaacccaacccacatcctgagaatcggcgagagctataaggagaagcagcggaccatccaggccaagaaggaggtggagcagcggagagccggcggctacagccggaagtacgccagcaaagccaagaatctggcagacgatatggtgagaaacaccgctagagatctgctgtactacgccgtgacccaggatgccatgctgatcttcgccaacctgagccggggcttcggccggcagggcaagcggaccttcatggccgagagacagtacacacggatggaggactggctgaccgccaagctggcctacgagggcctgagcaagacctacctgtccaagacactggcccagtacacctccaagacatgcagcaactgtgggtttaccatcaccagcgccgactacgacagggtgctggagaagctgaagaagacagcaacaggctggatgaccacaattaacggcaaggagctgaaggtggagggccagattacctactacaacagatacaagagacagaacgtagtcaaggacctgtccgtcgagctggatagactgagcgaagaatctgtgaacaacgacatctcctcctggacaaagggcagaagcggagaagctctgagcctcctgaagaaaagattctcccatagacccgtgcaggagaagttcgtgtgcctgaactgcggcttcgagacacacgcagccgagcaagccgccctgaacatcgccagatcctggctgttcctgcggagccaggagtacaagaaataccagacaaacaagacaaccggcaacaccgataagagagccttcgtcgagacctggcagtccttttaccggaagaagcttaaggaggtgtggaaacctgccgtgcggtctggcggatctggcggaggctcctagctggggccccctgagcttcatggacgtgttcgtggacttcacctgggaggagtggcagctgctggaccccgcccagaagtgcctgtacaggagcgtgatgctggagaactacagcaacctggtgagcctgggctaccagcacaccaagcccgacatcatcttcaagctggagcagggcgaggagctgtgcatggtgcaggcccaggtgcccaaccagacctgccccaacaccgtgtggaagggatctggctccggcagcggccccaagaaaaagagaaaagtctaagctgccttctgcggggcttgccttctggccatgcccttcttctctcccttgcacctgtacctcttggtctttgaataaagcctgagtaggaaggctagcaaaaaaaaaaaaaaaaaaaaaaaaaaaaaaaaaaaaaaaaaaaaaaaaaaaaaaaaaaaaaaaaaaaaaaaaaaaaaaaa

SEQ ID NO: 16027 - RNA, 9485 nt, synthetic construct
  source 1..9485: mol_type = other RNA
aggaaataagagagaaaagaagagtaagaagaaatataagagccaccatggcccctaagaagaagcgtaaagtgagccggatggaacgcctcgtctacgaggtgcggcagaagtgcagaaacatcgaggacatctgcatctcctgcggatctctgaacgtgaccctggagcacccactgttcatcggcggcatgtgccagaactgtaaaaactgttttctggagtgtgcctatcaatacgacgatgacggctaccagagctactgcaccatctgttgcggcggaagagaggtgctgatgtgtggaaataacaactgctgccggtgcttctgcgtggaatgcgtggacctgctggtgggccccggcgccgcccaggccgctattaaggaagatccttggaactgctacatgtgcggccacaagggcacatacggcctgctgagacggagagaggactggcctagcagactgcagatgttcttcgccaataaccacgaccaggagttcgacccccctaaggtgtaccctcccgtccccgccgagaagagaaagcccatccgggtcctgagcctgttcgatggcatcgccaccggtctgctggtgctgaaggacctgggcatccaggtggataggtacattgcctccgaggtgtgcgaggactccatcaccgtgggaatggtgcgtcatcagggcaagatcatgtacgtgggcgacgtgcggagcgtgacacagaagcatatccaggagtggggccctttcgacctggtgatcggcggcagcccttgcaatgacctgagcatcgtgaacccagcccggaagggcctgtacgagggaaccggcagactgttcttcgagttttacagactgctgcacgacgcccggcctaaggaaggcgacgaccggcccttcttttggctgttcgagaatgtggtggccatgggagtcagcgacaagcgggatattagccggttcctggagagcaaccccgtgatgatcgatgccaaggaagtgagcgccgcccaccgggccagatacttctggggcaatctgcctggcatgaacagacccctggccagcaccgtgaacgacaagctggagctgcaggagtgcctggagcacggccggatcgccaagttcagcaaggtgagaaccatcaccacccgaagcaacagcatcaaacaaggcaaggaccagcactttcctgtgttcatgaacgagaaggaggacatcctgtggtgtaccgagatggagagagtgttcgggttcccagtccactacacagatgtcagcaacatgtctagactggccagacagagactgctgggaagaagctggtccgtccctgtgatcagacacctgttcgcccctctgaaggagtacttcgcctgcgtgagcagcggcaacagcaacgccaacagccggggccccagcttctctagcggcctggtgccactgtccctgagagggagccacatgggccccatggagatctacaaaaccgtgagcgcctggaagcggcagcctgtgcgcgtgctgagcctgtttcggaatatcgataaagtcctgaaaagcctgggattcctggagagcggctctggctccggcggtggcaccctgaagtacgtggaggatgtgacaaacgtggtcagacgggatgtggagaagtggggccccttcgatctggtgtacggcagcacccaacccctgggcagctcttgtgaccggtgccctggctggtacatgtttcagttccaccggatcctgcagtacgccctgccgagacaggagtcccagcggccattcttttggattttcatggacaacttgctgctgaccgaggatgaccaggaaactaccactcggttcctgcagaccgaagccgtgaccctgcaggacgtgagaggccgggactaccagaacgccatgcgggtgtggtccaacatccctggactgaaaagcaagcacgcacctctgacccctaaagaagaggagtacctgcaggcccaggtgcggagcagaagcaagctggacgcccctaaggtggatctgctggtgaagaattgcctcctgcccctgagagagtacttcaagtatttcagccagaatagtctgcccctgggaggcagcggcggcggcgccctggtgacatttgaggacgtcgccgtgcggttcacccaggaggaatgggctctgctggatccttctcagaaaatcctgtaccgggacgtgatgagagagacataccggaatctgacctccgtgggcatcaactgggaatgttgggaccttgaagcctgcttcagaagcctgggaagaaacctgagagtgcaggtggtgaagagaaagtgcgagctgaccaacagcggcccctgcgccgagggcggcccaagcagcggcgcccctcctcccagcggcggcagcccagccggctccccaacctctaccgaggagggcacctctgagtccgccacccccgagagcggccctggcacctccaccgagcccagcgagggcagcgcacccggcagccctgccggcagccccacctccacagaggagggaaccagcaccgagcccagcgaaggcagcgccccaggcaccagcaccgagcctagtgagcaggagattaaacggatcaacaagatcagaagaagacttgtgaaagacagcaacaccaagaaggccggcaagacaggccccatgaaaaccctgctggttagagtgatgacacccgatctgagagagcggctggaaaacctgagaaagaagcctgaaaatatcccccagcccatcagcaatacatctagagccaacctgaataagctgctgaccgattacaccgaaatgaagaaggcgatcctgcatgtgtactgggaagagttccagaaggaccctgtgggcctgatgagccgggtggcccagcctgccagcaagaagatcgatcagaacaagctgaaacctgagatggacgagaagggcaacctgaccaccgccggctttgcctgctctcagtgtggccagcccctgttcgtgtacaagctggagcaggtgtctgagaagggcaaggcttacaccaactacttcggacggtgcaatgtggccgagcacgaaaagctgatcctgctggcccagctgaagcccgagaaggatagcgacgaagccgtgacatatagcctgggaaagtttgggcagagggccctggatttctacagcattcatgtgaccaaggagtccacccaccccgtgaagcccctggcccagatcgccggaaacagatacgcctccggacctgtgggaaaggccctgagcgacgcatgtatgggcacaatcgcctccttcctgtctaagtaccaggacatcatcatcgaacaccagaaggtggtgaagggcaaccagaagagactggagagcctgcgggagctggccggcaaggaaaacctggaataccctagcgtgaccctgccacctcagcctcacaccaaggagggcgttgatgcctacaacgaagtgatcgcccgggtgcgaatgtgggtgaacctgaacctgtggcagaagctgaagctaagcagagatgatgccaagcctctgctgagactgaagggattcccttcctttcctctggtcgagagacaggccaacgaagtggactggtgggacatggtgtgtaacgtgaagaagctgatcaacgagaaaaaggaggatggcaaggtgttttggcagaatctggctggctacaagagacaggaagccctgagaccatacctgagcagcgaggaagatcggaagaagggaaagaaattcgctcggtaccagctgggcgacctgctgctgcacctggaaaagaagcacggcgaggactggggaaaggtgtacgacgaggcctgggagcggattgacaagaaagtggaaggcctgagcaagcacatcaagctggaagaggaacggagaagcgaggacgcccagagcaaggccgccctgaccgactggctgcgggctaaggccagcttcgtgatcgagggcctgaaggaggccgacaaggacgagttctgcagatgcgagctgaagctgcagaagtggtacggggacctgcggggaaagcccttcgccatcgaagccgagaacagcatcctggacatcagcggcttcagcaagcagtacaactgtgccttcatctggcagaaggacggcgtgaagaagctgaacctgtacctgatcatcaactacttcaagggcggcaagctgcggttcaagaagatcaaacctgaagccttcgaagccaacagattctacaccgtgatcaacaaaaagagcggcgagatcgtgcccatggaggtgaacttcaacttcgacgaccccaacctgatcatcctgcctctggcctttggcaagagacagggcagagaattcatctggaacgacctgctgtccctggaaaccggcagcctgaagctggccaacggaagagtgatcgagaagacactgtacaacagaagaacccggcaggatgagcctgccctgttcgtggccctgaccttcgagcggcgggaggtcctggactcctccaatatcaaaccaatgaacctgatcggcgtggcaagaggcgaaaacatccccgccgtgatcgccctgaccgaccccgagggctgcccactgagccggtttaaggatagcctgggaaacccaacccacatcctgagaatcggcgagagctataaggagaagcagcggaccatccaggccaagaaggaggtggagcagcggagagccggcggctacagccggaagtacgccagcaaagccaagaatctggcagacgatatggtgagaaacaccgctagagatctgctgtactacgccgtgacccaggatgccatgctgatcttcgccaacctgagccggggcttcggccggcagggcaagcggaccttcatggccgagagacagtacacacggatggaggactggctgaccgccaagctggcctacgagggcctgagcaagacctacctgtccaagacactggcccagtacacctccaagacatgcagcaactgtgggtttaccatcaccagcgccgactacgacagggtgctggagaagctgaagaagacagcaacaggctggatgaccacaattaacggcaaggagctgaaggtggagggccagattacctactacaacagatacaagagacagaacgtagtcaaggacctgtccgtcgagctggatagactgagcgaagaatctgtgaacaacgacatctcctcctggacaaagggcagaagcggagaagctctgagcctcctgaagaaaagattctcccatagacccgtgcaggagaagttcgtgtgcctgaactgcggcttcgagacacacgcagccgagcaagccgccctgaacatcgccagatcctggctgttcctgcggagccaggagtacaagaaataccagacaaacaagacaaccggcaacaccgataagagagccttcgtcgagacctggcagtccttttaccggaagaagcttaaggaggtgtggaaacctgccgtgcggtctggcggatctggcggaggctccgcccaggtggccttcgaggacgtggccgtgtacttcaccgaggagcagtgggccctgctggaccacagccagagggccctgtacagggacgtgatgcaggagaactacgagaccgtggccagcctgggcctgcccatccccggccccgacagcatcagcaggctgcagcagagggaggagagcaggatcgaggcccagcccgtgctggagggcaacgacgtgagcagcgacgacgacctgggcggcggcccaagcagcggcgcccctcctcccagcggcggcagcccagccggctccccaacctctaccgaggagggcacctctgagtccgccacccccgagagcggccctggcacctccaccgagcccagcgagggcagcgcacccggcagccctgccggcagccccacctccacagaggagggaaccagcaccgagcccagcgaaggcagcgccccaggcaccagcaccgagcctagtgagcaggagattaaacggatcaacaagatcagaagaagacttgtgaaagacagcaacaccaagaaggccggcaagacaggccccatgaaaaccctgctggttagagtgatgacacccgatctgagagagcggctggaaaacctgagaaagaagcctgaaaatatcccccagcccatcagcaatacatctagagccaacctgaataagctgctgaccgattacaccgaaatgaagaaggcgatcctgcatgtgtactgggaagagttccagaaggaccctgtgggcctgatgagccgggtggcccagcctgccagcaagaagatcgatcagaacaagctgaaacctgagatggacgagaagggcaacctgaccaccgccggctttgcctgctctcagtgtggccagcccctgttcgtgtacaagctggagcaggtgtctgagaagggcaaggcttacaccaactacttcggacggtgcaatgtggccgagcacgaaaagctgatcctgctggcccagctgaagcccgagaaggatagcgacgaagccgtgacatatagcctgggaaagtttgggcagagggccctggatttctacagcattcatgtgaccaaggagtccacccaccccgtgaagcccctggcccagatcgccggaaacagatacgcctccggacctgtgggaaaggccctgagcgacgcatgtatgggcacaatcgcctccttcctgtctaagtaccaggacatcatcatcgaacaccagaaggtggtgaagggcaaccagaagagactggagagcctgcgggagctggccggcaaggaaaacctggaataccctagcgtgaccctgccacctcagcctcacaccaaggagggcgttgatgcctacaacgaagtgatcgcccgggtgcgaatgtgggtgaacctgaacctgtggcagaagctgaagctaagcagagatgatgccaagcctctgctgagactgaagggattcccttcctttcctctggtcgagagacaggccaacgaagtggactggtgggacatggtgtgtaacgtgaagaagctgatcaacgagaaaaaggaggatggcaaggtgttttggcagaatctggctggctacaagagacaggaagccctgagaccatacctgagcagcgaggaagatcggaagaagggaaagaaattcgctcggtaccagctgggcgacctgctgctgcacctggaaaagaagcacggcgaggactggggaaaggtgtacgacgaggcctgggagcggattgacaagaaagtggaaggcctgagcaagcacatcaagctggaagaggaacggagaagcgaggacgcccagagcaaggccgccctgaccgactggctgcgggctaaggccagcttcgtgatcgagggcctgaaggaggccgacaaggacgagttctgcagatgcgagctgaagctgcagaagtggtacggggacctgcggggaaagcccttcgccatcgaagccgagaacagcatcctggacatcagcggcttcagcaagcagtacaactgtgccttcatctggcagaaggacggcgtgaagaagctgaacctgtacctgatcatcaactacttcaagggcggcaagctgcggttcaagaagatcaaacctgaagccttcgaagccaacagattctacaccgtgatcaacaaaaagagcggcgagatcgtgcccatggaggtgaacttcaacttcgacgaccccaacctgatcatcctgcctctggcctttggcaagagacagggcagagaattcatctggaacgacctgctgtccctggaaaccggcagcctgaagctggccaacggaagagtgatcgagaagacactgtacaacagaagaacccggcaggatgagcctgccctgttcgtggccctgaccttcgagcggcgggaggtcctggactcctccaatatcaaaccaatgaacctgatcggcgtggcaagaggcgaaaacatccccgccgtgatcgccctgaccgaccccgagggctgcccactgagccggtttaaggatagcctgggaaacccaacccacatcctgagaatcggcgagagctataaggagaagcagcggaccatccaggccaagaaggaggtggagcagcggagagccggcggctacagccggaagtacgccagcaaagccaagaatctggcagacgatatggtgagaaacaccgctagagatctgctgtactacgccgtgacccaggatgccatgctgatcttcgccaacctgagccggggcttcggccggcagggcaagcggaccttcatggccgagagacagtacacacggatggaggactggctgaccgccaagctggcctacgagggcctgagcaagacctacctgtccaagacactggcccagtacacctccaagacatgcagcaactgtgggtttaccatcaccagcgccgactacgacagggtgctggagaagctgaagaagacagcaacaggctggatgaccacaattaacggcaaggagctgaaggtggagggccagattacctactacaacagatacaagagacagaacgtagtcaaggacctgtccgtcgagctggatagactgagcgaagaatctgtgaacaacgacatctcctcctggacaaagggcagaagcggagaagctctgagcctcctgaagaaaagattctcccatagacccgtgcaggagaagttcgtgtgcctgaactgcggcttcgagacacacgcagccgagcaagccgccctgaacatcgccagatcctggctgttcctgcggagccaggagtacaagaaataccagacaaacaagacaaccggcaacaccgataagagagccttcgtcgagacctggcagtccttttaccggaagaagcttaaggaggtgtggaaacctgccgtgcggtctggcggatctggcggaggctcctgcccaggtggccttcgaggacgtggccgtgtacttcaccgaggagcagtgggccctgctggaccacagccagagggccctgtacagggacgtgatgcaggagaactacgagaccgtggccagcctgggcctgcccatccccggccccgacagcatcagcaggctgcagcagagggaggagagcaggatcgaggcccagcccgtgctggagggcaacgacgtgagcagcgacgacgacctgggcggatctggctccggcagcggccccaagaaaaagagaaaagtctaagctgccttctgcggggcttgccttctggccatgcccttcttctctcccttgcacctgtacctcttggtctttgaataaagcctgagtaggaaggctagcaaaaaaaaaaaaaaaaaaaaaaaaaaaaaaaaaaaaaaaaaaaaaaaaaaaaaaaaaaaaaaaaaaaaaaaaaaaaaaaa

SEQ ID NO: 16028 - RNA, 9485 nt, synthetic construct
  source 1..9485: mol_type = other RNA
aggaaataagagagaaaagaagagtaagaagaaatataagagccaccatggcccctaagaagaagcgtaaagtgagccggatggaacgcctcgtctacgaggtgcggcagaagtgcagaaacatcgaggacatctgcatctcctgcggatctctgaacgtgaccctggagcacccactgttcatcggcggcatgtgccagaactgtaaaaactgttttctggagtgtgcctatcaatacgacgatgacggctaccagagctactgcaccatctgttgcggcggaagagaggtgctgatgtgtggaaataacaactgctgccggtgcttctgcgtggaatgcgtggacctgctggtgggccccggcgccgcccaggccgctattaaggaagatccttggaactgctacatgtgcggccacaagggcacatacggcctgctgagacggagagaggactggcctagcagactgcagatgttcttcgccaataaccacgaccaggagttcgacccccctaaggtgtaccctcccgtccccgccgagaagagaaagcccatccgggtcctgagcctgttcgatggcatcgccaccggtctgctggtgctgaaggacctgggcatccaggtggataggtacattgcctccgaggtgtgcgaggactccatcaccgtgggaatggtgcgtcatcagggcaagatcatgtacgtgggcgacgtgcggagcgtgacacagaagcatatccaggagtggggccctttcgacctggtgatcggcggcagcccttgcaatgacctgagcatcgtgaacccagcccggaagggcctgtacgagggaaccggcagactgttcttcgagttttacagactgctgcacgacgcccggcctaaggaaggcgacgaccggcccttcttttggctgttcgagaatgtggtggccatgggagtcagcgacaagcgggatattagccggttcctggagagcaaccccgtgatgatcgatgccaaggaagtgagcgccgcccaccgggccagatacttctggggcaatctgcctggcatgaacagacccctggccagcaccgtgaacgacaagctggagctgcaggagtgcctggagcacggccggatcgccaagttcagcaaggtgagaaccatcaccacccgaagcaacagcatcaaacaaggcaaggaccagcactttcctgtgttcatgaacgagaaggaggacatcctgtggtgtaccgagatggagagagtgttcgggttcccagtccactacacagatgtcagcaacatgtctagactggccagacagagactgctgggaagaagctggtccgtccctgtgatcagacacctgttcgcccctctgaaggagtacttcgcctgcgtgagcagcggcaacagcaacgccaacagccggggccccagcttctctagcggcctggtgccactgtccctgagagggagccacatgggccccatggagatctacaaaaccgtgagcgcctggaagcggcagcctgtgcgcgtgctgagcctgtttcggaatatcgataaagtcctgaaaagcctgggattcctggagagcggctctggctccggcggtggcaccctgaagtacgtggaggatgtgacaaacgtggtcagacgggatgtggagaagtggggccccttcgatctggtgtacggcagcacccaacccctgggcagctcttgtgaccggtgccctggctggtacatgtttcagttccaccggatcctgcagtacgccctgccgagacaggagtcccagcggccattcttttggattttcatggacaacttgctgctgaccgaggatgaccaggaaactaccactcggttcctgcagaccgaagccgtgaccctgcaggacgtgagaggccgggactaccagaacgccatgcgggtgtggtccaacatccctggactgaaaagcaagcacgcacctctgacccctaaagaagaggagtacctgcaggcccaggtgcggagcagaagcaagctggacgcccctaaggtggatctgctggtgaagaattgcctcctgcccctgagagagtacttcaagtatttcagccagaatagtctgcccctgggaggcagcggcggcggcgccctggtgacatttgaggacgtcgccgtgcggttcacccaggaggaatgggctctgctggatccttctcagaaaatcctgtaccgggacgtgatgagagagacataccggaatctgacctccgtgggcatcaactgggaatgttgggaccttgaagcctgcttcagaagcctgggaagaaacctgagagtgcaggtggtgaagagaaagtgcgagctgaccaacagcggcccctgcgccgagggcggcccaagcagcggcgcccctcctcccagcggcggcagcccagccggctccccaacctctaccgaggagggcacctctgagtccgccacccccgagagcggccctggcacctccaccgagcccagcgagggcagcgcacccggcagccctgccggcagccccacctccacagaggagggaaccagcaccgagcccagcgaaggcagcgccccaggcaccagcaccgagcctagtgagcaggagattaaacggatcaacaagatcagaagaagacttgtgaaagacagcaacaccaagaaggccggcaagacaggccccatgaaaaccctgctggttagagtgatgacacccgatctgagagagcggctggaaaacctgagaaagaagcctgaaaatatcccccagcccatcagcaatacatctagagccaacctgaataagctgctgaccgattacaccgaaatgaagaaggcgatcctgcatgtgtactgggaagagttccagaaggaccctgtgggcctgatgagccgggtggcccagcctgccagcaagaagatcgatcagaacaagctgaaacctgagatggacgagaagggcaacctgaccaccgccggctttgcctgctctcagtgtggccagcccctgttcgtgtacaagctggagcaggtgtctgagaagggcaaggcttacaccaactacttcggacggtgcaatgtggccgagcacgaaaagctgatcctgctggcccagctgaagcccgagaaggatagcgacgaagccgtgacatatagcctgggaaagtttgggcagagggccctggatttctacagcattcatgtgaccaaggagtccacccaccccgtgaagcccctggcccagatcgccggaaacagatacgcctccggacctgtgggaaaggccctgagcgacgcatgtatgggcacaatcgcctccttcctgtctaagtaccaggacatcatcatcgaacaccagaaggtggtgaagggcaaccagaagagactggagagcctgcgggagctggccggcaaggaaaacctggaataccctagcgtgaccctgccacctcagcctcacaccaaggagggcgttgatgcctacaacgaagtgatcgcccgggtgcgaatgtgggtgaacctgaacctgtggcagaagctgaagctaagcagagatgatgccaagcctctgctgagactgaagggattcccttcctttcctctggtcgagagacaggccaacgaagtggactggtgggacatggtgtgtaacgtgaagaagctgatcaacgagaaaaaggaggatggcaaggtgttttggcagaatctggctggctacaagagacaggaagccctgagaccatacctgagcagcgaggaagatcggaagaagggaaagaaattcgctcggtaccagctgggcgacctgctgctgcacctggaaaagaagcacggcgaggactggggaaaggtgtacgacgaggcctgggagcggattgacaagaaagtggaaggcctgagcaagcacatcaagctggaagaggaacggagaagcgaggacgcccagagcaaggccgccctgaccgactggctgcgggctaaggccagcttcgtgatcgagggcctgaaggaggccgacaaggacgagttctgcagatgcgagctgaagctgcagaagtggtacggggacctgcggggaaagcccttcgccatcgaagccgagaacagcatcctggacatcagcggcttcagcaagcagtacaactgtgccttcatctggcagaaggacggcgtgaagaagctgaacctgtacctgatcatcaactacttcaagggcggcaagctgcggttcaagaagatcaaacctgaagccttcgaagccaacagattctacaccgtgatcaacaaaaagagcggcgagatcgtgcccatggaggtgaacttcaacttcgacgaccccaacctgatcatcctgcctctggcctttggcaagagacagggcagagaattcatctggaacgacctgctgtccctggaaaccggcagcctgaagctggccaacggaagagtgatcgagaagacactgtacaacagaagaacccggcaggatgagcctgccctgttcgtggccctgaccttcgagcggcgggaggtcctggactcctccaatatcaaaccaatgaacctgatcggcgtggcaagaggcgaaaacatccccgccgtgatcgccctgaccgaccccgagggctgcccactgagccggtttaaggatagcctgggaaacccaacccacatcctgagaatcggcgagagctataaggagaagcagcggaccatccaggccaagaaggaggtggagcagcggagagccggcggctacagccggaagtacgccagcaaagccaagaatctggcagacgatatggtgagaaacaccgctagagatctgctgtactacgccgtgacccaggatgccatgctgatcttcgccaacctgagccggggcttcggccggcagggcaagcggaccttcatggccgagagacagtacacacggatggaggactggctgaccgccaagctggcctacgagggcctgagcaagacctacctgtccaagacactggcccagtacacctccaagacatgcagcaactgtgggtttaccatcaccagcgccgactacgacagggtgctggagaagctgaagaagacagcaacaggctggatgaccacaattaacggcaaggagctgaaggtggagggccagattacctactacaacagatacaagagacagaacgtagtcaaggacctgtccgtcgagctggatagactgagcgaagaatctgtgaacaacgacatctcctcctggacaaagggcagaagcggagaagctctgagcctcctgaagaaaagattctcccatagacccgtgcaggagaagttcgtgtgcctgaactgcggcttcgagacacacgcagccgagcaagccgccctgaacatcgccagatcctggctgttcctgcggagccaggagtacaagaaataccagacaaacaagacaaccggcaacaccgataagagagccttcgtcgagacctggcagtccttttaccggaagaagcttaaggaggtgtggaaacctgccgtgcggtctggcggatctggcggaggctccttcaggggccccgtgaccttcaaggacatcaccgtggagttcacccaggaggagtggcagctgctggacaacgcccagaggaccctgtacagggaggtgatgcaggagaactaccaccacctgatcagcgtgggctactgcgtgaacaagcccaacgccgtgttcaagctgaagcagggcaaggagccctggatcctggaggtggagttccccaggaggaacaaccccgaggacctgtggaacggcggcccaagcagcggcgcccctcctcccagcggcggcagcccagccggctccccaacctctaccgaggagggcacctctgagtccgccacccccgagagcggccctggcacctccaccgagcccagcgagggcagcgcacccggcagccctgccggcagccccacctccacagaggagggaaccagcaccgagcccagcgaaggcagcgccccaggcaccagcaccgagcctagtgagcaggagattaaacggatcaacaagatcagaagaagacttgtgaaagacagcaacaccaagaaggccggcaagacaggccccatgaaaaccctgctggttagagtgatgacacccgatctgagagagcggctggaaaacctgagaaagaagcctgaaaatatcccccagcccatcagcaatacatctagagccaacctgaataagctgctgaccgattacaccgaaatgaagaaggcgatcctgcatgtgtactgggaagagttccagaaggaccctgtgggcctgatgagccgggtggcccagcctgccagcaagaagatcgatcagaacaagctgaaacctgagatggacgagaagggcaacctgaccaccgccggctttgcctgctctcagtgtggccagcccctgttcgtgtacaagctggagcaggtgtctgagaagggcaaggcttacaccaactacttcggacggtgcaatgtggccgagcacgaaaagctgatcctgctggcccagctgaagcccgagaaggatagcgacgaagccgtgacatatagcctgggaaagtttgggcagagggccctggatttctacagcattcatgtgaccaaggagtccacccaccccgtgaagcccctggcccagatcgccggaaacagatacgcctccggacctgtgggaaaggccctgagcgacgcatgtatgggcacaatcgcctccttcctgtctaagtaccaggacatcatcatcgaacaccagaaggtggtgaagggcaaccagaagagactggagagcctgcgggagctggccggcaaggaaaacctggaataccctagcgtgaccctgccacctcagcctcacaccaaggagggcgttgatgcctacaacgaagtgatcgcccgggtgcgaatgtgggtgaacctgaacctgtggcagaagctgaagctaagcagagatgatgccaagcctctgctgagactgaagggattcccttcctttcctctggtcgagagacaggccaacgaagtggactggtgggacatggtgtgtaacgtgaagaagctgatcaacgagaaaaaggaggatggcaaggtgttttggcagaatctggctggctacaagagacaggaagccctgagaccatacctgagcagcgaggaagatcggaagaagggaaagaaattcgctcggtaccagctgggcgacctgctgctgcacctggaaaagaagcacggcgaggactggggaaaggtgtacgacgaggcctgggagcggattgacaagaaagtggaaggcctgagcaagcacatcaagctggaagaggaacggagaagcgaggacgcccagagcaaggccgccctgaccgactggctgcgggctaaggccagcttcgtgatcgagggcctgaaggaggccgacaaggacgagttctgcagatgcgagctgaagctgcagaagtggtacggggacctgcggggaaagcccttcgccatcgaagccgagaacagcatcctggacatcagcggcttcagcaagcagtacaactgtgccttcatctggcagaaggacggcgtgaagaagctgaacctgtacctgatcatcaactacttcaagggcggcaagctgcggttcaagaagatcaaacctgaagccttcgaagccaacagattctacaccgtgatcaacaaaaagagcggcgagatcgtgcccatggaggtgaacttcaacttcgacgaccccaacctgatcatcctgcctctggcctttggcaagagacagggcagagaattcatctggaacgacctgctgtccctggaaaccggcagcctgaagctggccaacggaagagtgatcgagaagacactgtacaacagaagaacccggcaggatgagcctgccctgttcgtggccctgaccttcgagcggcgggaggtcctggactcctccaatatcaaaccaatgaacctgatcggcgtggcaagaggcgaaaacatccccgccgtgatcgccctgaccgaccccgagggctgcccactgagccggtttaaggatagcctgggaaacccaacccacatcctgagaatcggcgagagctataaggagaagcagcggaccatccaggccaagaaggaggtggagcagcggagagccggcggctacagccggaagtacgccagcaaagccaagaatctggcagacgatatggtgagaaacaccgctagagatctgctgtactacgccgtgacccaggatgccatgctgatcttcgccaacctgagccggggcttcggccggcagggcaagcggaccttcatggccgagagacagtacacacggatggaggactggctgaccgccaagctggcctacgagggcctgagcaagacctacctgtccaagacactggcccagtacacctccaagacatgcagcaactgtgggtttaccatcaccagcgccgactacgacagggtgctggagaagctgaagaagacagcaacaggctggatgaccacaattaacggcaaggagctgaaggtggagggccagattacctactacaacagatacaagagacagaacgtagtcaaggacctgtccgtcgagctggatagactgagcgaagaatctgtgaacaacgacatctcctcctggacaaagggcagaagcggagaagctctgagcctcctgaagaaaagattctcccatagacccgtgcaggagaagttcgtgtgcctgaactgcggcttcgagacacacgcagccgagcaagccgccctgaacatcgccagatcctggctgttcctgcggagccaggagtacaagaaataccagacaaacaagacaaccggcaacaccgataagagagccttcgtcgagacctggcagtccttttaccggaagaagcttaaggaggtgtggaaacctgccgtgcggtctggcggatctggcggaggctcctttcaggggccccgtgaccttcaaggacatcaccgtggagttcacccaggaggagtggcagctgctggacaacgcccagaggaccctgtacagggaggtgatgcaggagaactaccaccacctgatcagcgtgggctactgcgtgaacaagcccaacgccgtgttcaagctgaagcagggcaaggagccctggatcctggaggtggagttccccaggaggaacaaccccgaggacctgtggaacggatctggctccggcagcggccccaagaaaaagagaaaagtctaagctgccttctgcggggcttgccttctggccatgcccttcttctctcccttgcacctgtacctcttggtctttgaataaagcctgagtaggaaggctagcaaaaaaaaaaaaaaaaaaaaaaaaaaaaaaaaaaaaaaaaaaaaaaaaaaaaaaaaaaaaaaaaaaaaaaaaaaaaaaaa

SEQ ID NO: 16029 - RNA, 9557 nt, synthetic construct
  source 1..9557: mol_type = other RNA
aggaaataagagagaaaagaagagtaagaagaaatataagagccaccatggcccctaagaagaagcgtaaagtgagccggatggaacgcctcgtctacgaggtgcggcagaagtgcagaaacatcgaggacatctgcatctcctgcggatctctgaacgtgaccctggagcacccactgttcatcggcggcatgtgccagaactgtaaaaactgttttctggagtgtgcctatcaatacgacgatgacggctaccagagctactgcaccatctgttgcggcggaagagaggtgctgatgtgtggaaataacaactgctgccggtgcttctgcgtggaatgcgtggacctgctggtgggccccggcgccgcccaggccgctattaaggaagatccttggaactgctacatgtgcggccacaagggcacatacggcctgctgagacggagagaggactggcctagcagactgcagatgttcttcgccaataaccacgaccaggagttcgacccccctaaggtgtaccctcccgtccccgccgagaagagaaagcccatccgggtcctgagcctgttcgatggcatcgccaccggtctgctggtgctgaaggacctgggcatccaggtggataggtacattgcctccgaggtgtgcgaggactccatcaccgtgggaatggtgcgtcatcagggcaagatcatgtacgtgggcgacgtgcggagcgtgacacagaagcatatccaggagtggggccctttcgacctggtgatcggcggcagcccttgcaatgacctgagcatcgtgaacccagcccggaagggcctgtacgagggaaccggcagactgttcttcgagttttacagactgctgcacgacgcccggcctaaggaaggcgacgaccggcccttcttttggctgttcgagaatgtggtggccatgggagtcagcgacaagcgggatattagccggttcctggagagcaaccccgtgatgatcgatgccaaggaagtgagcgccgcccaccgggccagatacttctggggcaatctgcctggcatgaacagacccctggccagcaccgtgaacgacaagctggagctgcaggagtgcctggagcacggccggatcgccaagttcagcaaggtgagaaccatcaccacccgaagcaacagcatcaaacaaggcaaggaccagcactttcctgtgttcatgaacgagaaggaggacatcctgtggtgtaccgagatggagagagtgttcgggttcccagtccactacacagatgtcagcaacatgtctagactggccagacagagactgctgggaagaagctggtccgtccctgtgatcagacacctgttcgcccctctgaaggagtacttcgcctgcgtgagcagcggcaacagcaacgccaacagccggggccccagcttctctagcggcctggtgccactgtccctgagagggagccacatgggccccatggagatctacaaaaccgtgagcgcctggaagcggcagcctgtgcgcgtgctgagcctgtttcggaatatcgataaagtcctgaaaagcctgggattcctggagagcggctctggctccggcggtggcaccctgaagtacgtggaggatgtgacaaacgtggtcagacgggatgtggagaagtggggccccttcgatctggtgtacggcagcacccaacccctgggcagctcttgtgaccggtgccctggctggtacatgtttcagttccaccggatcctgcagtacgccctgccgagacaggagtcccagcggccattcttttggattttcatggacaacttgctgctgaccgaggatgaccaggaaactaccactcggttcctgcagaccgaagccgtgaccctgcaggacgtgagaggccgggactaccagaacgccatgcgggtgtggtccaacatccctggactgaaaagcaagcacgcacctctgacccctaaagaagaggagtacctgcaggcccaggtgcggagcagaagcaagctggacgcccctaaggtggatctgctggtgaagaattgcctcctgcccctgagagagtacttcaagtatttcagccagaatagtctgcccctgggaggcagcggcggcggcgccctggtgacatttgaggacgtcgccgtgcggttcacccaggaggaatgggctctgctggatccttctcagaaaatcctgtaccgggacgtgatgagagagacataccggaatctgacctccgtgggcatcaactgggaatgttgggaccttgaagcctgcttcagaagcctgggaagaaacctgagagtgcaggtggtgaagagaaagtgcgagctgaccaacagcggcccctgcgccgagggcggcccaagcagcggcgcccctcctcccagcggcggcagcccagccggctccccaacctctaccgaggagggcacctctgagtccgccacccccgagagcggccctggcacctccaccgagcccagcgagggcagcgcacccggcagccctgccggcagccccacctccacagaggagggaaccagcaccgagcccagcgaaggcagcgccccaggcaccagcaccgagcctagtgagcaggagattaaacggatcaacaagatcagaagaagacttgtgaaagacagcaacaccaagaaggccggcaagacaggccccatgaaaaccctgctggttagagtgatgacacccgatctgagagagcggctggaaaacctgagaaagaagcctgaaaatatcccccagcccatcagcaatacatctagagccaacctgaataagctgctgaccgattacaccgaaatgaagaaggcgatcctgcatgtgtactgggaagagttccagaaggaccctgtgggcctgatgagccgggtggcccagcctgccagcaagaagatcgatcagaacaagctgaaacctgagatggacgagaagggcaacctgaccaccgccggctttgcctgctctcagtgtggccagcccctgttcgtgtacaagctggagcaggtgtctgagaagggcaaggcttacaccaactacttcggacggtgcaatgtggccgagcacgaaaagctgatcctgctggcccagctgaagcccgagaaggatagcgacgaagccgtgacatatagcctgggaaagtttgggcagagggccctggatttctacagcattcatgtgaccaaggagtccacccaccccgtgaagcccctggcccagatcgccggaaacagatacgcctccggacctgtgggaaaggccctgagcgacgcatgtatgggcacaatcgcctccttcctgtctaagtaccaggacatcatcatcgaacaccagaaggtggtgaagggcaaccagaagagactggagagcctgcgggagctggccggcaaggaaaacctggaataccctagcgtgaccctgccacctcagcctcacaccaaggagggcgttgatgcctacaacgaagtgatcgcccgggtgcgaatgtgggtgaacctgaacctgtggcagaagctgaagctaagcagagatgatgccaagcctctgctgagactgaagggattcccttcctttcctctggtcgagagacaggccaacgaagtggactggtgggacatggtgtgtaacgtgaagaagctgatcaacgagaaaaaggaggatggcaaggtgttttggcagaatctggctggctacaagagacaggaagccctgagaccatacctgagcagcgaggaagatcggaagaagggaaagaaattcgctcggtaccagctgggcgacctgctgctgcacctggaaaagaagcacggcgaggactggggaaaggtgtacgacgaggcctgggagcggattgacaagaaagtggaaggcctgagcaagcacatcaagctggaagaggaacggagaagcgaggacgcccagagcaaggccgccctgaccgactggctgcgggctaaggccagcttcgtgatcgagggcctgaaggaggccgacaaggacgagttctgcagatgcgagctgaagctgcagaagtggtacggggacctgcggggaaagcccttcgccatcgaagccgagaacagcatcctggacatcagcggcttcagcaagcagtacaactgtgccttcatctggcagaaggacggcgtgaagaagctgaacctgtacctgatcatcaactacttcaagggcggcaagctgcggttcaagaagatcaaacctgaagccttcgaagccaacagattctacaccgtgatcaacaaaaagagcggcgagatcgtgcccatggaggtgaacttcaacttcgacgaccccaacctgatcatcctgcctctggcctttggcaagagacagggcagagaattcatctggaacgacctgctgtccctggaaaccggcagcctgaagctggccaacggaagagtgatcgagaagacactgtacaacagaagaacccggcaggatgagcctgccctgttcgtggccctgaccttcgagcggcgggaggtcctggactcctccaatatcaaaccaatgaacctgatcggcgtggcaagaggcgaaaacatccccgccgtgatcgccctgaccgaccccgagggctgcccactgagccggtttaaggatagcctgggaaacccaacccacatcctgagaatcggcgagagctataaggagaagcagcggaccatccaggccaagaaggaggtggagcagcggagagccggcggctacagccggaagtacgccagcaaagccaagaatctggcagacgatatggtgagaaacaccgctagagatctgctgtactacgccgtgacccaggatgccatgctgatcttcgccaacctgagccggggcttcggccggcagggcaagcggaccttcatggccgagagacagtacacacggatggaggactggctgaccgccaagctggcctacgagggcctgagcaagacctacctgtccaagacactggcccagtacacctccaagacatgcagcaactgtgggtttaccatcaccagcgccgactacgacagggtgctggagaagctgaagaagacagcaacaggctggatgaccacaattaacggcaaggagctgaaggtggagggccagattacctactacaacagatacaagagacagaacgtagtcaaggacctgtccgtcgagctggatagactgagcgaagaatctgtgaacaacgacatctcctcctggacaaagggcagaagcggagaagctctgagcctcctgaagaaaagattctcccatagacccgtgcaggagaagttcgtgtgcctgaactgcggcttcgagacacacgcagccgagcaagccgccctgaacatcgccagatcctggctgttcctgcggagccaggagtacaagaaataccagacaaacaagacaaccggcaacaccgataagagagccttcgtcgagacctggcagtccttttaccggaagaagcttaaggaggtgtggaaacctgccgtgcggtctggcggatctggcggaggctccttcagggaggtgagcgtgtacttcagcgaggaggagtggagctggctggaccccgaccagaaggccctgtactgggaggtgatgctggagaaccacaggaacatggccagcctgggcgacgacggccaggagaacaaggacagctacgagctgctgcagggcatcaccgccagggacaccatggagaccagcgccatcgagatggaggtggagaggtacaaggagaagcagagcgacgactggaaccaggagagcagcagctgcaccgacgacagcgtgggcggcccaagcagcggcgcccctcctcccagcggcggcagcccagccggctccccaacctctaccgaggagggcacctctgagtccgccacccccgagagcggccctggcacctccaccgagcccagcgagggcagcgcacccggcagccctgccggcagccccacctccacagaggagggaaccagcaccgagcccagcgaaggcagcgccccaggcaccagcaccgagcctagtgagcaggagattaaacggatcaacaagatcagaagaagacttgtgaaagacagcaacaccaagaaggccggcaagacaggccccatgaaaaccctgctggttagagtgatgacacccgatctgagagagcggctggaaaacctgagaaagaagcctgaaaatatcccccagcccatcagcaatacatctagagccaacctgaataagctgctgaccgattacaccgaaatgaagaaggcgatcctgcatgtgtactgggaagagttccagaaggaccctgtgggcctgatgagccgggtggcccagcctgccagcaagaagatcgatcagaacaagctgaaacctgagatggacgagaagggcaacctgaccaccgccggctttgcctgctctcagtgtggccagcccctgttcgtgtacaagctggagcaggtgtctgagaagggcaaggcttacaccaactacttcggacggtgcaatgtggccgagcacgaaaagctgatcctgctggcccagctgaagcccgagaaggatagcgacgaagccgtgacatatagcctgggaaagtttgggcagagggccctggatttctacagcattcatgtgaccaaggagtccacccaccccgtgaagcccctggcccagatcgccggaaacagatacgcctccggacctgtgggaaaggccctgagcgacgcatgtatgggcacaatcgcctccttcctgtctaagtaccaggacatcatcatcgaacaccagaaggtggtgaagggcaaccagaagagactggagagcctgcgggagctggccggcaaggaaaacctggaataccctagcgtgaccctgccacctcagcctcacaccaaggagggcgttgatgcctacaacgaagtgatcgcccgggtgcgaatgtgggtgaacctgaacctgtggcagaagctgaagctaagcagagatgatgccaagcctctgctgagactgaagggattcccttcctttcctctggtcgagagacaggccaacgaagtggactggtgggacatggtgtgtaacgtgaagaagctgatcaacgagaaaaaggaggatggcaaggtgttttggcagaatctggctggctacaagagacaggaagccctgagaccatacctgagcagcgaggaagatcggaagaagggaaagaaattcgctcggtaccagctgggcgacctgctgctgcacctggaaaagaagcacggcgaggactggggaaaggtgtacgacgaggcctgggagcggattgacaagaaagtggaaggcctgagcaagcacatcaagctggaagaggaacggagaagcgaggacgcccagagcaaggccgccctgaccgactggctgcgggctaaggccagcttcgtgatcgagggcctgaaggaggccgacaaggacgagttctgcagatgcgagctgaagctgcagaagtggtacggggacctgcggggaaagcccttcgccatcgaagccgagaacagcatcctggacatcagcggcttcagcaagcagtacaactgtgccttcatctggcagaaggacggcgtgaagaagctgaacctgtacctgatcatcaactacttcaagggcggcaagctgcggttcaagaagatcaaacctgaagccttcgaagccaacagattctacaccgtgatcaacaaaaagagcggcgagatcgtgcccatggaggtgaacttcaacttcgacgaccccaacctgatcatcctgcctctggcctttggcaagagacagggcagagaattcatctggaacgacctgctgtccctggaaaccggcagcctgaagctggccaacggaagagtgatcgagaagacactgtacaacagaagaacccggcaggatgagcctgccctgttcgtggccctgaccttcgagcggcgggaggtcctggactcctccaatatcaaaccaatgaacctgatcggcgtggcaagaggcgaaaacatccccgccgtgatcgccctgaccgaccccgagggctgcccactgagccggtttaaggatagcctgggaaacccaacccacatcctgagaatcggcgagagctataaggagaagcagcggaccatccaggccaagaaggaggtggagcagcggagagccggcggctacagccggaagtacgccagcaaagccaagaatctggcagacgatatggtgagaaacaccgctagagatctgctgtactacgccgtgacccaggatgccatgctgatcttcgccaacctgagccggggcttcggccggcagggcaagcggaccttcatggccgagagacagtacacacggatggaggactggctgaccgccaagctggcctacgagggcctgagcaagacctacctgtccaagacactggcccagtacacctccaagacatgcagcaactgtgggtttaccatcaccagcgccgactacgacagggtgctggagaagctgaagaagacagcaacaggctggatgaccacaattaacggcaaggagctgaaggtggagggccagattacctactacaacagatacaagagacagaacgtagtcaaggacctgtccgtcgagctggatagactgagcgaagaatctgtgaacaacgacatctcctcctggacaaagggcagaagcggagaagctctgagcctcctgaagaaaagattctcccatagacccgtgcaggagaagttcgtgtgcctgaactgcggcttcgagacacacgcagccgagcaagccgccctgaacatcgccagatcctggctgttcctgcggagccaggagtacaagaaataccagacaaacaagacaaccggcaacaccgataagagagccttcgtcgagacctggcagtccttttaccggaagaagcttaaggaggtgtggaaacctgccgtgcggtctggcggatctggcggaggctcctttcagggaggtgagcgtgtacttcagcgaggaggagtggagctggctggaccccgaccagaaggccctgtactgggaggtgatgctggagaaccacaggaacatggccagcctgggcgacgacggccaggagaacaaggacagctacgagctgctgcagggcatcaccgccagggacaccatggagaccagcgccatcgagatggaggtggagaggtacaaggagaagcagagcgacgactggaaccaggagagcagcagctgcaccgacgacagcgtgggatctggctccggcagcggccccaagaaaaagagaaaagtctaagctgccttctgcggggcttgccttctggccatgcccttcttctctcccttgcacctgtacctcttggtctttgaataaagcctgagtaggaaggctagcaaaaaaaaaaaaaaaaaaaaaaaaaaaaaaaaaaaaaaaaaaaaaaaaaaaaaaaaaaaaaaaaaaaaaaaaaaaaaaaa

SEQ ID NO: 16030 - RNA, 9485 nt, synthetic construct
  source 1..9485: mol_type = other RNA
aggaaataagagagaaaagaagagtaagaagaaatataagagccaccatggcccctaagaagaagcgtaaagtgagccggatggaacgcctcgtctacgaggtgcggcagaagtgcagaaacatcgaggacatctgcatctcctgcggatctctgaacgtgaccctggagcacccactgttcatcggcggcatgtgccagaactgtaaaaactgttttctggagtgtgcctatcaatacgacgatgacggctaccagagctactgcaccatctgttgcggcggaagagaggtgctgatgtgtggaaataacaactgctgccggtgcttctgcgtggaatgcgtggacctgctggtgggccccggcgccgcccaggccgctattaaggaagatccttggaactgctacatgtgcggccacaagggcacatacggcctgctgagacggagagaggactggcctagcagactgcagatgttcttcgccaataaccacgaccaggagttcgacccccctaaggtgtaccctcccgtccccgccgagaagagaaagcccatccgggtcctgagcctgttcgatggcatcgccaccggtctgctggtgctgaaggacctgggcatccaggtggataggtacattgcctccgaggtgtgcgaggactccatcaccgtgggaatggtgcgtcatcagggcaagatcatgtacgtgggcgacgtgcggagcgtgacacagaagcatatccaggagtggggccctttcgacctggtgatcggcggcagcccttgcaatgacctgagcatcgtgaacccagcccggaagggcctgtacgagggaaccggcagactgttcttcgagttttacagactgctgcacgacgcccggcctaaggaaggcgacgaccggcccttcttttggctgttcgagaatgtggtggccatgggagtcagcgacaagcgggatattagccggttcctggagagcaaccccgtgatgatcgatgccaaggaagtgagcgccgcccaccgggccagatacttctggggcaatctgcctggcatgaacagacccctggccagcaccgtgaacgacaagctggagctgcaggagtgcctggagcacggccggatcgccaagttcagcaaggtgagaaccatcaccacccgaagcaacagcatcaaacaaggcaaggaccagcactttcctgtgttcatgaacgagaaggaggacatcctgtggtgtaccgagatggagagagtgttcgggttcccagtccactacacagatgtcagcaacatgtctagactggccagacagagactgctgggaagaagctggtccgtccctgtgatcagacacctgttcgcccctctgaaggagtacttcgcctgcgtgagcagcggcaacagcaacgccaacagccggggccccagcttctctagcggcctggtgccactgtccctgagagggagccacatgggccccatggagatctacaaaaccgtgagcgcctggaagcggcagcctgtgcgcgtgctgagcctgtttcggaatatcgataaagtcctgaaaagcctgggattcctggagagcggctctggctccggcggtggcaccctgaagtacgtggaggatgtgacaaacgtggtcagacgggatgtggagaagtggggccccttcgatctggtgtacggcagcacccaacccctgggcagctcttgtgaccggtgccctggctggtacatgtttcagttccaccggatcctgcagtacgccctgccgagacaggagtcccagcggccattcttttggattttcatggacaacttgctgctgaccgaggatgaccaggaaactaccactcggttcctgcagaccgaagccgtgaccctgcaggacgtgagaggccgggactaccagaacgccatgcgggtgtggtccaacatccctggactgaaaagcaagcacgcacctctgacccctaaagaagaggagtacctgcaggcccaggtgcggagcagaagcaagctggacgcccctaaggtggatctgctggtgaagaattgcctcctgcccctgagagagtacttcaagtatttcagccagaatagtctgcccctgggaggcagcggcggcggcgccctggtgacatttgaggacgtcgccgtgcggttcacccaggaggaatgggctctgctggatccttctcagaaaatcctgtaccgggacgtgatgagagagacataccggaatctgacctccgtgggcatcaactgggaatgttgggaccttgaagcctgcttcagaagcctgggaagaaacctgagagtgcaggtggtgaagagaaagtgcgagctgaccaacagcggcccctgcgccgagggcggcccaagcagcggcgcccctcctcccagcggcggcagcccagccggctccccaacctctaccgaggagggcacctctgagtccgccacccccgagagcggccctggcacctccaccgagcccagcgagggcagcgcacccggcagccctgccggcagccccacctccacagaggagggaaccagcaccgagcccagcgaaggcagcgccccaggcaccagcaccgagcctagtgagcaggagattaaacggatcaacaagatcagaagaagacttgtgaaagacagcaacaccaagaaggccggcaagacaggccccatgaaaaccctgctggttagagtgatgacacccgatctgagagagcggctggaaaacctgagaaagaagcctgaaaatatcccccagcccatcagcaatacatctagagccaacctgaataagctgctgaccgattacaccgaaatgaagaaggcgatcctgcatgtgtactgggaagagttccagaaggaccctgtgggcctgatgagccgggtggcccagcctgccagcaagaagatcgatcagaacaagctgaaacctgagatggacgagaagggcaacctgaccaccgccggctttgcctgctctcagtgtggccagcccctgttcgtgtacaagctggagcaggtgtctgagaagggcaaggcttacaccaactacttcggacggtgcaatgtggccgagcacgaaaagctgatcctgctggcccagctgaagcccgagaaggatagcgacgaagccgtgacatatagcctgggaaagtttgggcagagggccctggatttctacagcattcatgtgaccaaggagtccacccaccccgtgaagcccctggcccagatcgccggaaacagatacgcctccggacctgtgggaaaggccctgagcgacgcatgtatgggcacaatcgcctccttcctgtctaagtaccaggacatcatcatcgaacaccagaaggtggtgaagggcaaccagaagagactggagagcctgcgggagctggccggcaaggaaaacctggaataccctagcgtgaccctgccacctcagcctcacaccaaggagggcgttgatgcctacaacgaagtgatcgcccgggtgcgaatgtgggtgaacctgaacctgtggcagaagctgaagctaagcagagatgatgccaagcctctgctgagactgaagggattcccttcctttcctctggtcgagagacaggccaacgaagtggactggtgggacatggtgtgtaacgtgaagaagctgatcaacgagaaaaaggaggatggcaaggtgttttggcagaatctggctggctacaagagacaggaagccctgagaccatacctgagcagcgaggaagatcggaagaagggaaagaaattcgctcggtaccagctgggcgacctgctgctgcacctggaaaagaagcacggcgaggactggggaaaggtgtacgacgaggcctgggagcggattgacaagaaagtggaaggcctgagcaagcacatcaagctggaagaggaacggagaagcgaggacgcccagagcaaggccgccctgaccgactggctgcgggctaaggccagcttcgtgatcgagggcctgaaggaggccgacaaggacgagttctgcagatgcgagctgaagctgcagaagtggtacggggacctgcggggaaagcccttcgccatcgaagccgagaacagcatcctggacatcagcggcttcagcaagcagtacaactgtgccttcatctggcagaaggacggcgtgaagaagctgaacctgtacctgatcatcaactacttcaagggcggcaagctgcggttcaagaagatcaaacctgaagccttcgaagccaacagattctacaccgtgatcaacaaaaagagcggcgagatcgtgcccatggaggtgaacttcaacttcgacgaccccaacctgatcatcctgcctctggcctttggcaagagacagggcagagaattcatctggaacgacctgctgtccctggaaaccggcagcctgaagctggccaacggaagagtgatcgagaagacactgtacaacagaagaacccggcaggatgagcctgccctgttcgtggccctgaccttcgagcggcgggaggtcctggactcctccaatatcaaaccaatgaacctgatcggcgtggcaagaggcgaaaacatccccgccgtgatcgccctgaccgaccccgagggctgcccactgagccggtttaaggatagcctgggaaacccaacccacatcctgagaatcggcgagagctataaggagaagcagcggaccatccaggccaagaaggaggtggagcagcggagagccggcggctacagccggaagtacgccagcaaagccaagaatctggcagacgatatggtgagaaacaccgctagagatctgctgtactacgccgtgacccaggatgccatgctgatcttcgccaacctgagccggggcttcggccggcagggcaagcggaccttcatggccgagagacagtacacacggatggaggactggctgaccgccaagctggcctacgagggcctgagcaagacctacctgtccaagacactggcccagtacacctccaagacatgcagcaactgtgggtttaccatcaccagcgccgactacgacagggtgctggagaagctgaagaagacagcaacaggctggatgaccacaattaacggcaaggagctgaaggtggagggccagattacctactacaacagatacaagagacagaacgtagtcaaggacctgtccgtcgagctggatagactgagcgaagaatctgtgaacaacgacatctcctcctggacaaagggcagaagcggagaagctctgagcctcctgaagaaaagattctcccatagacccgtgcaggagaagttcgtgtgcctgaactgcggcttcgagacacacgcagccgagcaagccgccctgaacatcgccagatcctggctgttcctgcggagccaggagtacaagaaataccagacaaacaagacaaccggcaacaccgataagagagccttcgtcgagacctggcagtccttttaccggaagaagcttaaggaggtgtggaaacctgccgtgcggtctggcggatctggcggaggctccgacaccgtggtgttcgaggacgtggtggtgggcttcaccctggaggagtgggccctgctgaaccccgcccagaggaacctgtacagggaggtgatgctggagaccttcaagcacctggccagcgtggacaacgaggcccagcccaagaccaacggcagcatcagccagcaggacaccagcggcgagaagctgagcctgaagcagaagatcgagaagttcaccaggaagcacacctgggccagcggcggcccaagcagcggcgcccctcctcccagcggcggcagcccagccggctccccaacctctaccgaggagggcacctctgagtccgccacccccgagagcggccctggcacctccaccgagcccagcgagggcagcgcacccggcagccctgccggcagccccacctccacagaggagggaaccagcaccgagcccagcgaaggcagcgccccaggcaccagcaccgagcctagtgagcaggagattaaacggatcaacaagatcagaagaagacttgtgaaagacagcaacaccaagaaggccggcaagacaggccccatgaaaaccctgctggttagagtgatgacacccgatctgagagagcggctggaaaacctgagaaagaagcctgaaaatatcccccagcccatcagcaatacatctagagccaacctgaataagctgctgaccgattacaccgaaatgaagaaggcgatcctgcatgtgtactgggaagagttccagaaggaccctgtgggcctgatgagccgggtggcccagcctgccagcaagaagatcgatcagaacaagctgaaacctgagatggacgagaagggcaacctgaccaccgccggctttgcctgctctcagtgtggccagcccctgttcgtgtacaagctggagcaggtgtctgagaagggcaaggcttacaccaactacttcggacggtgcaatgtggccgagcacgaaaagctgatcctgctggcccagctgaagcccgagaaggatagcgacgaagccgtgacatatagcctgggaaagtttgggcagagggccctggatttctacagcattcatgtgaccaaggagtccacccaccccgtgaagcccctggcccagatcgccggaaacagatacgcctccggacctgtgggaaaggccctgagcgacgcatgtatgggcacaatcgcctccttcctgtctaagtaccaggacatcatcatcgaacaccagaaggtggtgaagggcaaccagaagagactggagagcctgcgggagctggccggcaaggaaaacctggaataccctagcgtgaccctgccacctcagcctcacaccaaggagggcgttgatgcctacaacgaagtgatcgcccgggtgcgaatgtgggtgaacctgaacctgtggcagaagctgaagctaagcagagatgatgccaagcctctgctgagactgaagggattcccttcctttcctctggtcgagagacaggccaacgaagtggactggtgggacatggtgtgtaacgtgaagaagctgatcaacgagaaaaaggaggatggcaaggtgttttggcagaatctggctggctacaagagacaggaagccctgagaccatacctgagcagcgaggaagatcggaagaagggaaagaaattcgctcggtaccagctgggcgacctgctgctgcacctggaaaagaagcacggcgaggactggggaaaggtgtacgacgaggcctgggagcggattgacaagaaagtggaaggcctgagcaagcacatcaagctggaagaggaacggagaagcgaggacgcccagagcaaggccgccctgaccgactggctgcgggctaaggccagcttcgtgatcgagggcctgaaggaggccgacaaggacgagttctgcagatgcgagctgaagctgcagaagtggtacggggacctgcggggaaagcccttcgccatcgaagccgagaacagcatcctggacatcagcggcttcagcaagcagtacaactgtgccttcatctggcagaaggacggcgtgaagaagctgaacctgtacctgatcatcaactacttcaagggcggcaagctgcggttcaagaagatcaaacctgaagccttcgaagccaacagattctacaccgtgatcaacaaaaagagcggcgagatcgtgcccatggaggtgaacttcaacttcgacgaccccaacctgatcatcctgcctctggcctttggcaagagacagggcagagaattcatctggaacgacctgctgtccctggaaaccggcagcctgaagctggccaacggaagagtgatcgagaagacactgtacaacagaagaacccggcaggatgagcctgccctgttcgtggccctgaccttcgagcggcgggaggtcctggactcctccaatatcaaaccaatgaacctgatcggcgtggcaagaggcgaaaacatccccgccgtgatcgccctgaccgaccccgagggctgcccactgagccggtttaaggatagcctgggaaacccaacccacatcctgagaatcggcgagagctataaggagaagcagcggaccatccaggccaagaaggaggtggagcagcggagagccggcggctacagccggaagtacgccagcaaagccaagaatctggcagacgatatggtgagaaacaccgctagagatctgctgtactacgccgtgacccaggatgccatgctgatcttcgccaacctgagccggggcttcggccggcagggcaagcggaccttcatggccgagagacagtacacacggatggaggactggctgaccgccaagctggcctacgagggcctgagcaagacctacctgtccaagacactggcccagtacacctccaagacatgcagcaactgtgggtttaccatcaccagcgccgactacgacagggtgctggagaagctgaagaagacagcaacaggctggatgaccacaattaacggcaaggagctgaaggtggagggccagattacctactacaacagatacaagagacagaacgtagtcaaggacctgtccgtcgagctggatagactgagcgaagaatctgtgaacaacgacatctcctcctggacaaagggcagaagcggagaagctctgagcctcctgaagaaaagattctcccatagacccgtgcaggagaagttcgtgtgcctgaactgcggcttcgagacacacgcagccgagcaagccgccctgaacatcgccagatcctggctgttcctgcggagccaggagtacaagaaataccagacaaacaagacaaccggcaacaccgataagagagccttcgtcgagacctggcagtccttttaccggaagaagcttaaggaggtgtggaaacctgccgtgcggtctggcggatctggcggaggctcctgacaccgtggtgttcgaggacgtggtggtgggcttcaccctggaggagtgggccctgctgaaccccgcccagaggaacctgtacagggaggtgatgctggagaccttcaagcacctggccagcgtggacaacgaggcccagcccaagaccaacggcagcatcagccagcaggacaccagcggcgagaagctgagcctgaagcagaagatcgagaagttcaccaggaagcacacctgggccagcggatctggctccggcagcggccccaagaaaaagagaaaagtctaagctgccttctgcggggcttgccttctggccatgcccttcttctctcccttgcacctgtacctcttggtctttgaataaagcctgagtaggaaggctagcaaaaaaaaaaaaaaaaaaaaaaaaaaaaaaaaaaaaaaaaaaaaaaaaaaaaaaaaaaaaaaaaaaaaaaaaaaaaaaaa

SEQ ID NO: 16031 - RNA, 9485 nt, synthetic construct
  source 1..9485: mol_type = other RNA
aggaaataagagagaaaagaagagtaagaagaaatataagagccaccatggcccctaagaagaagcgtaaagtgagccggatggaacgcctcgtctacgaggtgcggcagaagtgcagaaacatcgaggacatctgcatctcctgcggatctctgaacgtgaccctggagcacccactgttcatcggcggcatgtgccagaactgtaaaaactgttttctggagtgtgcctatcaatacgacgatgacggctaccagagctactgcaccatctgttgcggcggaagagaggtgctgatgtgtggaaataacaactgctgccggtgcttctgcgtggaatgcgtggacctgctggtgggccccggcgccgcccaggccgctattaaggaagatccttggaactgctacatgtgcggccacaagggcacatacggcctgctgagacggagagaggactggcctagcagactgcagatgttcttcgccaataaccacgaccaggagttcgacccccctaaggtgtaccctcccgtccccgccgagaagagaaagcccatccgggtcctgagcctgttcgatggcatcgccaccggtctgctggtgctgaaggacctgggcatccaggtggataggtacattgcctccgaggtgtgcgaggactccatcaccgtgggaatggtgcgtcatcagggcaagatcatgtacgtgggcgacgtgcggagcgtgacacagaagcatatccaggagtggggccctttcgacctggtgatcggcggcagcccttgcaatgacctgagcatcgtgaacccagcccggaagggcctgtacgagggaaccggcagactgttcttcgagttttacagactgctgcacgacgcccggcctaaggaaggcgacgaccggcccttcttttggctgttcgagaatgtggtggccatgggagtcagcgacaagcgggatattagccggttcctggagagcaaccccgtgatgatcgatgccaaggaagtgagcgccgcccaccgggccagatacttctggggcaatctgcctggcatgaacagacccctggccagcaccgtgaacgacaagctggagctgcaggagtgcctggagcacggccggatcgccaagttcagcaaggtgagaaccatcaccacccgaagcaacagcatcaaacaaggcaaggaccagcactttcctgtgttcatgaacgagaaggaggacatcctgtggtgtaccgagatggagagagtgttcgggttcccagtccactacacagatgtcagcaacatgtctagactggccagacagagactgctgggaagaagctggtccgtccctgtgatcagacacctgttcgcccctctgaaggagtacttcgcctgcgtgagcagcggcaacagcaacgccaacagccggggccccagcttctctagcggcctggtgccactgtccctgagagggagccacatgggccccatggagatctacaaaaccgtgagcgcctggaagcggcagcctgtgcgcgtgctgagcctgtttcggaatatcgataaagtcctgaaaagcctgggattcctggagagcggctctggctccggcggtggcaccctgaagtacgtggaggatgtgacaaacgtggtcagacgggatgtggagaagtggggccccttcgatctggtgtacggcagcacccaacccctgggcagctcttgtgaccggtgccctggctggtacatgtttcagttccaccggatcctgcagtacgccctgccgagacaggagtcccagcggccattcttttggattttcatggacaacttgctgctgaccgaggatgaccaggaaactaccactcggttcctgcagaccgaagccgtgaccctgcaggacgtgagaggccgggactaccagaacgccatgcgggtgtggtccaacatccctggactgaaaagcaagcacgcacctctgacccctaaagaagaggagtacctgcaggcccaggtgcggagcagaagcaagctggacgcccctaaggtggatctgctggtgaagaattgcctcctgcccctgagagagtacttcaagtatttcagccagaatagtctgcccctgggaggcagcggcggcggcgccctggtgacatttgaggacgtcgccgtgcggttcacccaggaggaatgggctctgctggatccttctcagaaaatcctgtaccgggacgtgatgagagagacataccggaatctgacctccgtgggcatcaactgggaatgttgggaccttgaagcctgcttcagaagcctgggaagaaacctgagagtgcaggtggtgaagagaaagtgcgagctgaccaacagcggcccctgcgccgagggcggcccaagcagcggcgcccctcctcccagcggcggcagcccagccggctccccaacctctaccgaggagggcacctctgagtccgccacccccgagagcggccctggcacctccaccgagcccagcgagggcagcgcacccggcagccctgccggcagccccacctccacagaggagggaaccagcaccgagcccagcgaaggcagcgccccaggcaccagcaccgagcctagtgagcaggagattaaacggatcaacaagatcagaagaagacttgtgaaagacagcaacaccaagaaggccggcaagacaggccccatgaaaaccctgctggttagagtgatgacacccgatctgagagagcggctggaaaacctgagaaagaagcctgaaaatatcccccagcccatcagcaatacatctagagccaacctgaataagctgctgaccgattacaccgaaatgaagaaggcgatcctgcatgtgtactgggaagagttccagaaggaccctgtgggcctgatgagccgggtggcccagcctgccagcaagaagatcgatcagaacaagctgaaacctgagatggacgagaagggcaacctgaccaccgccggctttgcctgctctcagtgtggccagcccctgttcgtgtacaagctggagcaggtgtctgagaagggcaaggcttacaccaactacttcggacggtgcaatgtggccgagcacgaaaagctgatcctgctggcccagctgaagcccgagaaggatagcgacgaagccgtgacatatagcctgggaaagtttgggcagagggccctggatttctacagcattcatgtgaccaaggagtccacccaccccgtgaagcccctggcccagatcgccggaaacagatacgcctccggacctgtgggaaaggccctgagcgacgcatgtatgggcacaatcgcctccttcctgtctaagtaccaggacatcatcatcgaacaccagaaggtggtgaagggcaaccagaagagactggagagcctgcgggagctggccggcaaggaaaacctggaataccctagcgtgaccctgccacctcagcctcacaccaaggagggcgttgatgcctacaacgaagtgatcgcccgggtgcgaatgtgggtgaacctgaacctgtggcagaagctgaagctaagcagagatgatgccaagcctctgctgagactgaagggattcccttcctttcctctggtcgagagacaggccaacgaagtggactggtgggacatggtgtgtaacgtgaagaagctgatcaacgagaaaaaggaggatggcaaggtgttttggcagaatctggctggctacaagagacaggaagccctgagaccatacctgagcagcgaggaagatcggaagaagggaaagaaattcgctcggtaccagctgggcgacctgctgctgcacctggaaaagaagcacggcgaggactggggaaaggtgtacgacgaggcctgggagcggattgacaagaaagtggaaggcctgagcaagcacatcaagctggaagaggaacggagaagcgaggacgcccagagcaaggccgccctgaccgactggctgcgggctaaggccagcttcgtgatcgagggcctgaaggaggccgacaaggacgagttctgcagatgcgagctgaagctgcagaagtggtacggggacctgcggggaaagcccttcgccatcgaagccgagaacagcatcctggacatcagcggcttcagcaagcagtacaactgtgccttcatctggcagaaggacggcgtgaagaagctgaacctgtacctgatcatcaactacttcaagggcggcaagctgcggttcaagaagatcaaacctgaagccttcgaagccaacagattctacaccgtgatcaacaaaaagagcggcgagatcgtgcccatggaggtgaacttcaacttcgacgaccccaacctgatcatcctgcctctggcctttggcaagagacagggcagagaattcatctggaacgacctgctgtccctggaaaccggcagcctgaagctggccaacggaagagtgatcgagaagacactgtacaacagaagaacccggcaggatgagcctgccctgttcgtggccctgaccttcgagcggcgggaggtcctggactcctccaatatcaaaccaatgaacctgatcggcgtggcaagaggcgaaaacatccccgccgtgatcgccctgaccgaccccgagggctgcccactgagccggtttaaggatagcctgggaaacccaacccacatcctgagaatcggcgagagctataaggagaagcagcggaccatccaggccaagaaggaggtggagcagcggagagccggcggctacagccggaagtacgccagcaaagccaagaatctggcagacgatatggtgagaaacaccgctagagatctgctgtactacgccgtgacccaggatgccatgctgatcttcgccaacctgagccggggcttcggccggcagggcaagcggaccttcatggccgagagacagtacacacggatggaggactggctgaccgccaagctggcctacgagggcctgagcaagacctacctgtccaagacactggcccagtacacctccaagacatgcagcaactgtgggtttaccatcaccagcgccgactacgacagggtgctggagaagctgaagaagacagcaacaggctggatgaccacaattaacggcaaggagctgaaggtggagggccagattacctactacaacagatacaagagacagaacgtagtcaaggacctgtccgtcgagctggatagactgagcgaagaatctgtgaacaacgacatctcctcctggacaaagggcagaagcggagaagctctgagcctcctgaagaaaagattctcccatagacccgtgcaggagaagttcgtgtgcctgaactgcggcttcgagacacacgcagccgagcaagccgccctgaacatcgccagatcctggctgttcctgcggagccaggagtacaagaaataccagacaaacaagacaaccggcaacaccgataagagagccttcgtcgagacctggcagtccttttaccggaagaagcttaaggaggtgtggaaacctgccgtgcggtctggcggatctggcggaggctccgcccacgccctggtgaccttcagggacgtggccatcgacttcagccagaaggagtgggagtgcctggacaccacccagaggaagctgtacagggacgtgatgctggagaactacaacaacctggtgagcctggccggctacagcggcagcaagcccgacgtgatcaccctgctggagcagggcaaggagccctgcgtggtggccagggacgtgaccggcaggcagtgccccggcctgctgagcggcggcccaagcagcggcgcccctcctcccagcggcggcagcccagccggctccccaacctctaccgaggagggcacctctgagtccgccacccccgagagcggccctggcacctccaccgagcccagcgagggcagcgcacccggcagccctgccggcagccccacctccacagaggagggaaccagcaccgagcccagcgaaggcagcgccccaggcaccagcaccgagcctagtgagcaggagattaaacggatcaacaagatcagaagaagacttgtgaaagacagcaacaccaagaaggccggcaagacaggccccatgaaaaccctgctggttagagtgatgacacccgatctgagagagcggctggaaaacctgagaaagaagcctgaaaatatcccccagcccatcagcaatacatctagagccaacctgaataagctgctgaccgattacaccgaaatgaagaaggcgatcctgcatgtgtactgggaagagttccagaaggaccctgtgggcctgatgagccgggtggcccagcctgccagcaagaagatcgatcagaacaagctgaaacctgagatggacgagaagggcaacctgaccaccgccggctttgcctgctctcagtgtggccagcccctgttcgtgtacaagctggagcaggtgtctgagaagggcaaggcttacaccaactacttcggacggtgcaatgtggccgagcacgaaaagctgatcctgctggcccagctgaagcccgagaaggatagcgacgaagccgtgacatatagcctgggaaagtttgggcagagggccctggatttctacagcattcatgtgaccaaggagtccacccaccccgtgaagcccctggcccagatcgccggaaacagatacgcctccggacctgtgggaaaggccctgagcgacgcatgtatgggcacaatcgcctccttcctgtctaagtaccaggacatcatcatcgaacaccagaaggtggtgaagggcaaccagaagagactggagagcctgcgggagctggccggcaaggaaaacctggaataccctagcgtgaccctgccacctcagcctcacaccaaggagggcgttgatgcctacaacgaagtgatcgcccgggtgcgaatgtgggtgaacctgaacctgtggcagaagctgaagctaagcagagatgatgccaagcctctgctgagactgaagggattcccttcctttcctctggtcgagagacaggccaacgaagtggactggtgggacatggtgtgtaacgtgaagaagctgatcaacgagaaaaaggaggatggcaaggtgttttggcagaatctggctggctacaagagacaggaagccctgagaccatacctgagcagcgaggaagatcggaagaagggaaagaaattcgctcggtaccagctgggcgacctgctgctgcacctggaaaagaagcacggcgaggactggggaaaggtgtacgacgaggcctgggagcggattgacaagaaagtggaaggcctgagcaagcacatcaagctggaagaggaacggagaagcgaggacgcccagagcaaggccgccctgaccgactggctgcgggctaaggccagcttcgtgatcgagggcctgaaggaggccgacaaggacgagttctgcagatgcgagctgaagctgcagaagtggtacggggacctgcggggaaagcccttcgccatcgaagccgagaacagcatcctggacatcagcggcttcagcaagcagtacaactgtgccttcatctggcagaaggacggcgtgaagaagctgaacctgtacctgatcatcaactacttcaagggcggcaagctgcggttcaagaagatcaaacctgaagccttcgaagccaacagattctacaccgtgatcaacaaaaagagcggcgagatcgtgcccatggaggtgaacttcaacttcgacgaccccaacctgatcatcctgcctctggcctttggcaagagacagggcagagaattcatctggaacgacctgctgtccctggaaaccggcagcctgaagctggccaacggaagagtgatcgagaagacactgtacaacagaagaacccggcaggatgagcctgccctgttcgtggccctgaccttcgagcggcgggaggtcctggactcctccaatatcaaaccaatgaacctgatcggcgtggcaagaggcgaaaacatccccgccgtgatcgccctgaccgaccccgagggctgcccactgagccggtttaaggatagcctgggaaacccaacccacatcctgagaatcggcgagagctataaggagaagcagcggaccatccaggccaagaaggaggtggagcagcggagagccggcggctacagccggaagtacgccagcaaagccaagaatctggcagacgatatggtgagaaacaccgctagagatctgctgtactacgccgtgacccaggatgccatgctgatcttcgccaacctgagccggggcttcggccggcagggcaagcggaccttcatggccgagagacagtacacacggatggaggactggctgaccgccaagctggcctacgagggcctgagcaagacctacctgtccaagacactggcccagtacacctccaagacatgcagcaactgtgggtttaccatcaccagcgccgactacgacagggtgctggagaagctgaagaagacagcaacaggctggatgaccacaattaacggcaaggagctgaaggtggagggccagattacctactacaacagatacaagagacagaacgtagtcaaggacctgtccgtcgagctggatagactgagcgaagaatctgtgaacaacgacatctcctcctggacaaagggcagaagcggagaagctctgagcctcctgaagaaaagattctcccatagacccgtgcaggagaagttcgtgtgcctgaactgcggcttcgagacacacgcagccgagcaagccgccctgaacatcgccagatcctggctgttcctgcggagccaggagtacaagaaataccagacaaacaagacaaccggcaacaccgataagagagccttcgtcgagacctggcagtccttttaccggaagaagcttaaggaggtgtggaaacctgccgtgcggtctggcggatctggcggaggctcctgcccacgccctggtgaccttcagggacgtggccatcgacttcagccagaaggagtgggagtgcctggacaccacccagaggaagctgtacagggacgtgatgctggagaactacaacaacctggtgagcctggccggctacagcggcagcaagcccgacgtgatcaccctgctggagcagggcaaggagccctgcgtggtggccagggacgtgaccggcaggcagtgccccggcctgctgagcggatctggctccggcagcggccccaagaaaaagagaaaagtctaagctgccttctgcggggcttgccttctggccatgcccttcttctctcccttgcacctgtacctcttggtctttgaataaagcctgagtaggaaggctagcaaaaaaaaaaaaaaaaaaaaaaaaaaaaaaaaaaaaaaaaaaaaaaaaaaaaaaaaaaaaaaaaaaaaaaaaaaaaaaaa

SEQ ID NO: 16032 - RNA, 9485 nt, synthetic construct
  source 1..9485: mol_type = other RNA
aggaaataagagagaaaagaagagtaagaagaaatataagagccaccatggcccctaagaagaagcgtaaagtgagccggatggaacgcctcgtctacgaggtgcggcagaagtgcagaaacatcgaggacatctgcatctcctgcggatctctgaacgtgaccctggagcacccactgttcatcggcggcatgtgccagaactgtaaaaactgttttctggagtgtgcctatcaatacgacgatgacggctaccagagctactgcaccatctgttgcggcggaagagaggtgctgatgtgtggaaataacaactgctgccggtgcttctgcgtggaatgcgtggacctgctggtgggccccggcgccgcccaggccgctattaaggaagatccttggaactgctacatgtgcggccacaagggcacatacggcctgctgagacggagagaggactggcctagcagactgcagatgttcttcgccaataaccacgaccaggagttcgacccccctaaggtgtaccctcccgtccccgccgagaagagaaagcccatccgggtcctgagcctgttcgatggcatcgccaccggtctgctggtgctgaaggacctgggcatccaggtggataggtacattgcctccgaggtgtgcgaggactccatcaccgtgggaatggtgcgtcatcagggcaagatcatgtacgtgggcgacgtgcggagcgtgacacagaagcatatccaggagtggggccctttcgacctggtgatcggcggcagcccttgcaatgacctgagcatcgtgaacccagcccggaagggcctgtacgagggaaccggcagactgttcttcgagttttacagactgctgcacgacgcccggcctaaggaaggcgacgaccggcccttcttttggctgttcgagaatgtggtggccatgggagtcagcgacaagcgggatattagccggttcctggagagcaaccccgtgatgatcgatgccaaggaagtgagcgccgcccaccgggccagatacttctggggcaatctgcctggcatgaacagacccctggccagcaccgtgaacgacaagctggagctgcaggagtgcctggagcacggccggatcgccaagttcagcaaggtgagaaccatcaccacccgaagcaacagcatcaaacaaggcaaggaccagcactttcctgtgttcatgaacgagaaggaggacatcctgtggtgtaccgagatggagagagtgttcgggttcccagtccactacacagatgtcagcaacatgtctagactggccagacagagactgctgggaagaagctggtccgtccctgtgatcagacacctgttcgcccctctgaaggagtacttcgcctgcgtgagcagcggcaacagcaacgccaacagccggggccccagcttctctagcggcctggtgccactgtccctgagagggagccacatgggccccatggagatctacaaaaccgtgagcgcctggaagcggcagcctgtgcgcgtgctgagcctgtttcggaatatcgataaagtcctgaaaagcctgggattcctggagagcggctctggctccggcggtggcaccctgaagtacgtggaggatgtgacaaacgtggtcagacgggatgtggagaagtggggccccttcgatctggtgtacggcagcacccaacccctgggcagctcttgtgaccggtgccctggctggtacatgtttcagttccaccggatcctgcagtacgccctgccgagacaggagtcccagcggccattcttttggattttcatggacaacttgctgctgaccgaggatgaccaggaaactaccactcggttcctgcagaccgaagccgtgaccctgcaggacgtgagaggccgggactaccagaacgccatgcgggtgtggtccaacatccctggactgaaaagcaagcacgcacctctgacccctaaagaagaggagtacctgcaggcccaggtgcggagcagaagcaagctggacgcccctaaggtggatctgctggtgaagaattgcctcctgcccctgagagagtacttcaagtatttcagccagaatagtctgcccctgggaggcagcggcggcggcgccctggtgacatttgaggacgtcgccgtgcggttcacccaggaggaatgggctctgctggatccttctcagaaaatcctgtaccgggacgtgatgagagagacataccggaatctgacctccgtgggcatcaactgggaatgttgggaccttgaagcctgcttcagaagcctgggaagaaacctgagagtgcaggtggtgaagagaaagtgcgagctgaccaacagcggcccctgcgccgagggcggcccaagcagcggcgcccctcctcccagcggcggcagcccagccggctccccaacctctaccgaggagggcacctctgagtccgccacccccgagagcggccctggcacctccaccgagcccagcgagggcagcgcacccggcagccctgccggcagccccacctccacagaggagggaaccagcaccgagcccagcgaaggcagcgccccaggcaccagcaccgagcctagtgagcaggagattaaacggatcaacaagatcagaagaagacttgtgaaagacagcaacaccaagaaggccggcaagacaggccccatgaaaaccctgctggttagagtgatgacacccgatctgagagagcggctggaaaacctgagaaagaagcctgaaaatatcccccagcccatcagcaatacatctagagccaacctgaataagctgctgaccgattacaccgaaatgaagaaggcgatcctgcatgtgtactgggaagagttccagaaggaccctgtgggcctgatgagccgggtggcccagcctgccagcaagaagatcgatcagaacaagctgaaacctgagatggacgagaagggcaacctgaccaccgccggctttgcctgctctcagtgtggccagcccctgttcgtgtacaagctggagcaggtgtctgagaagggcaaggcttacaccaactacttcggacggtgcaatgtggccgagcacgaaaagctgatcctgctggcccagctgaagcccgagaaggatagcgacgaagccgtgacatatagcctgggaaagtttgggcagagggccctggatttctacagcattcatgtgaccaaggagtccacccaccccgtgaagcccctggcccagatcgccggaaacagatacgcctccggacctgtgggaaaggccctgagcgacgcatgtatgggcacaatcgcctccttcctgtctaagtaccaggacatcatcatcgaacaccagaaggtggtgaagggcaaccagaagagactggagagcctgcgggagctggccggcaaggaaaacctggaataccctagcgtgaccctgccacctcagcctcacaccaaggagggcgttgatgcctacaacgaagtgatcgcccgggtgcgaatgtgggtgaacctgaacctgtggcagaagctgaagctaagcagagatgatgccaagcctctgctgagactgaagggattcccttcctttcctctggtcgagagacaggccaacgaagtggactggtgggacatggtgtgtaacgtgaagaagctgatcaacgagaaaaaggaggatggcaaggtgttttggcagaatctggctggctacaagagacaggaagccctgagaccatacctgagcagcgaggaagatcggaagaagggaaagaaattcgctcggtaccagctgggcgacctgctgctgcacctggaaaagaagcacggcgaggactggggaaaggtgtacgacgaggcctgggagcggattgacaagaaagtggaaggcctgagcaagcacatcaagctggaagaggaacggagaagcgaggacgcccagagcaaggccgccctgaccgactggctgcgggctaaggccagcttcgtgatcgagggcctgaaggaggccgacaaggacgagttctgcagatgcgagctgaagctgcagaagtggtacggggacctgcggggaaagcccttcgccatcgaagccgagaacagcatcctggacatcagcggcttcagcaagcagtacaactgtgccttcatctggcagaaggacggcgtgaagaagctgaacctgtacctgatcatcaactacttcaagggcggcaagctgcggttcaagaagatcaaacctgaagccttcgaagccaacagattctacaccgtgatcaacaaaaagagcggcgagatcgtgcccatggaggtgaacttcaacttcgacgaccccaacctgatcatcctgcctctggcctttggcaagagacagggcagagaattcatctggaacgacctgctgtccctggaaaccggcagcctgaagctggccaacggaagagtgatcgagaagacactgtacaacagaagaacccggcaggatgagcctgccctgttcgtggccctgaccttcgagcggcgggaggtcctggactcctccaatatcaaaccaatgaacctgatcggcgtggcaagaggcgaaaacatccccgccgtgatcgccctgaccgaccccgagggctgcccactgagccggtttaaggatagcctgggaaacccaacccacatcctgagaatcggcgagagctataaggagaagcagcggaccatccaggccaagaaggaggtggagcagcggagagccggcggctacagccggaagtacgccagcaaagccaagaatctggcagacgatatggtgagaaacaccgctagagatctgctgtactacgccgtgacccaggatgccatgctgatcttcgccaacctgagccggggcttcggccggcagggcaagcggaccttcatggccgagagacagtacacacggatggaggactggctgaccgccaagctggcctacgagggcctgagcaagacctacctgtccaagacactggcccagtacacctccaagacatgcagcaactgtgggtttaccatcaccagcgccgactacgacagggtgctggagaagctgaagaagacagcaacaggctggatgaccacaattaacggcaaggagctgaaggtggagggccagattacctactacaacagatacaagagacagaacgtagtcaaggacctgtccgtcgagctggatagactgagcgaagaatctgtgaacaacgacatctcctcctggacaaagggcagaagcggagaagctctgagcctcctgaagaaaagattctcccatagacccgtgcaggagaagttcgtgtgcctgaactgcggcttcgagacacacgcagccgagcaagccgccctgaacatcgccagatcctggctgttcctgcggagccaggagtacaagaaataccagacaaacaagacaaccggcaacaccgataagagagccttcgtcgagacctggcagtccttttaccggaagaagcttaaggaggtgtggaaacctgccgtgcggtctggcggatctggcggaggctccctgcaggtgagcgtgagcttcgaggacgtggccgtggacttcagcagggaggagtggcagcagctggacagcacccagaggaggctgtaccaggacgtgatgctggagaactacagccacctgctgagcctgggctgcgagatccccaagcccgaggtgatcttcaagctggagcagggcgaggagccctggaccctggaggaggagaccccccaccagagctgcagcgacgagaagttcggcggcggcccaagcagcggcgcccctcctcccagcggcggcagcccagccggctccccaacctctaccgaggagggcacctctgagtccgccacccccgagagcggccctggcacctccaccgagcccagcgagggcagcgcacccggcagccctgccggcagccccacctccacagaggagggaaccagcaccgagcccagcgaaggcagcgccccaggcaccagcaccgagcctagtgagcaggagattaaacggatcaacaagatcagaagaagacttgtgaaagacagcaacaccaagaaggccggcaagacaggccccatgaaaaccctgctggttagagtgatgacacccgatctgagagagcggctggaaaacctgagaaagaagcctgaaaatatcccccagcccatcagcaatacatctagagccaacctgaataagctgctgaccgattacaccgaaatgaagaaggcgatcctgcatgtgtactgggaagagttccagaaggaccctgtgggcctgatgagccgggtggcccagcctgccagcaagaagatcgatcagaacaagctgaaacctgagatggacgagaagggcaacctgaccaccgccggctttgcctgctctcagtgtggccagcccctgttcgtgtacaagctggagcaggtgtctgagaagggcaaggcttacaccaactacttcggacggtgcaatgtggccgagcacgaaaagctgatcctgctggcccagctgaagcccgagaaggatagcgacgaagccgtgacatatagcctgggaaagtttgggcagagggccctggatttctacagcattcatgtgaccaaggagtccacccaccccgtgaagcccctggcccagatcgccggaaacagatacgcctccggacctgtgggaaaggccctgagcgacgcatgtatgggcacaatcgcctccttcctgtctaagtaccaggacatcatcatcgaacaccagaaggtggtgaagggcaaccagaagagactggagagcctgcgggagctggccggcaaggaaaacctggaataccctagcgtgaccctgccacctcagcctcacaccaaggagggcgttgatgcctacaacgaagtgatcgcccgggtgcgaatgtgggtgaacctgaacctgtggcagaagctgaagctaagcagagatgatgccaagcctctgctgagactgaagggattcccttcctttcctctggtcgagagacaggccaacgaagtggactggtgggacatggtgtgtaacgtgaagaagctgatcaacgagaaaaaggaggatggcaaggtgttttggcagaatctggctggctacaagagacaggaagccctgagaccatacctgagcagcgaggaagatcggaagaagggaaagaaattcgctcggtaccagctgggcgacctgctgctgcacctggaaaagaagcacggcgaggactggggaaaggtgtacgacgaggcctgggagcggattgacaagaaagtggaaggcctgagcaagcacatcaagctggaagaggaacggagaagcgaggacgcccagagcaaggccgccctgaccgactggctgcgggctaaggccagcttcgtgatcgagggcctgaaggaggccgacaaggacgagttctgcagatgcgagctgaagctgcagaagtggtacggggacctgcggggaaagcccttcgccatcgaagccgagaacagcatcctggacatcagcggcttcagcaagcagtacaactgtgccttcatctggcagaaggacggcgtgaagaagctgaacctgtacctgatcatcaactacttcaagggcggcaagctgcggttcaagaagatcaaacctgaagccttcgaagccaacagattctacaccgtgatcaacaaaaagagcggcgagatcgtgcccatggaggtgaacttcaacttcgacgaccccaacctgatcatcctgcctctggcctttggcaagagacagggcagagaattcatctggaacgacctgctgtccctggaaaccggcagcctgaagctggccaacggaagagtgatcgagaagacactgtacaacagaagaacccggcaggatgagcctgccctgttcgtggccctgaccttcgagcggcgggaggtcctggactcctccaatatcaaaccaatgaacctgatcggcgtggcaagaggcgaaaacatccccgccgtgatcgccctgaccgaccccgagggctgcccactgagccggtttaaggatagcctgggaaacccaacccacatcctgagaatcggcgagagctataaggagaagcagcggaccatccaggccaagaaggaggtggagcagcggagagccggcggctacagccggaagtacgccagcaaagccaagaatctggcagacgatatggtgagaaacaccgctagagatctgctgtactacgccgtgacccaggatgccatgctgatcttcgccaacctgagccggggcttcggccggcagggcaagcggaccttcatggccgagagacagtacacacggatggaggactggctgaccgccaagctggcctacgagggcctgagcaagacctacctgtccaagacactggcccagtacacctccaagacatgcagcaactgtgggtttaccatcaccagcgccgactacgacagggtgctggagaagctgaagaagacagcaacaggctggatgaccacaattaacggcaaggagctgaaggtggagggccagattacctactacaacagatacaagagacagaacgtagtcaaggacctgtccgtcgagctggatagactgagcgaagaatctgtgaacaacgacatctcctcctggacaaagggcagaagcggagaagctctgagcctcctgaagaaaagattctcccatagacccgtgcaggagaagttcgtgtgcctgaactgcggcttcgagacacacgcagccgagcaagccgccctgaacatcgccagatcctggctgttcctgcggagccaggagtacaagaaataccagacaaacaagacaaccggcaacaccgataagagagccttcgtcgagacctggcagtccttttaccggaagaagcttaaggaggtgtggaaacctgccgtgcggtctggcggatctggcggaggctcctctgcaggtgagcgtgagcttcgaggacgtggccgtggacttcagcagggaggagtggcagcagctggacagcacccagaggaggctgtaccaggacgtgatgctggagaactacagccacctgctgagcctgggctgcgagatccccaagcccgaggtgatcttcaagctggagcagggcgaggagccctggaccctggaggaggagaccccccaccagagctgcagcgacgagaagttcggcggatctggctccggcagcggccccaagaaaaagagaaaagtctaagctgccttctgcggggcttgccttctggccatgcccttcttctctcccttgcacctgtacctcttggtctttgaataaagcctgagtaggaaggctagcaaaaaaaaaaaaaaaaaaaaaaaaaaaaaaaaaaaaaaaaaaaaaaaaaaaaaaaaaaaaaaaaaaaaaaaaaaaaaaaa

SEQ ID NO: 16033 - RNA, 9485 nt, synthetic construct
  source 1..9485: mol_type = other RNA
aggaaataagagagaaaagaagagtaagaagaaatataagagccaccatggcccctaagaagaagcgtaaagtgagccggatggaacgcctcgtctacgaggtgcggcagaagtgcagaaacatcgaggacatctgcatctcctgcggatctctgaacgtgaccctggagcacccactgttcatcggcggcatgtgccagaactgtaaaaactgttttctggagtgtgcctatcaatacgacgatgacggctaccagagctactgcaccatctgttgcggcggaagagaggtgctgatgtgtggaaataacaactgctgccggtgcttctgcgtggaatgcgtggacctgctggtgggccccggcgccgcccaggccgctattaaggaagatccttggaactgctacatgtgcggccacaagggcacatacggcctgctgagacggagagaggactggcctagcagactgcagatgttcttcgccaataaccacgaccaggagttcgacccccctaaggtgtaccctcccgtccccgccgagaagagaaagcccatccgggtcctgagcctgttcgatggcatcgccaccggtctgctggtgctgaaggacctgggcatccaggtggataggtacattgcctccgaggtgtgcgaggactccatcaccgtgggaatggtgcgtcatcagggcaagatcatgtacgtgggcgacgtgcggagcgtgacacagaagcatatccaggagtggggccctttcgacctggtgatcggcggcagcccttgcaatgacctgagcatcgtgaacccagcccggaagggcctgtacgagggaaccggcagactgttcttcgagttttacagactgctgcacgacgcccggcctaaggaaggcgacgaccggcccttcttttggctgttcgagaatgtggtggccatgggagtcagcgacaagcgggatattagccggttcctggagagcaaccccgtgatgatcgatgccaaggaagtgagcgccgcccaccgggccagatacttctggggcaatctgcctggcatgaacagacccctggccagcaccgtgaacgacaagctggagctgcaggagtgcctggagcacggccggatcgccaagttcagcaaggtgagaaccatcaccacccgaagcaacagcatcaaacaaggcaaggaccagcactttcctgtgttcatgaacgagaaggaggacatcctgtggtgtaccgagatggagagagtgttcgggttcccagtccactacacagatgtcagcaacatgtctagactggccagacagagactgctgggaagaagctggtccgtccctgtgatcagacacctgttcgcccctctgaaggagtacttcgcctgcgtgagcagcggcaacagcaacgccaacagccggggccccagcttctctagcggcctggtgccactgtccctgagagggagccacatgggccccatggagatctacaaaaccgtgagcgcctggaagcggcagcctgtgcgcgtgctgagcctgtttcggaatatcgataaagtcctgaaaagcctgggattcctggagagcggctctggctccggcggtggcaccctgaagtacgtggaggatgtgacaaacgtggtcagacgggatgtggagaagtggggccccttcgatctggtgtacggcagcacccaacccctgggcagctcttgtgaccggtgccctggctggtacatgtttcagttccaccggatcctgcagtacgccctgccgagacaggagtcccagcggccattcttttggattttcatggacaacttgctgctgaccgaggatgaccaggaaactaccactcggttcctgcagaccgaagccgtgaccctgcaggacgtgagaggccgggactaccagaacgccatgcgggtgtggtccaacatccctggactgaaaagcaagcacgcacctctgacccctaaagaagaggagtacctgcaggcccaggtgcggagcagaagcaagctggacgcccctaaggtggatctgctggtgaagaattgcctcctgcccctgagagagtacttcaagtatttcagccagaatagtctgcccctgggaggcagcggcggcggcgccctggtgacatttgaggacgtcgccgtgcggttcacccaggaggaatgggctctgctggatccttctcagaaaatcctgtaccgggacgtgatgagagagacataccggaatctgacctccgtgggcatcaactgggaatgttgggaccttgaagcctgcttcagaagcctgggaagaaacctgagagtgcaggtggtgaagagaaagtgcgagctgaccaacagcggcccctgcgccgagggcggcccaagcagcggcgcccctcctcccagcggcggcagcccagccggctccccaacctctaccgaggagggcacctctgagtccgccacccccgagagcggccctggcacctccaccgagcccagcgagggcagcgcacccggcagccctgccggcagccccacctccacagaggagggaaccagcaccgagcccagcgaaggcagcgccccaggcaccagcaccgagcctagtgagcaggagattaaacggatcaacaagatcagaagaagacttgtgaaagacagcaacaccaagaaggccggcaagacaggccccatgaaaaccctgctggttagagtgatgacacccgatctgagagagcggctggaaaacctgagaaagaagcctgaaaatatcccccagcccatcagcaatacatctagagccaacctgaataagctgctgaccgattacaccgaaatgaagaaggcgatcctgcatgtgtactgggaagagttccagaaggaccctgtgggcctgatgagccgggtggcccagcctgccagcaagaagatcgatcagaacaagctgaaacctgagatggacgagaagggcaacctgaccaccgccggctttgcctgctctcagtgtggccagcccctgttcgtgtacaagctggagcaggtgtctgagaagggcaaggcttacaccaactacttcggacggtgcaatgtggccgagcacgaaaagctgatcctgctggcccagctgaagcccgagaaggatagcgacgaagccgtgacatatagcctgggaaagtttgggcagagggccctggatttctacagcattcatgtgaccaaggagtccacccaccccgtgaagcccctggcccagatcgccggaaacagatacgcctccggacctgtgggaaaggccctgagcgacgcatgtatgggcacaatcgcctccttcctgtctaagtaccaggacatcatcatcgaacaccagaaggtggtgaagggcaaccagaagagactggagagcctgcgggagctggccggcaaggaaaacctggaataccctagcgtgaccctgccacctcagcctcacaccaaggagggcgttgatgcctacaacgaagtgatcgcccgggtgcgaatgtgggtgaacctgaacctgtggcagaagctgaagctaagcagagatgatgccaagcctctgctgagactgaagggattcccttcctttcctctggtcgagagacaggccaacgaagtggactggtgggacatggtgtgtaacgtgaagaagctgatcaacgagaaaaaggaggatggcaaggtgttttggcagaatctggctggctacaagagacaggaagccctgagaccatacctgagcagcgaggaagatcggaagaagggaaagaaattcgctcggtaccagctgggcgacctgctgctgcacctggaaaagaagcacggcgaggactggggaaaggtgtacgacgaggcctgggagcggattgacaagaaagtggaaggcctgagcaagcacatcaagctggaagaggaacggagaagcgaggacgcccagagcaaggccgccctgaccgactggctgcgggctaaggccagcttcgtgatcgagggcctgaaggaggccgacaaggacgagttctgcagatgcgagctgaagctgcagaagtggtacggggacctgcggggaaagcccttcgccatcgaagccgagaacagcatcctggacatcagcggcttcagcaagcagtacaactgtgccttcatctggcagaaggacggcgtgaagaagctgaacctgtacctgatcatcaactacttcaagggcggcaagctgcggttcaagaagatcaaacctgaagccttcgaagccaacagattctacaccgtgatcaacaaaaagagcggcgagatcgtgcccatggaggtgaacttcaacttcgacgaccccaacctgatcatcctgcctctggcctttggcaagagacagggcagagaattcatctggaacgacctgctgtccctggaaaccggcagcctgaagctggccaacggaagagtgatcgagaagacactgtacaacagaagaacccggcaggatgagcctgccctgttcgtggccctgaccttcgagcggcgggaggtcctggactcctccaatatcaaaccaatgaacctgatcggcgtggcaagaggcgaaaacatccccgccgtgatcgccctgaccgaccccgagggctgcccactgagccggtttaaggatagcctgggaaacccaacccacatcctgagaatcggcgagagctataaggagaagcagcggaccatccaggccaagaaggaggtggagcagcggagagccggcggctacagccggaagtacgccagcaaagccaagaatctggcagacgatatggtgagaaacaccgctagagatctgctgtactacgccgtgacccaggatgccatgctgatcttcgccaacctgagccggggcttcggccggcagggcaagcggaccttcatggccgagagacagtacacacggatggaggactggctgaccgccaagctggcctacgagggcctgagcaagacctacctgtccaagacactggcccagtacacctccaagacatgcagcaactgtgggtttaccatcaccagcgccgactacgacagggtgctggagaagctgaagaagacagcaacaggctggatgaccacaattaacggcaaggagctgaaggtggagggccagattacctactacaacagatacaagagacagaacgtagtcaaggacctgtccgtcgagctggatagactgagcgaagaatctgtgaacaacgacatctcctcctggacaaagggcagaagcggagaagctctgagcctcctgaagaaaagattctcccatagacccgtgcaggagaagttcgtgtgcctgaactgcggcttcgagacacacgcagccgagcaagccgccctgaacatcgccagatcctggctgttcctgcggagccaggagtacaagaaataccagacaaacaagacaaccggcaacaccgataagagagccttcgtcgagacctggcagtccttttaccggaagaagcttaaggaggtgtggaaacctgccgtgcggtctggcggatctggcggaggctccagcgagatgagggtgaccttcgaggaggtggccgtgtacttcaccaagggccagggcgccctgctggacgccaggcagaaggccctgtacagggacgtgatgctggagaactacgaggccgtgaccagcctgggcttccccgtgcccaagcccgagctgatcgccaggctggagaggggcgaggagccctgggtgcccgacctgcaggccggcgaggagagggagatcctgaggggcaccaggggcggcccaagcagcggcgcccctcctcccagcggcggcagcccagccggctccccaacctctaccgaggagggcacctctgagtccgccacccccgagagcggccctggcacctccaccgagcccagcgagggcagcgcacccggcagccctgccggcagccccacctccacagaggagggaaccagcaccgagcccagcgaaggcagcgccccaggcaccagcaccgagcctagtgagcaggagattaaacggatcaacaagatcagaagaagacttgtgaaagacagcaacaccaagaaggccggcaagacaggccccatgaaaaccctgctggttagagtgatgacacccgatctgagagagcggctggaaaacctgagaaagaagcctgaaaatatcccccagcccatcagcaatacatctagagccaacctgaataagctgctgaccgattacaccgaaatgaagaaggcgatcctgcatgtgtactgggaagagttccagaaggaccctgtgggcctgatgagccgggtggcccagcctgccagcaagaagatcgatcagaacaagctgaaacctgagatggacgagaagggcaacctgaccaccgccggctttgcctgctctcagtgtggccagcccctgttcgtgtacaagctggagcaggtgtctgagaagggcaaggcttacaccaactacttcggacggtgcaatgtggccgagcacgaaaagctgatcctgctggcccagctgaagcccgagaaggatagcgacgaagccgtgacatatagcctgggaaagtttgggcagagggccctggatttctacagcattcatgtgaccaaggagtccacccaccccgtgaagcccctggcccagatcgccggaaacagatacgcctccggacctgtgggaaaggccctgagcgacgcatgtatgggcacaatcgcctccttcctgtctaagtaccaggacatcatcatcgaacaccagaaggtggtgaagggcaaccagaagagactggagagcctgcgggagctggccggcaaggaaaacctggaataccctagcgtgaccctgccacctcagcctcacaccaaggagggcgttgatgcctacaacgaagtgatcgcccgggtgcgaatgtgggtgaacctgaacctgtggcagaagctgaagctaagcagagatgatgccaagcctctgctgagactgaagggattcccttcctttcctctggtcgagagacaggccaacgaagtggactggtgggacatggtgtgtaacgtgaagaagctgatcaacgagaaaaaggaggatggcaaggtgttttggcagaatctggctggctacaagagacaggaagccctgagaccatacctgagcagcgaggaagatcggaagaagggaaagaaattcgctcggtaccagctgggcgacctgctgctgcacctggaaaagaagcacggcgaggactggggaaaggtgtacgacgaggcctgggagcggattgacaagaaagtggaaggcctgagcaagcacatcaagctggaagaggaacggagaagcgaggacgcccagagcaaggccgccctgaccgactggctgcgggctaaggccagcttcgtgatcgagggcctgaaggaggccgacaaggacgagttctgcagatgcgagctgaagctgcagaagtggtacggggacctgcggggaaagcccttcgccatcgaagccgagaacagcatcctggacatcagcggcttcagcaagcagtacaactgtgccttcatctggcagaaggacggcgtgaagaagctgaacctgtacctgatcatcaactacttcaagggcggcaagctgcggttcaagaagatcaaacctgaagccttcgaagccaacagattctacaccgtgatcaacaaaaagagcggcgagatcgtgcccatggaggtgaacttcaacttcgacgaccccaacctgatcatcctgcctctggcctttggcaagagacagggcagagaattcatctggaacgacctgctgtccctggaaaccggcagcctgaagctggccaacggaagagtgatcgagaagacactgtacaacagaagaacccggcaggatgagcctgccctgttcgtggccctgaccttcgagcggcgggaggtcctggactcctccaatatcaaaccaatgaacctgatcggcgtggcaagaggcgaaaacatccccgccgtgatcgccctgaccgaccccgagggctgcccactgagccggtttaaggatagcctgggaaacccaacccacatcctgagaatcggcgagagctataaggagaagcagcggaccatccaggccaagaaggaggtggagcagcggagagccggcggctacagccggaagtacgccagcaaagccaagaatctggcagacgatatggtgagaaacaccgctagagatctgctgtactacgccgtgacccaggatgccatgctgatcttcgccaacctgagccggggcttcggccggcagggcaagcggaccttcatggccgagagacagtacacacggatggaggactggctgaccgccaagctggcctacgagggcctgagcaagacctacctgtccaagacactggcccagtacacctccaagacatgcagcaactgtgggtttaccatcaccagcgccgactacgacagggtgctggagaagctgaagaagacagcaacaggctggatgaccacaattaacggcaaggagctgaaggtggagggccagattacctactacaacagatacaagagacagaacgtagtcaaggacctgtccgtcgagctggatagactgagcgaagaatctgtgaacaacgacatctcctcctggacaaagggcagaagcggagaagctctgagcctcctgaagaaaagattctcccatagacccgtgcaggagaagttcgtgtgcctgaactgcggcttcgagacacacgcagccgagcaagccgccctgaacatcgccagatcctggctgttcctgcggagccaggagtacaagaaataccagacaaacaagacaaccggcaacaccgataagagagccttcgtcgagacctggcagtccttttaccggaagaagcttaaggaggtgtggaaacctgccgtgcggtctggcggatctggcggaggctcctagcgagatgagggtgaccttcgaggaggtggccgtgtacttcaccaagggccagggcgccctgctggacgccaggcagaaggccctgtacagggacgtgatgctggagaactacgaggccgtgaccagcctgggcttccccgtgcccaagcccgagctgatcgccaggctggagaggggcgaggagccctgggtgcccgacctgcaggccggcgaggagagggagatcctgaggggcaccaggggatctggctccggcagcggccccaagaaaaagagaaaagtctaagctgccttctgcggggcttgccttctggccatgcccttcttctctcccttgcacctgtacctcttggtctttgaataaagcctgagtaggaaggctagcaaaaaaaaaaaaaaaaaaaaaaaaaaaaaaaaaaaaaaaaaaaaaaaaaaaaaaaaaaaaaaaaaaaaaaaaaaaaaaaa

SEQ ID NO: 16034 - RNA, 9485 nt, synthetic construct
  source 1..9485: mol_type = other RNA
aggaaataagagagaaaagaagagtaagaagaaatataagagccaccatggcccctaagaagaagcgtaaagtgagccggatggaacgcctcgtctacgaggtgcggcagaagtgcagaaacatcgaggacatctgcatctcctgcggatctctgaacgtgaccctggagcacccactgttcatcggcggcatgtgccagaactgtaaaaactgttttctggagtgtgcctatcaatacgacgatgacggctaccagagctactgcaccatctgttgcggcggaagagaggtgctgatgtgtggaaataacaactgctgccggtgcttctgcgtggaatgcgtggacctgctggtgggccccggcgccgcccaggccgctattaaggaagatccttggaactgctacatgtgcggccacaagggcacatacggcctgctgagacggagagaggactggcctagcagactgcagatgttcttcgccaataaccacgaccaggagttcgacccccctaaggtgtaccctcccgtccccgccgagaagagaaagcccatccgggtcctgagcctgttcgatggcatcgccaccggtctgctggtgctgaaggacctgggcatccaggtggataggtacattgcctccgaggtgtgcgaggactccatcaccgtgggaatggtgcgtcatcagggcaagatcatgtacgtgggcgacgtgcggagcgtgacacagaagcatatccaggagtggggccctttcgacctggtgatcggcggcagcccttgcaatgacctgagcatcgtgaacccagcccggaagggcctgtacgagggaaccggcagactgttcttcgagttttacagactgctgcacgacgcccggcctaaggaaggcgacgaccggcccttcttttggctgttcgagaatgtggtggccatgggagtcagcgacaagcgggatattagccggttcctggagagcaaccccgtgatgatcgatgccaaggaagtgagcgccgcccaccgggccagatacttctggggcaatctgcctggcatgaacagacccctggccagcaccgtgaacgacaagctggagctgcaggagtgcctggagcacggccggatcgccaagttcagcaaggtgagaaccatcaccacccgaagcaacagcatcaaacaaggcaaggaccagcactttcctgtgttcatgaacgagaaggaggacatcctgtggtgtaccgagatggagagagtgttcgggttcccagtccactacacagatgtcagcaacatgtctagactggccagacagagactgctgggaagaagctggtccgtccctgtgatcagacacctgttcgcccctctgaaggagtacttcgcctgcgtgagcagcggcaacagcaacgccaacagccggggccccagcttctctagcggcctggtgccactgtccctgagagggagccacatgggccccatggagatctacaaaaccgtgagcgcctggaagcggcagcctgtgcgcgtgctgagcctgtttcggaatatcgataaagtcctgaaaagcctgggattcctggagagcggctctggctccggcggtggcaccctgaagtacgtggaggatgtgacaaacgtggtcagacgggatgtggagaagtggggccccttcgatctggtgtacggcagcacccaacccctgggcagctcttgtgaccggtgccctggctggtacatgtttcagttccaccggatcctgcagtacgccctgccgagacaggagtcccagcggccattcttttggattttcatggacaacttgctgctgaccgaggatgaccaggaaactaccactcggttcctgcagaccgaagccgtgaccctgcaggacgtgagaggccgggactaccagaacgccatgcgggtgtggtccaacatccctggactgaaaagcaagcacgcacctctgacccctaaagaagaggagtacctgcaggcccaggtgcggagcagaagcaagctggacgcccctaaggtggatctgctggtgaagaattgcctcctgcccctgagagagtacttcaagtatttcagccagaatagtctgcccctgggaggcagcggcggcggcgccctggtgacatttgaggacgtcgccgtgcggttcacccaggaggaatgggctctgctggatccttctcagaaaatcctgtaccgggacgtgatgagagagacataccggaatctgacctccgtgggcatcaactgggaatgttgggaccttgaagcctgcttcagaagcctgggaagaaacctgagagtgcaggtggtgaagagaaagtgcgagctgaccaacagcggcccctgcgccgagggcggcccaagcagcggcgcccctcctcccagcggcggcagcccagccggctccccaacctctaccgaggagggcacctctgagtccgccacccccgagagcggccctggcacctccaccgagcccagcgagggcagcgcacccggcagccctgccggcagccccacctccacagaggagggaaccagcaccgagcccagcgaaggcagcgccccaggcaccagcaccgagcctagtgagcaggagattaaacggatcaacaagatcagaagaagacttgtgaaagacagcaacaccaagaaggccggcaagacaggccccatgaaaaccctgctggttagagtgatgacacccgatctgagagagcggctggaaaacctgagaaagaagcctgaaaatatcccccagcccatcagcaatacatctagagccaacctgaataagctgctgaccgattacaccgaaatgaagaaggcgatcctgcatgtgtactgggaagagttccagaaggaccctgtgggcctgatgagccgggtggcccagcctgccagcaagaagatcgatcagaacaagctgaaacctgagatggacgagaagggcaacctgaccaccgccggctttgcctgctctcagtgtggccagcccctgttcgtgtacaagctggagcaggtgtctgagaagggcaaggcttacaccaactacttcggacggtgcaatgtggccgagcacgaaaagctgatcctgctggcccagctgaagcccgagaaggatagcgacgaagccgtgacatatagcctgggaaagtttgggcagagggccctggatttctacagcattcatgtgaccaaggagtccacccaccccgtgaagcccctggcccagatcgccggaaacagatacgcctccggacctgtgggaaaggccctgagcgacgcatgtatgggcacaatcgcctccttcctgtctaagtaccaggacatcatcatcgaacaccagaaggtggtgaagggcaaccagaagagactggagagcctgcgggagctggccggcaaggaaaacctggaataccctagcgtgaccctgccacctcagcctcacaccaaggagggcgttgatgcctacaacgaagtgatcgcccgggtgcgaatgtgggtgaacctgaacctgtggcagaagctgaagctaagcagagatgatgccaagcctctgctgagactgaagggattcccttcctttcctctggtcgagagacaggccaacgaagtggactggtgggacatggtgtgtaacgtgaagaagctgatcaacgagaaaaaggaggatggcaaggtgttttggcagaatctggctggctacaagagacaggaagccctgagaccatacctgagcagcgaggaagatcggaagaagggaaagaaattcgctcggtaccagctgggcgacctgctgctgcacctggaaaagaagcacggcgaggactggggaaaggtgtacgacgaggcctgggagcggattgacaagaaagtggaaggcctgagcaagcacatcaagctggaagaggaacggagaagcgaggacgcccagagcaaggccgccctgaccgactggctgcgggctaaggccagcttcgtgatcgagggcctgaaggaggccgacaaggacgagttctgcagatgcgagctgaagctgcagaagtggtacggggacctgcggggaaagcccttcgccatcgaagccgagaacagcatcctggacatcagcggcttcagcaagcagtacaactgtgccttcatctggcagaaggacggcgtgaagaagctgaacctgtacctgatcatcaactacttcaagggcggcaagctgcggttcaagaagatcaaacctgaagccttcgaagccaacagattctacaccgtgatcaacaaaaagagcggcgagatcgtgcccatggaggtgaacttcaacttcgacgaccccaacctgatcatcctgcctctggcctttggcaagagacagggcagagaattcatctggaacgacctgctgtccctggaaaccggcagcctgaagctggccaacggaagagtgatcgagaagacactgtacaacagaagaacccggcaggatgagcctgccctgttcgtggccctgaccttcgagcggcgggaggtcctggactcctccaatatcaaaccaatgaacctgatcggcgtggcaagaggcgaaaacatccccgccgtgatcgccctgaccgaccccgagggctgcccactgagccggtttaaggatagcctgggaaacccaacccacatcctgagaatcggcgagagctataaggagaagcagcggaccatccaggccaagaaggaggtggagcagcggagagccggcggctacagccggaagtacgccagcaaagccaagaatctggcagacgatatggtgagaaacaccgctagagatctgctgtactacgccgtgacccaggatgccatgctgatcttcgccaacctgagccggggcttcggccggcagggcaagcggaccttcatggccgagagacagtacacacggatggaggactggctgaccgccaagctggcctacgagggcctgagcaagacctacctgtccaagacactggcccagtacacctccaagacatgcagcaactgtgggtttaccatcaccagcgccgactacgacagggtgctggagaagctgaagaagacagcaacaggctggatgaccacaattaacggcaaggagctgaaggtggagggccagattacctactacaacagatacaagagacagaacgtagtcaaggacctgtccgtcgagctggatagactgagcgaagaatctgtgaacaacgacatctcctcctggacaaagggcagaagcggagaagctctgagcctcctgaagaaaagattctcccatagacccgtgcaggagaagttcgtgtgcctgaactgcggcttcgagacacacgcagccgagcaagccgccctgaacatcgccagatcctggctgttcctgcggagccaggagtacaagaaataccagacaaacaagacaaccggcaacaccgataagagagccttcgtcgagacctggcagtccttttaccggaagaagcttaaggaggtgtggaaacctgccgtgcggtctggcggatctggcggaggctccggccacgccctgctgaccttcagggacgtggccatcgagttcagccaggaggagtggggctgcctgaaccacacccagagggagctgtacagggacgtgatgctggagaactacggccacctgctgttcctgggcctgatcgtgagcaagcccgacctggtgagcttcctggagcagaccaaggacccctgggacggcaagaggaagaagaccgtggccttccaccccggcctggccctgagcggcggcccaagcagcggcgcccctcctcccagcggcggcagcccagccggctccccaacctctaccgaggagggcacctctgagtccgccacccccgagagcggccctggcacctccaccgagcccagcgagggcagcgcacccggcagccctgccggcagccccacctccacagaggagggaaccagcaccgagcccagcgaaggcagcgccccaggcaccagcaccgagcctagtgagcaggagattaaacggatcaacaagatcagaagaagacttgtgaaagacagcaacaccaagaaggccggcaagacaggccccatgaaaaccctgctggttagagtgatgacacccgatctgagagagcggctggaaaacctgagaaagaagcctgaaaatatcccccagcccatcagcaatacatctagagccaacctgaataagctgctgaccgattacaccgaaatgaagaaggcgatcctgcatgtgtactgggaagagttccagaaggaccctgtgggcctgatgagccgggtggcccagcctgccagcaagaagatcgatcagaacaagctgaaacctgagatggacgagaagggcaacctgaccaccgccggctttgcctgctctcagtgtggccagcccctgttcgtgtacaagctggagcaggtgtctgagaagggcaaggcttacaccaactacttcggacggtgcaatgtggccgagcacgaaaagctgatcctgctggcccagctgaagcccgagaaggatagcgacgaagccgtgacatatagcctgggaaagtttgggcagagggccctggatttctacagcattcatgtgaccaaggagtccacccaccccgtgaagcccctggcccagatcgccggaaacagatacgcctccggacctgtgggaaaggccctgagcgacgcatgtatgggcacaatcgcctccttcctgtctaagtaccaggacatcatcatcgaacaccagaaggtggtgaagggcaaccagaagagactggagagcctgcgggagctggccggcaaggaaaacctggaataccctagcgtgaccctgccacctcagcctcacaccaaggagggcgttgatgcctacaacgaagtgatcgcccgggtgcgaatgtgggtgaacctgaacctgtggcagaagctgaagctaagcagagatgatgccaagcctctgctgagactgaagggattcccttcctttcctctggtcgagagacaggccaacgaagtggactggtgggacatggtgtgtaacgtgaagaagctgatcaacgagaaaaaggaggatggcaaggtgttttggcagaatctggctggctacaagagacaggaagccctgagaccatacctgagcagcgaggaagatcggaagaagggaaagaaattcgctcggtaccagctgggcgacctgctgctgcacctggaaaagaagcacggcgaggactggggaaaggtgtacgacgaggcctgggagcggattgacaagaaagtggaaggcctgagcaagcacatcaagctggaagaggaacggagaagcgaggacgcccagagcaaggccgccctgaccgactggctgcgggctaaggccagcttcgtgatcgagggcctgaaggaggccgacaaggacgagttctgcagatgcgagctgaagctgcagaagtggtacggggacctgcggggaaagcccttcgccatcgaagccgagaacagcatcctggacatcagcggcttcagcaagcagtacaactgtgccttcatctggcagaaggacggcgtgaagaagctgaacctgtacctgatcatcaactacttcaagggcggcaagctgcggttcaagaagatcaaacctgaagccttcgaagccaacagattctacaccgtgatcaacaaaaagagcggcgagatcgtgcccatggaggtgaacttcaacttcgacgaccccaacctgatcatcctgcctctggcctttggcaagagacagggcagagaattcatctggaacgacctgctgtccctggaaaccggcagcctgaagctggccaacggaagagtgatcgagaagacactgtacaacagaagaacccggcaggatgagcctgccctgttcgtggccctgaccttcgagcggcgggaggtcctggactcctccaatatcaaaccaatgaacctgatcggcgtggcaagaggcgaaaacatccccgccgtgatcgccctgaccgaccccgagggctgcccactgagccggtttaaggatagcctgggaaacccaacccacatcctgagaatcggcgagagctataaggagaagcagcggaccatccaggccaagaaggaggtggagcagcggagagccggcggctacagccggaagtacgccagcaaagccaagaatctggcagacgatatggtgagaaacaccgctagagatctgctgtactacgccgtgacccaggatgccatgctgatcttcgccaacctgagccggggcttcggccggcagggcaagcggaccttcatggccgagagacagtacacacggatggaggactggctgaccgccaagctggcctacgagggcctgagcaagacctacctgtccaagacactggcccagtacacctccaagacatgcagcaactgtgggtttaccatcaccagcgccgactacgacagggtgctggagaagctgaagaagacagcaacaggctggatgaccacaattaacggcaaggagctgaaggtggagggccagattacctactacaacagatacaagagacagaacgtagtcaaggacctgtccgtcgagctggatagactgagcgaagaatctgtgaacaacgacatctcctcctggacaaagggcagaagcggagaagctctgagcctcctgaagaaaagattctcccatagacccgtgcaggagaagttcgtgtgcctgaactgcggcttcgagacacacgcagccgagcaagccgccctgaacatcgccagatcctggctgttcctgcggagccaggagtacaagaaataccagacaaacaagacaaccggcaacaccgataagagagccttcgtcgagacctggcagtccttttaccggaagaagcttaaggaggtgtggaaacctgccgtgcggtctggcggatctggcggaggctcctggccacgccctgctgaccttcagggacgtggccatcgagttcagccaggaggagtggggctgcctgaaccacacccagagggagctgtacagggacgtgatgctggagaactacggccacctgctgttcctgggcctgatcgtgagcaagcccgacctggtgagcttcctggagcagaccaaggacccctgggacggcaagaggaagaagaccgtggccttccaccccggcctggccctgagcggatctggctccggcagcggccccaagaaaaagagaaaagtctaagctgccttctgcggggcttgccttctggccatgcccttcttctctcccttgcacctgtacctcttggtctttgaataaagcctgagtaggaaggctagcaaaaaaaaaaaaaaaaaaaaaaaaaaaaaaaaaaaaaaaaaaaaaaaaaaaaaaaaaaaaaaaaaaaaaaaaaaaaaaaa

SEQ ID NO: 16035 - RNA, 9485 nt, synthetic construct
  source 1..9485: mol_type = other RNA
aggaaataagagagaaaagaagagtaagaagaaatataagagccaccatggcccctaagaagaagcgtaaagtgagccggatggaacgcctcgtctacgaggtgcggcagaagtgcagaaacatcgaggacatctgcatctcctgcggatctctgaacgtgaccctggagcacccactgttcatcggcggcatgtgccagaactgtaaaaactgttttctggagtgtgcctatcaatacgacgatgacggctaccagagctactgcaccatctgttgcggcggaagagaggtgctgatgtgtggaaataacaactgctgccggtgcttctgcgtggaatgcgtggacctgctggtgggccccggcgccgcccaggccgctattaaggaagatccttggaactgctacatgtgcggccacaagggcacatacggcctgctgagacggagagaggactggcctagcagactgcagatgttcttcgccaataaccacgaccaggagttcgacccccctaaggtgtaccctcccgtccccgccgagaagagaaagcccatccgggtcctgagcctgttcgatggcatcgccaccggtctgctggtgctgaaggacctgggcatccaggtggataggtacattgcctccgaggtgtgcgaggactccatcaccgtgggaatggtgcgtcatcagggcaagatcatgtacgtgggcgacgtgcggagcgtgacacagaagcatatccaggagtggggccctttcgacctggtgatcggcggcagcccttgcaatgacctgagcatcgtgaacccagcccggaagggcctgtacgagggaaccggcagactgttcttcgagttttacagactgctgcacgacgcccggcctaaggaaggcgacgaccggcccttcttttggctgttcgagaatgtggtggccatgggagtcagcgacaagcgggatattagccggttcctggagagcaaccccgtgatgatcgatgccaaggaagtgagcgccgcccaccgggccagatacttctggggcaatctgcctggcatgaacagacccctggccagcaccgtgaacgacaagctggagctgcaggagtgcctggagcacggccggatcgccaagttcagcaaggtgagaaccatcaccacccgaagcaacagcatcaaacaaggcaaggaccagcactttcctgtgttcatgaacgagaaggaggacatcctgtggtgtaccgagatggagagagtgttcgggttcccagtccactacacagatgtcagcaacatgtctagactggccagacagagactgctgggaagaagctggtccgtccctgtgatcagacacctgttcgcccctctgaaggagtacttcgcctgcgtgagcagcggcaacagcaacgccaacagccggggccccagcttctctagcggcctggtgccactgtccctgagagggagccacatgggccccatggagatctacaaaaccgtgagcgcctggaagcggcagcctgtgcgcgtgctgagcctgtttcggaatatcgataaagtcctgaaaagcctgggattcctggagagcggctctggctccggcggtggcaccctgaagtacgtggaggatgtgacaaacgtggtcagacgggatgtggagaagtggggccccttcgatctggtgtacggcagcacccaacccctgggcagctcttgtgaccggtgccctggctggtacatgtttcagttccaccggatcctgcagtacgccctgccgagacaggagtcccagcggccattcttttggattttcatggacaacttgctgctgaccgaggatgaccaggaaactaccactcggttcctgcagaccgaagccgtgaccctgcaggacgtgagaggccgggactaccagaacgccatgcgggtgtggtccaacatccctggactgaaaagcaagcacgcacctctgacccctaaagaagaggagtacctgcaggcccaggtgcggagcagaagcaagctggacgcccctaaggtggatctgctggtgaagaattgcctcctgcccctgagagagtacttcaagtatttcagccagaatagtctgcccctgggaggcagcggcggcggcgccctggtgacatttgaggacgtcgccgtgcggttcacccaggaggaatgggctctgctggatccttctcagaaaatcctgtaccgggacgtgatgagagagacataccggaatctgacctccgtgggcatcaactgggaatgttgggaccttgaagcctgcttcagaagcctgggaagaaacctgagagtgcaggtggtgaagagaaagtgcgagctgaccaacagcggcccctgcgccgagggcggcccaagcagcggcgcccctcctcccagcggcggcagcccagccggctccccaacctctaccgaggagggcacctctgagtccgccacccccgagagcggccctggcacctccaccgagcccagcgagggcagcgcacccggcagccctgccggcagccccacctccacagaggagggaaccagcaccgagcccagcgaaggcagcgccccaggcaccagcaccgagcctagtgagcaggagattaaacggatcaacaagatcagaagaagacttgtgaaagacagcaacaccaagaaggccggcaagacaggccccatgaaaaccctgctggttagagtgatgacacccgatctgagagagcggctggaaaacctgagaaagaagcctgaaaatatcccccagcccatcagcaatacatctagagccaacctgaataagctgctgaccgattacaccgaaatgaagaaggcgatcctgcatgtgtactgggaagagttccagaaggaccctgtgggcctgatgagccgggtggcccagcctgccagcaagaagatcgatcagaacaagctgaaacctgagatggacgagaagggcaacctgaccaccgccggctttgcctgctctcagtgtggccagcccctgttcgtgtacaagctggagcaggtgtctgagaagggcaaggcttacaccaactacttcggacggtgcaatgtggccgagcacgaaaagctgatcctgctggcccagctgaagcccgagaaggatagcgacgaagccgtgacatatagcctgggaaagtttgggcagagggccctggatttctacagcattcatgtgaccaaggagtccacccaccccgtgaagcccctggcccagatcgccggaaacagatacgcctccggacctgtgggaaaggccctgagcgacgcatgtatgggcacaatcgcctccttcctgtctaagtaccaggacatcatcatcgaacaccagaaggtggtgaagggcaaccagaagagactggagagcctgcgggagctggccggcaaggaaaacctggaataccctagcgtgaccctgccacctcagcctcacaccaaggagggcgttgatgcctacaacgaagtgatcgcccgggtgcgaatgtgggtgaacctgaacctgtggcagaagctgaagctaagcagagatgatgccaagcctctgctgagactgaagggattcccttcctttcctctggtcgagagacaggccaacgaagtggactggtgggacatggtgtgtaacgtgaagaagctgatcaacgagaaaaaggaggatggcaaggtgttttggcagaatctggctggctacaagagacaggaagccctgagaccatacctgagcagcgaggaagatcggaagaagggaaagaaattcgctcggtaccagctgggcgacctgctgctgcacctggaaaagaagcacggcgaggactggggaaaggtgtacgacgaggcctgggagcggattgacaagaaagtggaaggcctgagcaagcacatcaagctggaagaggaacggagaagcgaggacgcccagagcaaggccgccctgaccgactggctgcgggctaaggccagcttcgtgatcgagggcctgaaggaggccgacaaggacgagttctgcagatgcgagctgaagctgcagaagtggtacggggacctgcggggaaagcccttcgccatcgaagccgagaacagcatcctggacatcagcggcttcagcaagcagtacaactgtgccttcatctggcagaaggacggcgtgaagaagctgaacctgtacctgatcatcaactacttcaagggcggcaagctgcggttcaagaagatcaaacctgaagccttcgaagccaacagattctacaccgtgatcaacaaaaagagcggcgagatcgtgcccatggaggtgaacttcaacttcgacgaccccaacctgatcatcctgcctctggcctttggcaagagacagggcagagaattcatctggaacgacctgctgtccctggaaaccggcagcctgaagctggccaacggaagagtgatcgagaagacactgtacaacagaagaacccggcaggatgagcctgccctgttcgtggccctgaccttcgagcggcgggaggtcctggactcctccaatatcaaaccaatgaacctgatcggcgtggcaagaggcgaaaacatccccgccgtgatcgccctgaccgaccccgagggctgcccactgagccggtttaaggatagcctgggaaacccaacccacatcctgagaatcggcgagagctataaggagaagcagcggaccatccaggccaagaaggaggtggagcagcggagagccggcggctacagccggaagtacgccagcaaagccaagaatctggcagacgatatggtgagaaacaccgctagagatctgctgtactacgccgtgacccaggatgccatgctgatcttcgccaacctgagccggggcttcggccggcagggcaagcggaccttcatggccgagagacagtacacacggatggaggactggctgaccgccaagctggcctacgagggcctgagcaagacctacctgtccaagacactggcccagtacacctccaagacatgcagcaactgtgggtttaccatcaccagcgccgactacgacagggtgctggagaagctgaagaagacagcaacaggctggatgaccacaattaacggcaaggagctgaaggtggagggccagattacctactacaacagatacaagagacagaacgtagtcaaggacctgtccgtcgagctggatagactgagcgaagaatctgtgaacaacgacatctcctcctggacaaagggcagaagcggagaagctctgagcctcctgaagaaaagattctcccatagacccgtgcaggagaagttcgtgtgcctgaactgcggcttcgagacacacgcagccgagcaagccgccctgaacatcgccagatcctggctgttcctgcggagccaggagtacaagaaataccagacaaacaagacaaccggcaacaccgataagagagccttcgtcgagacctggcagtccttttaccggaagaagcttaaggaggtgtggaaacctgccgtgcggtctggcggatctggcggaggctccttccaggagctggtgaccttcagggacgtggccatcgacttcagcggccaggagtgggagtacctggacccccaccagagggacctgtacagggacgtgatgctggagaactacaggaacctggtgagcctgggccacagcatcagcaagcccgtgctggtggacctgctggagcagggcaaggagccctggatgatcctgagggaggagacccagttccccggcaaggaggacaggggccacggcggcccaagcagcggcgcccctcctcccagcggcggcagcccagccggctccccaacctctaccgaggagggcacctctgagtccgccacccccgagagcggccctggcacctccaccgagcccagcgagggcagcgcacccggcagccctgccggcagccccacctccacagaggagggaaccagcaccgagcccagcgaaggcagcgccccaggcaccagcaccgagcctagtgagcaggagattaaacggatcaacaagatcagaagaagacttgtgaaagacagcaacaccaagaaggccggcaagacaggccccatgaaaaccctgctggttagagtgatgacacccgatctgagagagcggctggaaaacctgagaaagaagcctgaaaatatcccccagcccatcagcaatacatctagagccaacctgaataagctgctgaccgattacaccgaaatgaagaaggcgatcctgcatgtgtactgggaagagttccagaaggaccctgtgggcctgatgagccgggtggcccagcctgccagcaagaagatcgatcagaacaagctgaaacctgagatggacgagaagggcaacctgaccaccgccggctttgcctgctctcagtgtggccagcccctgttcgtgtacaagctggagcaggtgtctgagaagggcaaggcttacaccaactacttcggacggtgcaatgtggccgagcacgaaaagctgatcctgctggcccagctgaagcccgagaaggatagcgacgaagccgtgacatatagcctgggaaagtttgggcagagggccctggatttctacagcattcatgtgaccaaggagtccacccaccccgtgaagcccctggcccagatcgccggaaacagatacgcctccggacctgtgggaaaggccctgagcgacgcatgtatgggcacaatcgcctccttcctgtctaagtaccaggacatcatcatcgaacaccagaaggtggtgaagggcaaccagaagagactggagagcctgcgggagctggccggcaaggaaaacctggaataccctagcgtgaccctgccacctcagcctcacaccaaggagggcgttgatgcctacaacgaagtgatcgcccgggtgcgaatgtgggtgaacctgaacctgtggcagaagctgaagctaagcagagatgatgccaagcctctgctgagactgaagggattcccttcctttcctctggtcgagagacaggccaacgaagtggactggtgggacatggtgtgtaacgtgaagaagctgatcaacgagaaaaaggaggatggcaaggtgttttggcagaatctggctggctacaagagacaggaagccctgagaccatacctgagcagcgaggaagatcggaagaagggaaagaaattcgctcggtaccagctgggcgacctgctgctgcacctggaaaagaagcacggcgaggactggggaaaggtgtacgacgaggcctgggagcggattgacaagaaagtggaaggcctgagcaagcacatcaagctggaagaggaacggagaagcgaggacgcccagagcaaggccgccctgaccgactggctgcgggctaaggccagcttcgtgatcgagggcctgaaggaggccgacaaggacgagttctgcagatgcgagctgaagctgcagaagtggtacggggacctgcggggaaagcccttcgccatcgaagccgagaacagcatcctggacatcagcggcttcagcaagcagtacaactgtgccttcatctggcagaaggacggcgtgaagaagctgaacctgtacctgatcatcaactacttcaagggcggcaagctgcggttcaagaagatcaaacctgaagccttcgaagccaacagattctacaccgtgatcaacaaaaagagcggcgagatcgtgcccatggaggtgaacttcaacttcgacgaccccaacctgatcatcctgcctctggcctttggcaagagacagggcagagaattcatctggaacgacctgctgtccctggaaaccggcagcctgaagctggccaacggaagagtgatcgagaagacactgtacaacagaagaacccggcaggatgagcctgccctgttcgtggccctgaccttcgagcggcgggaggtcctggactcctccaatatcaaaccaatgaacctgatcggcgtggcaagaggcgaaaacatccccgccgtgatcgccctgaccgaccccgagggctgcccactgagccggtttaaggatagcctgggaaacccaacccacatcctgagaatcggcgagagctataaggagaagcagcggaccatccaggccaagaaggaggtggagcagcggagagccggcggctacagccggaagtacgccagcaaagccaagaatctggcagacgatatggtgagaaacaccgctagagatctgctgtactacgccgtgacccaggatgccatgctgatcttcgccaacctgagccggggcttcggccggcagggcaagcggaccttcatggccgagagacagtacacacggatggaggactggctgaccgccaagctggcctacgagggcctgagcaagacctacctgtccaagacactggcccagtacacctccaagacatgcagcaactgtgggtttaccatcaccagcgccgactacgacagggtgctggagaagctgaagaagacagcaacaggctggatgaccacaattaacggcaaggagctgaaggtggagggccagattacctactacaacagatacaagagacagaacgtagtcaaggacctgtccgtcgagctggatagactgagcgaagaatctgtgaacaacgacatctcctcctggacaaagggcagaagcggagaagctctgagcctcctgaagaaaagattctcccatagacccgtgcaggagaagttcgtgtgcctgaactgcggcttcgagacacacgcagccgagcaagccgccctgaacatcgccagatcctggctgttcctgcggagccaggagtacaagaaataccagacaaacaagacaaccggcaacaccgataagagagccttcgtcgagacctggcagtccttttaccggaagaagcttaaggaggtgtggaaacctgccgtgcggtctggcggatctggcggaggctcctttccaggagctggtgaccttcagggacgtggccatcgacttcagcggccaggagtgggagtacctggacccccaccagagggacctgtacagggacgtgatgctggagaactacaggaacctggtgagcctgggccacagcatcagcaagcccgtgctggtggacctgctggagcagggcaaggagccctggatgatcctgagggaggagacccagttccccggcaaggaggacaggggccacggatctggctccggcagcggccccaagaaaaagagaaaagtctaagctgccttctgcggggcttgccttctggccatgcccttcttctctcccttgcacctgtacctcttggtctttgaataaagcctgagtaggaaggctagcaaaaaaaaaaaaaaaaaaaaaaaaaaaaaaaaaaaaaaaaaaaaaaaaaaaaaaaaaaaaaaaaaaaaaaaaaaaaaaaa

SEQ ID NO: 16036 - RNA, 9485 nt, synthetic construct
  source 1..9485: mol_type = other RNA
aggaaataagagagaaaagaagagtaagaagaaatataagagccaccatggcccctaagaagaagcgtaaagtgagccggatggaacgcctcgtctacgaggtgcggcagaagtgcagaaacatcgaggacatctgcatctcctgcggatctctgaacgtgaccctggagcacccactgttcatcggcggcatgtgccagaactgtaaaaactgttttctggagtgtgcctatcaatacgacgatgacggctaccagagctactgcaccatctgttgcggcggaagagaggtgctgatgtgtggaaataacaactgctgccggtgcttctgcgtggaatgcgtggacctgctggtgggccccggcgccgcccaggccgctattaaggaagatccttggaactgctacatgtgcggccacaagggcacatacggcctgctgagacggagagaggactggcctagcagactgcagatgttcttcgccaataaccacgaccaggagttcgacccccctaaggtgtaccctcccgtccccgccgagaagagaaagcccatccgggtcctgagcctgttcgatggcatcgccaccggtctgctggtgctgaaggacctgggcatccaggtggataggtacattgcctccgaggtgtgcgaggactccatcaccgtgggaatggtgcgtcatcagggcaagatcatgtacgtgggcgacgtgcggagcgtgacacagaagcatatccaggagtggggccctttcgacctggtgatcggcggcagcccttgcaatgacctgagcatcgtgaacccagcccggaagggcctgtacgagggaaccggcagactgttcttcgagttttacagactgctgcacgacgcccggcctaaggaaggcgacgaccggcccttcttttggctgttcgagaatgtggtggccatgggagtcagcgacaagcgggatattagccggttcctggagagcaaccccgtgatgatcgatgccaaggaagtgagcgccgcccaccgggccagatacttctggggcaatctgcctggcatgaacagacccctggccagcaccgtgaacgacaagctggagctgcaggagtgcctggagcacggccggatcgccaagttcagcaaggtgagaaccatcaccacccgaagcaacagcatcaaacaaggcaaggaccagcactttcctgtgttcatgaacgagaaggaggacatcctgtggtgtaccgagatggagagagtgttcgggttcccagtccactacacagatgtcagcaacatgtctagactggccagacagagactgctgggaagaagctggtccgtccctgtgatcagacacctgttcgcccctctgaaggagtacttcgcctgcgtgagcagcggcaacagcaacgccaacagccggggccccagcttctctagcggcctggtgccactgtccctgagagggagccacatgggccccatggagatctacaaaaccgtgagcgcctggaagcggcagcctgtgcgcgtgctgagcctgtttcggaatatcgataaagtcctgaaaagcctgggattcctggagagcggctctggctccggcggtggcaccctgaagtacgtggaggatgtgacaaacgtggtcagacgggatgtggagaagtggggccccttcgatctggtgtacggcagcacccaacccctgggcagctcttgtgaccggtgccctggctggtacatgtttcagttccaccggatcctgcagtacgccctgccgagacaggagtcccagcggccattcttttggattttcatggacaacttgctgctgaccgaggatgaccaggaaactaccactcggttcctgcagaccgaagccgtgaccctgcaggacgtgagaggccgggactaccagaacgccatgcgggtgtggtccaacatccctggactgaaaagcaagcacgcacctctgacccctaaagaagaggagtacctgcaggcccaggtgcggagcagaagcaagctggacgcccctaaggtggatctgctggtgaagaattgcctcctgcccctgagagagtacttcaagtatttcagccagaatagtctgcccctgggaggcagcggcggcggcgccctggtgacatttgaggacgtcgccgtgcggttcacccaggaggaatgggctctgctggatccttctcagaaaatcctgtaccgggacgtgatgagagagacataccggaatctgacctccgtgggcatcaactgggaatgttgggaccttgaagcctgcttcagaagcctgggaagaaacctgagagtgcaggtggtgaagagaaagtgcgagctgaccaacagcggcccctgcgccgagggcggcccaagcagcggcgcccctcctcccagcggcggcagcccagccggctccccaacctctaccgaggagggcacctctgagtccgccacccccgagagcggccctggcacctccaccgagcccagcgagggcagcgcacccggcagccctgccggcagccccacctccacagaggagggaaccagcaccgagcccagcgaaggcagcgccccaggcaccagcaccgagcctagtgagcaggagattaaacggatcaacaagatcagaagaagacttgtgaaagacagcaacaccaagaaggccggcaagacaggccccatgaaaaccctgctggttagagtgatgacacccgatctgagagagcggctggaaaacctgagaaagaagcctgaaaatatcccccagcccatcagcaatacatctagagccaacctgaataagctgctgaccgattacaccgaaatgaagaaggcgatcctgcatgtgtactgggaagagttccagaaggaccctgtgggcctgatgagccgggtggcccagcctgccagcaagaagatcgatcagaacaagctgaaacctgagatggacgagaagggcaacctgaccaccgccggctttgcctgctctcagtgtggccagcccctgttcgtgtacaagctggagcaggtgtctgagaagggcaaggcttacaccaactacttcggacggtgcaatgtggccgagcacgaaaagctgatcctgctggcccagctgaagcccgagaaggatagcgacgaagccgtgacatatagcctgggaaagtttgggcagagggccctggatttctacagcattcatgtgaccaaggagtccacccaccccgtgaagcccctggcccagatcgccggaaacagatacgcctccggacctgtgggaaaggccctgagcgacgcatgtatgggcacaatcgcctccttcctgtctaagtaccaggacatcatcatcgaacaccagaaggtggtgaagggcaaccagaagagactggagagcctgcgggagctggccggcaaggaaaacctggaataccctagcgtgaccctgccacctcagcctcacaccaaggagggcgttgatgcctacaacgaagtgatcgcccgggtgcgaatgtgggtgaacctgaacctgtggcagaagctgaagctaagcagagatgatgccaagcctctgctgagactgaagggattcccttcctttcctctggtcgagagacaggccaacgaagtggactggtgggacatggtgtgtaacgtgaagaagctgatcaacgagaaaaaggaggatggcaaggtgttttggcagaatctggctggctacaagagacaggaagccctgagaccatacctgagcagcgaggaagatcggaagaagggaaagaaattcgctcggtaccagctgggcgacctgctgctgcacctggaaaagaagcacggcgaggactggggaaaggtgtacgacgaggcctgggagcggattgacaagaaagtggaaggcctgagcaagcacatcaagctggaagaggaacggagaagcgaggacgcccagagcaaggccgccctgaccgactggctgcgggctaaggccagcttcgtgatcgagggcctgaaggaggccgacaaggacgagttctgcagatgcgagctgaagctgcagaagtggtacggggacctgcggggaaagcccttcgccatcgaagccgagaacagcatcctggacatcagcggcttcagcaagcagtacaactgtgccttcatctggcagaaggacggcgtgaagaagctgaacctgtacctgatcatcaactacttcaagggcggcaagctgcggttcaagaagatcaaacctgaagccttcgaagccaacagattctacaccgtgatcaacaaaaagagcggcgagatcgtgcccatggaggtgaacttcaacttcgacgaccccaacctgatcatcctgcctctggcctttggcaagagacagggcagagaattcatctggaacgacctgctgtccctggaaaccggcagcctgaagctggccaacggaagagtgatcgagaagacactgtacaacagaagaacccggcaggatgagcctgccctgttcgtggccctgaccttcgagcggcgggaggtcctggactcctccaatatcaaaccaatgaacctgatcggcgtggcaagaggcgaaaacatccccgccgtgatcgccctgaccgaccccgagggctgcccactgagccggtttaaggatagcctgggaaacccaacccacatcctgagaatcggcgagagctataaggagaagcagcggaccatccaggccaagaaggaggtggagcagcggagagccggcggctacagccggaagtacgccagcaaagccaagaatctggcagacgatatggtgagaaacaccgctagagatctgctgtactacgccgtgacccaggatgccatgctgatcttcgccaacctgagccggggcttcggccggcagggcaagcggaccttcatggccgagagacagtacacacggatggaggactggctgaccgccaagctggcctacgagggcctgagcaagacctacctgtccaagacactggcccagtacacctccaagacatgcagcaactgtgggtttaccatcaccagcgccgactacgacagggtgctggagaagctgaagaagacagcaacaggctggatgaccacaattaacggcaaggagctgaaggtggagggccagattacctactacaacagatacaagagacagaacgtagtcaaggacctgtccgtcgagctggatagactgagcgaagaatctgtgaacaacgacatctcctcctggacaaagggcagaagcggagaagctctgagcctcctgaagaaaagattctcccatagacccgtgcaggagaagttcgtgtgcctgaactgcggcttcgagacacacgcagccgagcaagccgccctgaacatcgccagatcctggctgttcctgcggagccaggagtacaagaaataccagacaaacaagacaaccggcaacaccgataagagagccttcgtcgagacctggcagtccttttaccggaagaagcttaaggaggtgtggaaacctgccgtgcggtctggcggatctggcggaggctccctgctgaccttcgaggacgtggccgtgtacttcaccgaggaggagtgggccctgctggaccccaaccagaagatcctgtacaacgacgtgatgcaggagaactacgagaacgtgatctgcctgggcctgaagctgaagaacgacaccggcaacgaccagcccaccagcgtgagcaccctggagatccaggccagcggctgcaaggtgctgaggaaggccaggatcaaggtggcccagaagaccggcggcccaagcagcggcgcccctcctcccagcggcggcagcccagccggctccccaacctctaccgaggagggcacctctgagtccgccacccccgagagcggccctggcacctccaccgagcccagcgagggcagcgcacccggcagccctgccggcagccccacctccacagaggagggaaccagcaccgagcccagcgaaggcagcgccccaggcaccagcaccgagcctagtgagcaggagattaaacggatcaacaagatcagaagaagacttgtgaaagacagcaacaccaagaaggccggcaagacaggccccatgaaaaccctgctggttagagtgatgacacccgatctgagagagcggctggaaaacctgagaaagaagcctgaaaatatcccccagcccatcagcaatacatctagagccaacctgaataagctgctgaccgattacaccgaaatgaagaaggcgatcctgcatgtgtactgggaagagttccagaaggaccctgtgggcctgatgagccgggtggcccagcctgccagcaagaagatcgatcagaacaagctgaaacctgagatggacgagaagggcaacctgaccaccgccggctttgcctgctctcagtgtggccagcccctgttcgtgtacaagctggagcaggtgtctgagaagggcaaggcttacaccaactacttcggacggtgcaatgtggccgagcacgaaaagctgatcctgctggcccagctgaagcccgagaaggatagcgacgaagccgtgacatatagcctgggaaagtttgggcagagggccctggatttctacagcattcatgtgaccaaggagtccacccaccccgtgaagcccctggcccagatcgccggaaacagatacgcctccggacctgtgggaaaggccctgagcgacgcatgtatgggcacaatcgcctccttcctgtctaagtaccaggacatcatcatcgaacaccagaaggtggtgaagggcaaccagaagagactggagagcctgcgggagctggccggcaaggaaaacctggaataccctagcgtgaccctgccacctcagcctcacaccaaggagggcgttgatgcctacaacgaagtgatcgcccgggtgcgaatgtgggtgaacctgaacctgtggcagaagctgaagctaagcagagatgatgccaagcctctgctgagactgaagggattcccttcctttcctctggtcgagagacaggccaacgaagtggactggtgggacatggtgtgtaacgtgaagaagctgatcaacgagaaaaaggaggatggcaaggtgttttggcagaatctggctggctacaagagacaggaagccctgagaccatacctgagcagcgaggaagatcggaagaagggaaagaaattcgctcggtaccagctgggcgacctgctgctgcacctggaaaagaagcacggcgaggactggggaaaggtgtacgacgaggcctgggagcggattgacaagaaagtggaaggcctgagcaagcacatcaagctggaagaggaacggagaagcgaggacgcccagagcaaggccgccctgaccgactggctgcgggctaaggccagcttcgtgatcgagggcctgaaggaggccgacaaggacgagttctgcagatgcgagctgaagctgcagaagtggtacggggacctgcggggaaagcccttcgccatcgaagccgagaacagcatcctggacatcagcggcttcagcaagcagtacaactgtgccttcatctggcagaaggacggcgtgaagaagctgaacctgtacctgatcatcaactacttcaagggcggcaagctgcggttcaagaagatcaaacctgaagccttcgaagccaacagattctacaccgtgatcaacaaaaagagcggcgagatcgtgcccatggaggtgaacttcaacttcgacgaccccaacctgatcatcctgcctctggcctttggcaagagacagggcagagaattcatctggaacgacctgctgtccctggaaaccggcagcctgaagctggccaacggaagagtgatcgagaagacactgtacaacagaagaacccggcaggatgagcctgccctgttcgtggccctgaccttcgagcggcgggaggtcctggactcctccaatatcaaaccaatgaacctgatcggcgtggcaagaggcgaaaacatccccgccgtgatcgccctgaccgaccccgagggctgcccactgagccggtttaaggatagcctgggaaacccaacccacatcctgagaatcggcgagagctataaggagaagcagcggaccatccaggccaagaaggaggtggagcagcggagagccggcggctacagccggaagtacgccagcaaagccaagaatctggcagacgatatggtgagaaacaccgctagagatctgctgtactacgccgtgacccaggatgccatgctgatcttcgccaacctgagccggggcttcggccggcagggcaagcggaccttcatggccgagagacagtacacacggatggaggactggctgaccgccaagctggcctacgagggcctgagcaagacctacctgtccaagacactggcccagtacacctccaagacatgcagcaactgtgggtttaccatcaccagcgccgactacgacagggtgctggagaagctgaagaagacagcaacaggctggatgaccacaattaacggcaaggagctgaaggtggagggccagattacctactacaacagatacaagagacagaacgtagtcaaggacctgtccgtcgagctggatagactgagcgaagaatctgtgaacaacgacatctcctcctggacaaagggcagaagcggagaagctctgagcctcctgaagaaaagattctcccatagacccgtgcaggagaagttcgtgtgcctgaactgcggcttcgagacacacgcagccgagcaagccgccctgaacatcgccagatcctggctgttcctgcggagccaggagtacaagaaataccagacaaacaagacaaccggcaacaccgataagagagccttcgtcgagacctggcagtccttttaccggaagaagcttaaggaggtgtggaaacctgccgtgcggtctggcggatctggcggaggctcctctgctgaccttcgaggacgtggccgtgtacttcaccgaggaggagtgggccctgctggaccccaaccagaagatcctgtacaacgacgtgatgcaggagaactacgagaacgtgatctgcctgggcctgaagctgaagaacgacaccggcaacgaccagcccaccagcgtgagcaccctggagatccaggccagcggctgcaaggtgctgaggaaggccaggatcaaggtggcccagaagaccggatctggctccggcagcggccccaagaaaaagagaaaagtctaagctgccttctgcggggcttgccttctggccatgcccttcttctctcccttgcacctgtacctcttggtctttgaataaagcctgagtaggaaggctagcaaaaaaaaaaaaaaaaaaaaaaaaaaaaaaaaaaaaaaaaaaaaaaaaaaaaaaaaaaaaaaaaaaaaaaaaaaaaaaaa

SEQ ID NO: 16037 - RNA, 9485 nt, synthetic construct
  source 1..9485: mol_type = other RNA
aggaaataagagagaaaagaagagtaagaagaaatataagagccaccatggcccctaagaagaagcgtaaagtgagccggatggaacgcctcgtctacgaggtgcggcagaagtgcagaaacatcgaggacatctgcatctcctgcggatctctgaacgtgaccctggagcacccactgttcatcggcggcatgtgccagaactgtaaaaactgttttctggagtgtgcctatcaatacgacgatgacggctaccagagctactgcaccatctgttgcggcggaagagaggtgctgatgtgtggaaataacaactgctgccggtgcttctgcgtggaatgcgtggacctgctggtgggccccggcgccgcccaggccgctattaaggaagatccttggaactgctacatgtgcggccacaagggcacatacggcctgctgagacggagagaggactggcctagcagactgcagatgttcttcgccaataaccacgaccaggagttcgacccccctaaggtgtaccctcccgtccccgccgagaagagaaagcccatccgggtcctgagcctgttcgatggcatcgccaccggtctgctggtgctgaaggacctgggcatccaggtggataggtacattgcctccgaggtgtgcgaggactccatcaccgtgggaatggtgcgtcatcagggcaagatcatgtacgtgggcgacgtgcggagcgtgacacagaagcatatccaggagtggggccctttcgacctggtgatcggcggcagcccttgcaatgacctgagcatcgtgaacccagcccggaagggcctgtacgagggaaccggcagactgttcttcgagttttacagactgctgcacgacgcccggcctaaggaaggcgacgaccggcccttcttttggctgttcgagaatgtggtggccatgggagtcagcgacaagcgggatattagccggttcctggagagcaaccccgtgatgatcgatgccaaggaagtgagcgccgcccaccgggccagatacttctggggcaatctgcctggcatgaacagacccctggccagcaccgtgaacgacaagctggagctgcaggagtgcctggagcacggccggatcgccaagttcagcaaggtgagaaccatcaccacccgaagcaacagcatcaaacaaggcaaggaccagcactttcctgtgttcatgaacgagaaggaggacatcctgtggtgtaccgagatggagagagtgttcgggttcccagtccactacacagatgtcagcaacatgtctagactggccagacagagactgctgggaagaagctggtccgtccctgtgatcagacacctgttcgcccctctgaaggagtacttcgcctgcgtgagcagcggcaacagcaacgccaacagccggggccccagcttctctagcggcctggtgccactgtccctgagagggagccacatgggccccatggagatctacaaaaccgtgagcgcctggaagcggcagcctgtgcgcgtgctgagcctgtttcggaatatcgataaagtcctgaaaagcctgggattcctggagagcggctctggctccggcggtggcaccctgaagtacgtggaggatgtgacaaacgtggtcagacgggatgtggagaagtggggccccttcgatctggtgtacggcagcacccaacccctgggcagctcttgtgaccggtgccctggctggtacatgtttcagttccaccggatcctgcagtacgccctgccgagacaggagtcccagcggccattcttttggattttcatggacaacttgctgctgaccgaggatgaccaggaaactaccactcggttcctgcagaccgaagccgtgaccctgcaggacgtgagaggccgggactaccagaacgccatgcgggtgtggtccaacatccctggactgaaaagcaagcacgcacctctgacccctaaagaagaggagtacctgcaggcccaggtgcggagcagaagcaagctggacgcccctaaggtggatctgctggtgaagaattgcctcctgcccctgagagagtacttcaagtatttcagccagaatagtctgcccctgggaggcagcggcggcggcgccctggtgacatttgaggacgtcgccgtgcggttcacccaggaggaatgggctctgctggatccttctcagaaaatcctgtaccgggacgtgatgagagagacataccggaatctgacctccgtgggcatcaactgggaatgttgggaccttgaagcctgcttcagaagcctgggaagaaacctgagagtgcaggtggtgaagagaaagtgcgagctgaccaacagcggcccctgcgccgagggcggcccaagcagcggcgcccctcctcccagcggcggcagcccagccggctccccaacctctaccgaggagggcacctctgagtccgccacccccgagagcggccctggcacctccaccgagcccagcgagggcagcgcacccggcagccctgccggcagccccacctccacagaggagggaaccagcaccgagcccagcgaaggcagcgccccaggcaccagcaccgagcctagtgagcaggagattaaacggatcaacaagatcagaagaagacttgtgaaagacagcaacaccaagaaggccggcaagacaggccccatgaaaaccctgctggttagagtgatgacacccgatctgagagagcggctggaaaacctgagaaagaagcctgaaaatatcccccagcccatcagcaatacatctagagccaacctgaataagctgctgaccgattacaccgaaatgaagaaggcgatcctgcatgtgtactgggaagagttccagaaggaccctgtgggcctgatgagccgggtggcccagcctgccagcaagaagatcgatcagaacaagctgaaacctgagatggacgagaagggcaacctgaccaccgccggctttgcctgctctcagtgtggccagcccctgttcgtgtacaagctggagcaggtgtctgagaagggcaaggcttacaccaactacttcggacggtgcaatgtggccgagcacgaaaagctgatcctgctggcccagctgaagcccgagaaggatagcgacgaagccgtgacatatagcctgggaaagtttgggcagagggccctggatttctacagcattcatgtgaccaaggagtccacccaccccgtgaagcccctggcccagatcgccggaaacagatacgcctccggacctgtgggaaaggccctgagcgacgcatgtatgggcacaatcgcctccttcctgtctaagtaccaggacatcatcatcgaacaccagaaggtggtgaagggcaaccagaagagactggagagcctgcgggagctggccggcaaggaaaacctggaataccctagcgtgaccctgccacctcagcctcacaccaaggagggcgttgatgcctacaacgaagtgatcgcccgggtgcgaatgtgggtgaacctgaacctgtggcagaagctgaagctaagcagagatgatgccaagcctctgctgagactgaagggattcccttcctttcctctggtcgagagacaggccaacgaagtggactggtgggacatggtgtgtaacgtgaagaagctgatcaacgagaaaaaggaggatggcaaggtgttttggcagaatctggctggctacaagagacaggaagccctgagaccatacctgagcagcgaggaagatcggaagaagggaaagaaattcgctcggtaccagctgggcgacctgctgctgcacctggaaaagaagcacggcgaggactggggaaaggtgtacgacgaggcctgggagcggattgacaagaaagtggaaggcctgagcaagcacatcaagctggaagaggaacggagaagcgaggacgcccagagcaaggccgccctgaccgactggctgcgggctaaggccagcttcgtgatcgagggcctgaaggaggccgacaaggacgagttctgcagatgcgagctgaagctgcagaagtggtacggggacctgcggggaaagcccttcgccatcgaagccgagaacagcatcctggacatcagcggcttcagcaagcagtacaactgtgccttcatctggcagaaggacggcgtgaagaagctgaacctgtacctgatcatcaactacttcaagggcggcaagctgcggttcaagaagatcaaacctgaagccttcgaagccaacagattctacaccgtgatcaacaaaaagagcggcgagatcgtgcccatggaggtgaacttcaacttcgacgaccccaacctgatcatcctgcctctggcctttggcaagagacagggcagagaattcatctggaacgacctgctgtccctggaaaccggcagcctgaagctggccaacggaagagtgatcgagaagacactgtacaacagaagaacccggcaggatgagcctgccctgttcgtggccctgaccttcgagcggcgggaggtcctggactcctccaatatcaaaccaatgaacctgatcggcgtggcaagaggcgaaaacatccccgccgtgatcgccctgaccgaccccgagggctgcccactgagccggtttaaggatagcctgggaaacccaacccacatcctgagaatcggcgagagctataaggagaagcagcggaccatccaggccaagaaggaggtggagcagcggagagccggcggctacagccggaagtacgccagcaaagccaagaatctggcagacgatatggtgagaaacaccgctagagatctgctgtactacgccgtgacccaggatgccatgctgatcttcgccaacctgagccggggcttcggccggcagggcaagcggaccttcatggccgagagacagtacacacggatggaggactggctgaccgccaagctggcctacgagggcctgagcaagacctacctgtccaagacactggcccagtacacctccaagacatgcagcaactgtgggtttaccatcaccagcgccgactacgacagggtgctggagaagctgaagaagacagcaacaggctggatgaccacaattaacggcaaggagctgaaggtggagggccagattacctactacaacagatacaagagacagaacgtagtcaaggacctgtccgtcgagctggatagactgagcgaagaatctgtgaacaacgacatctcctcctggacaaagggcagaagcggagaagctctgagcctcctgaagaaaagattctcccatagacccgtgcaggagaagttcgtgtgcctgaactgcggcttcgagacacacgcagccgagcaagccgccctgaacatcgccagatcctggctgttcctgcggagccaggagtacaagaaataccagacaaacaagacaaccggcaacaccgataagagagccttcgtcgagacctggcagtccttttaccggaagaagcttaaggaggtgtggaaacctgccgtgcggtctggcggatctggcggaggctccagccagggcctggtgaccttcagggacgtggccctggacttcagccaggaggagtgggagtggctggaccagagccagaaggacctgtacagggacgtgatgctggagaactacaggaacctggtgtggctgggcctgagcatcagcaagcccaacatgatcagcctgctggagcagggcaaggagccctggatggtggagaaggagatgagcgacggccagtgcgccgactgggacagctggggcggcccaagcagcggcgcccctcctcccagcggcggcagcccagccggctccccaacctctaccgaggagggcacctctgagtccgccacccccgagagcggccctggcacctccaccgagcccagcgagggcagcgcacccggcagccctgccggcagccccacctccacagaggagggaaccagcaccgagcccagcgaaggcagcgccccaggcaccagcaccgagcctagtgagcaggagattaaacggatcaacaagatcagaagaagacttgtgaaagacagcaacaccaagaaggccggcaagacaggccccatgaaaaccctgctggttagagtgatgacacccgatctgagagagcggctggaaaacctgagaaagaagcctgaaaatatcccccagcccatcagcaatacatctagagccaacctgaataagctgctgaccgattacaccgaaatgaagaaggcgatcctgcatgtgtactgggaagagttccagaaggaccctgtgggcctgatgagccgggtggcccagcctgccagcaagaagatcgatcagaacaagctgaaacctgagatggacgagaagggcaacctgaccaccgccggctttgcctgctctcagtgtggccagcccctgttcgtgtacaagctggagcaggtgtctgagaagggcaaggcttacaccaactacttcggacggtgcaatgtggccgagcacgaaaagctgatcctgctggcccagctgaagcccgagaaggatagcgacgaagccgtgacatatagcctgggaaagtttgggcagagggccctggatttctacagcattcatgtgaccaaggagtccacccaccccgtgaagcccctggcccagatcgccggaaacagatacgcctccggacctgtgggaaaggccctgagcgacgcatgtatgggcacaatcgcctccttcctgtctaagtaccaggacatcatcatcgaacaccagaaggtggtgaagggcaaccagaagagactggagagcctgcgggagctggccggcaaggaaaacctggaataccctagcgtgaccctgccacctcagcctcacaccaaggagggcgttgatgcctacaacgaagtgatcgcccgggtgcgaatgtgggtgaacctgaacctgtggcagaagctgaagctaagcagagatgatgccaagcctctgctgagactgaagggattcccttcctttcctctggtcgagagacaggccaacgaagtggactggtgggacatggtgtgtaacgtgaagaagctgatcaacgagaaaaaggaggatggcaaggtgttttggcagaatctggctggctacaagagacaggaagccctgagaccatacctgagcagcgaggaagatcggaagaagggaaagaaattcgctcggtaccagctgggcgacctgctgctgcacctggaaaagaagcacggcgaggactggggaaaggtgtacgacgaggcctgggagcggattgacaagaaagtggaaggcctgagcaagcacatcaagctggaagaggaacggagaagcgaggacgcccagagcaaggccgccctgaccgactggctgcgggctaaggccagcttcgtgatcgagggcctgaaggaggccgacaaggacgagttctgcagatgcgagctgaagctgcagaagtggtacggggacctgcggggaaagcccttcgccatcgaagccgagaacagcatcctggacatcagcggcttcagcaagcagtacaactgtgccttcatctggcagaaggacggcgtgaagaagctgaacctgtacctgatcatcaactacttcaagggcggcaagctgcggttcaagaagatcaaacctgaagccttcgaagccaacagattctacaccgtgatcaacaaaaagagcggcgagatcgtgcccatggaggtgaacttcaacttcgacgaccccaacctgatcatcctgcctctggcctttggcaagagacagggcagagaattcatctggaacgacctgctgtccctggaaaccggcagcctgaagctggccaacggaagagtgatcgagaagacactgtacaacagaagaacccggcaggatgagcctgccctgttcgtggccctgaccttcgagcggcgggaggtcctggactcctccaatatcaaaccaatgaacctgatcggcgtggcaagaggcgaaaacatccccgccgtgatcgccctgaccgaccccgagggctgcccactgagccggtttaaggatagcctgggaaacccaacccacatcctgagaatcggcgagagctataaggagaagcagcggaccatccaggccaagaaggaggtggagcagcggagagccggcggctacagccggaagtacgccagcaaagccaagaatctggcagacgatatggtgagaaacaccgctagagatctgctgtactacgccgtgacccaggatgccatgctgatcttcgccaacctgagccggggcttcggccggcagggcaagcggaccttcatggccgagagacagtacacacggatggaggactggctgaccgccaagctggcctacgagggcctgagcaagacctacctgtccaagacactggcccagtacacctccaagacatgcagcaactgtgggtttaccatcaccagcgccgactacgacagggtgctggagaagctgaagaagacagcaacaggctggatgaccacaattaacggcaaggagctgaaggtggagggccagattacctactacaacagatacaagagacagaacgtagtcaaggacctgtccgtcgagctggatagactgagcgaagaatctgtgaacaacgacatctcctcctggacaaagggcagaagcggagaagctctgagcctcctgaagaaaagattctcccatagacccgtgcaggagaagttcgtgtgcctgaactgcggcttcgagacacacgcagccgagcaagccgccctgaacatcgccagatcctggctgttcctgcggagccaggagtacaagaaataccagacaaacaagacaaccggcaacaccgataagagagccttcgtcgagacctggcagtccttttaccggaagaagcttaaggaggtgtggaaacctgccgtgcggtctggcggatctggcggaggctcctagccagggcctggtgaccttcagggacgtggccctggacttcagccaggaggagtgggagtggctggaccagagccagaaggacctgtacagggacgtgatgctggagaactacaggaacctggtgtggctgggcctgagcatcagcaagcccaacatgatcagcctgctggagcagggcaaggagccctggatggtggagaaggagatgagcgacggccagtgcgccgactgggacagctggggatctggctccggcagcggccccaagaaaaagagaaaagtctaagctgccttctgcggggcttgccttctggccatgcccttcttctctcccttgcacctgtacctcttggtctttgaataaagcctgagtaggaaggctagcaaaaaaaaaaaaaaaaaaaaaaaaaaaaaaaaaaaaaaaaaaaaaaaaaaaaaaaaaaaaaaaaaaaaaaaaaaaaaaaa

SEQ ID NO: 16038 - RNA, 9485 nt, synthetic construct
  source 1..9485: mol_type = other RNA
aggaaataagagagaaaagaagagtaagaagaaatataagagccaccatggcccctaagaagaagcgtaaagtgagccggatggaacgcctcgtctacgaggtgcggcagaagtgcagaaacatcgaggacatctgcatctcctgcggatctctgaacgtgaccctggagcacccactgttcatcggcggcatgtgccagaactgtaaaaactgttttctggagtgtgcctatcaatacgacgatgacggctaccagagctactgcaccatctgttgcggcggaagagaggtgctgatgtgtggaaataacaactgctgccggtgcttctgcgtggaatgcgtggacctgctggtgggccccggcgccgcccaggccgctattaaggaagatccttggaactgctacatgtgcggccacaagggcacatacggcctgctgagacggagagaggactggcctagcagactgcagatgttcttcgccaataaccacgaccaggagttcgacccccctaaggtgtaccctcccgtccccgccgagaagagaaagcccatccgggtcctgagcctgttcgatggcatcgccaccggtctgctggtgctgaaggacctgggcatccaggtggataggtacattgcctccgaggtgtgcgaggactccatcaccgtgggaatggtgcgtcatcagggcaagatcatgtacgtgggcgacgtgcggagcgtgacacagaagcatatccaggagtggggccctttcgacctggtgatcggcggcagcccttgcaatgacctgagcatcgtgaacccagcccggaagggcctgtacgagggaaccggcagactgttcttcgagttttacagactgctgcacgacgcccggcctaaggaaggcgacgaccggcccttcttttggctgttcgagaatgtggtggccatgggagtcagcgacaagcgggatattagccggttcctggagagcaaccccgtgatgatcgatgccaaggaagtgagcgccgcccaccgggccagatacttctggggcaatctgcctggcatgaacagacccctggccagcaccgtgaacgacaagctggagctgcaggagtgcctggagcacggccggatcgccaagttcagcaaggtgagaaccatcaccacccgaagcaacagcatcaaacaaggcaaggaccagcactttcctgtgttcatgaacgagaaggaggacatcctgtggtgtaccgagatggagagagtgttcgggttcccagtccactacacagatgtcagcaacatgtctagactggccagacagagactgctgggaagaagctggtccgtccctgtgatcagacacctgttcgcccctctgaaggagtacttcgcctgcgtgagcagcggcaacagcaacgccaacagccggggccccagcttctctagcggcctggtgccactgtccctgagagggagccacatgggccccatggagatctacaaaaccgtgagcgcctggaagcggcagcctgtgcgcgtgctgagcctgtttcggaatatcgataaagtcctgaaaagcctgggattcctggagagcggctctggctccggcggtggcaccctgaagtacgtggaggatgtgacaaacgtggtcagacgggatgtggagaagtggggccccttcgatctggtgtacggcagcacccaacccctgggcagctcttgtgaccggtgccctggctggtacatgtttcagttccaccggatcctgcagtacgccctgccgagacaggagtcccagcggccattcttttggattttcatggacaacttgctgctgaccgaggatgaccaggaaactaccactcggttcctgcagaccgaagccgtgaccctgcaggacgtgagaggccgggactaccagaacgccatgcgggtgtggtccaacatccctggactgaaaagcaagcacgcacctctgacccctaaagaagaggagtacctgcaggcccaggtgcggagcagaagcaagctggacgcccctaaggtggatctgctggtgaagaattgcctcctgcccctgagagagtacttcaagtatttcagccagaatagtctgcccctgggaggcagcggcggcggcgccctggtgacatttgaggacgtcgccgtgcggttcacccaggaggaatgggctctgctggatccttctcagaaaatcctgtaccgggacgtgatgagagagacataccggaatctgacctccgtgggcatcaactgggaatgttgggaccttgaagcctgcttcagaagcctgggaagaaacctgagagtgcaggtggtgaagagaaagtgcgagctgaccaacagcggcccctgcgccgagggcggcccaagcagcggcgcccctcctcccagcggcggcagcccagccggctccccaacctctaccgaggagggcacctctgagtccgccacccccgagagcggccctggcacctccaccgagcccagcgagggcagcgcacccggcagccctgccggcagccccacctccacagaggagggaaccagcaccgagcccagcgaaggcagcgccccaggcaccagcaccgagcctagtgagcaggagattaaacggatcaacaagatcagaagaagacttgtgaaagacagcaacaccaagaaggccggcaagacaggccccatgaaaaccctgctggttagagtgatgacacccgatctgagagagcggctggaaaacctgagaaagaagcctgaaaatatcccccagcccatcagcaatacatctagagccaacctgaataagctgctgaccgattacaccgaaatgaagaaggcgatcctgcatgtgtactgggaagagttccagaaggaccctgtgggcctgatgagccgggtggcccagcctgccagcaagaagatcgatcagaacaagctgaaacctgagatggacgagaagggcaacctgaccaccgccggctttgcctgctctcagtgtggccagcccctgttcgtgtacaagctggagcaggtgtctgagaagggcaaggcttacaccaactacttcggacggtgcaatgtggccgagcacgaaaagctgatcctgctggcccagctgaagcccgagaaggatagcgacgaagccgtgacatatagcctgggaaagtttgggcagagggccctggatttctacagcattcatgtgaccaaggagtccacccaccccgtgaagcccctggcccagatcgccggaaacagatacgcctccggacctgtgggaaaggccctgagcgacgcatgtatgggcacaatcgcctccttcctgtctaagtaccaggacatcatcatcgaacaccagaaggtggtgaagggcaaccagaagagactggagagcctgcgggagctggccggcaaggaaaacctggaataccctagcgtgaccctgccacctcagcctcacaccaaggagggcgttgatgcctacaacgaagtgatcgcccgggtgcgaatgtgggtgaacctgaacctgtggcagaagctgaagctaagcagagatgatgccaagcctctgctgagactgaagggattcccttcctttcctctggtcgagagacaggccaacgaagtggactggtgggacatggtgtgtaacgtgaagaagctgatcaacgagaaaaaggaggatggcaaggtgttttggcagaatctggctggctacaagagacaggaagccctgagaccatacctgagcagcgaggaagatcggaagaagggaaagaaattcgctcggtaccagctgggcgacctgctgctgcacctggaaaagaagcacggcgaggactggggaaaggtgtacgacgaggcctgggagcggattgacaagaaagtggaaggcctgagcaagcacatcaagctggaagaggaacggagaagcgaggacgcccagagcaaggccgccctgaccgactggctgcgggctaaggccagcttcgtgatcgagggcctgaaggaggccgacaaggacgagttctgcagatgcgagctgaagctgcagaagtggtacggggacctgcggggaaagcccttcgccatcgaagccgagaacagcatcctggacatcagcggcttcagcaagcagtacaactgtgccttcatctggcagaaggacggcgtgaagaagctgaacctgtacctgatcatcaactacttcaagggcggcaagctgcggttcaagaagatcaaacctgaagccttcgaagccaacagattctacaccgtgatcaacaaaaagagcggcgagatcgtgcccatggaggtgaacttcaacttcgacgaccccaacctgatcatcctgcctctggcctttggcaagagacagggcagagaattcatctggaacgacctgctgtccctggaaaccggcagcctgaagctggccaacggaagagtgatcgagaagacactgtacaacagaagaacccggcaggatgagcctgccctgttcgtggccctgaccttcgagcggcgggaggtcctggactcctccaatatcaaaccaatgaacctgatcggcgtggcaagaggcgaaaacatccccgccgtgatcgccctgaccgaccccgagggctgcccactgagccggtttaaggatagcctgggaaacccaacccacatcctgagaatcggcgagagctataaggagaagcagcggaccatccaggccaagaaggaggtggagcagcggagagccggcggctacagccggaagtacgccagcaaagccaagaatctggcagacgatatggtgagaaacaccgctagagatctgctgtactacgccgtgacccaggatgccatgctgatcttcgccaacctgagccggggcttcggccggcagggcaagcggaccttcatggccgagagacagtacacacggatggaggactggctgaccgccaagctggcctacgagggcctgagcaagacctacctgtccaagacactggcccagtacacctccaagacatgcagcaactgtgggtttaccatcaccagcgccgactacgacagggtgctggagaagctgaagaagacagcaacaggctggatgaccacaattaacggcaaggagctgaaggtggagggccagattacctactacaacagatacaagagacagaacgtagtcaaggacctgtccgtcgagctggatagactgagcgaagaatctgtgaacaacgacatctcctcctggacaaagggcagaagcggagaagctctgagcctcctgaagaaaagattctcccatagacccgtgcaggagaagttcgtgtgcctgaactgcggcttcgagacacacgcagccgagcaagccgccctgaacatcgccagatcctggctgttcctgcggagccaggagtacaagaaataccagacaaacaagacaaccggcaacaccgataagagagccttcgtcgagacctggcagtccttttaccggaagaagcttaaggaggtgtggaaacctgccgtgcggtctggcggatctggcggaggctcccaggccgaggtgaccttcgaggacgtggccgtgttcctgagccaggaggagtggggcctgctgggccccgcccagaagggcctgtacagggaggtgatgctggagacctacaggaacctggtgagcctgggcgccggcctggccggccccaagcccgaggtgatcgtgcacctggagaggggcgacgagctgtgggtgctggacatgaggggcgccgagcagcccagcgtggacggcagcgccggcggcccaagcagcggcgcccctcctcccagcggcggcagcccagccggctccccaacctctaccgaggagggcacctctgagtccgccacccccgagagcggccctggcacctccaccgagcccagcgagggcagcgcacccggcagccctgccggcagccccacctccacagaggagggaaccagcaccgagcccagcgaaggcagcgccccaggcaccagcaccgagcctagtgagcaggagattaaacggatcaacaagatcagaagaagacttgtgaaagacagcaacaccaagaaggccggcaagacaggccccatgaaaaccctgctggttagagtgatgacacccgatctgagagagcggctggaaaacctgagaaagaagcctgaaaatatcccccagcccatcagcaatacatctagagccaacctgaataagctgctgaccgattacaccgaaatgaagaaggcgatcctgcatgtgtactgggaagagttccagaaggaccctgtgggcctgatgagccgggtggcccagcctgccagcaagaagatcgatcagaacaagctgaaacctgagatggacgagaagggcaacctgaccaccgccggctttgcctgctctcagtgtggccagcccctgttcgtgtacaagctggagcaggtgtctgagaagggcaaggcttacaccaactacttcggacggtgcaatgtggccgagcacgaaaagctgatcctgctggcccagctgaagcccgagaaggatagcgacgaagccgtgacatatagcctgggaaagtttgggcagagggccctggatttctacagcattcatgtgaccaaggagtccacccaccccgtgaagcccctggcccagatcgccggaaacagatacgcctccggacctgtgggaaaggccctgagcgacgcatgtatgggcacaatcgcctccttcctgtctaagtaccaggacatcatcatcgaacaccagaaggtggtgaagggcaaccagaagagactggagagcctgcgggagctggccggcaaggaaaacctggaataccctagcgtgaccctgccacctcagcctcacaccaaggagggcgttgatgcctacaacgaagtgatcgcccgggtgcgaatgtgggtgaacctgaacctgtggcagaagctgaagctaagcagagatgatgccaagcctctgctgagactgaagggattcccttcctttcctctggtcgagagacaggccaacgaagtggactggtgggacatggtgtgtaacgtgaagaagctgatcaacgagaaaaaggaggatggcaaggtgttttggcagaatctggctggctacaagagacaggaagccctgagaccatacctgagcagcgaggaagatcggaagaagggaaagaaattcgctcggtaccagctgggcgacctgctgctgcacctggaaaagaagcacggcgaggactggggaaaggtgtacgacgaggcctgggagcggattgacaagaaagtggaaggcctgagcaagcacatcaagctggaagaggaacggagaagcgaggacgcccagagcaaggccgccctgaccgactggctgcgggctaaggccagcttcgtgatcgagggcctgaaggaggccgacaaggacgagttctgcagatgcgagctgaagctgcagaagtggtacggggacctgcggggaaagcccttcgccatcgaagccgagaacagcatcctggacatcagcggcttcagcaagcagtacaactgtgccttcatctggcagaaggacggcgtgaagaagctgaacctgtacctgatcatcaactacttcaagggcggcaagctgcggttcaagaagatcaaacctgaagccttcgaagccaacagattctacaccgtgatcaacaaaaagagcggcgagatcgtgcccatggaggtgaacttcaacttcgacgaccccaacctgatcatcctgcctctggcctttggcaagagacagggcagagaattcatctggaacgacctgctgtccctggaaaccggcagcctgaagctggccaacggaagagtgatcgagaagacactgtacaacagaagaacccggcaggatgagcctgccctgttcgtggccctgaccttcgagcggcgggaggtcctggactcctccaatatcaaaccaatgaacctgatcggcgtggcaagaggcgaaaacatccccgccgtgatcgccctgaccgaccccgagggctgcccactgagccggtttaaggatagcctgggaaacccaacccacatcctgagaatcggcgagagctataaggagaagcagcggaccatccaggccaagaaggaggtggagcagcggagagccggcggctacagccggaagtacgccagcaaagccaagaatctggcagacgatatggtgagaaacaccgctagagatctgctgtactacgccgtgacccaggatgccatgctgatcttcgccaacctgagccggggcttcggccggcagggcaagcggaccttcatggccgagagacagtacacacggatggaggactggctgaccgccaagctggcctacgagggcctgagcaagacctacctgtccaagacactggcccagtacacctccaagacatgcagcaactgtgggtttaccatcaccagcgccgactacgacagggtgctggagaagctgaagaagacagcaacaggctggatgaccacaattaacggcaaggagctgaaggtggagggccagattacctactacaacagatacaagagacagaacgtagtcaaggacctgtccgtcgagctggatagactgagcgaagaatctgtgaacaacgacatctcctcctggacaaagggcagaagcggagaagctctgagcctcctgaagaaaagattctcccatagacccgtgcaggagaagttcgtgtgcctgaactgcggcttcgagacacacgcagccgagcaagccgccctgaacatcgccagatcctggctgttcctgcggagccaggagtacaagaaataccagacaaacaagacaaccggcaacaccgataagagagccttcgtcgagacctggcagtccttttaccggaagaagcttaaggaggtgtggaaacctgccgtgcggtctggcggatctggcggaggctcctcaggccgaggtgaccttcgaggacgtggccgtgttcctgagccaggaggagtggggcctgctgggccccgcccagaagggcctgtacagggaggtgatgctggagacctacaggaacctggtgagcctgggcgccggcctggccggccccaagcccgaggtgatcgtgcacctggagaggggcgacgagctgtgggtgctggacatgaggggcgccgagcagcccagcgtggacggcagcgccggatctggctccggcagcggccccaagaaaaagagaaaagtctaagctgccttctgcggggcttgccttctggccatgcccttcttctctcccttgcacctgtacctcttggtctttgaataaagcctgagtaggaaggctagcaaaaaaaaaaaaaaaaaaaaaaaaaaaaaaaaaaaaaaaaaaaaaaaaaaaaaaaaaaaaaaaaaaaaaaaaaaaaaaaa

SEQ ID NO: 16039 - RNA, 9485 nt, synthetic construct
  source 1..9485: mol_type = other RNA
aggaaataagagagaaaagaagagtaagaagaaatataagagccaccatggcccctaagaagaagcgtaaagtgagccggatggaacgcctcgtctacgaggtgcggcagaagtgcagaaacatcgaggacatctgcatctcctgcggatctctgaacgtgaccctggagcacccactgttcatcggcggcatgtgccagaactgtaaaaactgttttctggagtgtgcctatcaatacgacgatgacggctaccagagctactgcaccatctgttgcggcggaagagaggtgctgatgtgtggaaataacaactgctgccggtgcttctgcgtggaatgcgtggacctgctggtgggccccggcgccgcccaggccgctattaaggaagatccttggaactgctacatgtgcggccacaagggcacatacggcctgctgagacggagagaggactggcctagcagactgcagatgttcttcgccaataaccacgaccaggagttcgacccccctaaggtgtaccctcccgtccccgccgagaagagaaagcccatccgggtcctgagcctgttcgatggcatcgccaccggtctgctggtgctgaaggacctgggcatccaggtggataggtacattgcctccgaggtgtgcgaggactccatcaccgtgggaatggtgcgtcatcagggcaagatcatgtacgtgggcgacgtgcggagcgtgacacagaagcatatccaggagtggggccctttcgacctggtgatcggcggcagcccttgcaatgacctgagcatcgtgaacccagcccggaagggcctgtacgagggaaccggcagactgttcttcgagttttacagactgctgcacgacgcccggcctaaggaaggcgacgaccggcccttcttttggctgttcgagaatgtggtggccatgggagtcagcgacaagcgggatattagccggttcctggagagcaaccccgtgatgatcgatgccaaggaagtgagcgccgcccaccgggccagatacttctggggcaatctgcctggcatgaacagacccctggccagcaccgtgaacgacaagctggagctgcaggagtgcctggagcacggccggatcgccaagttcagcaaggtgagaaccatcaccacccgaagcaacagcatcaaacaaggcaaggaccagcactttcctgtgttcatgaacgagaaggaggacatcctgtggtgtaccgagatggagagagtgttcgggttcccagtccactacacagatgtcagcaacatgtctagactggccagacagagactgctgggaagaagctggtccgtccctgtgatcagacacctgttcgcccctctgaaggagtacttcgcctgcgtgagcagcggcaacagcaacgccaacagccggggccccagcttctctagcggcctggtgccactgtccctgagagggagccacatgggccccatggagatctacaaaaccgtgagcgcctggaagcggcagcctgtgcgcgtgctgagcctgtttcggaatatcgataaagtcctgaaaagcctgggattcctggagagcggctctggctccggcggtggcaccctgaagtacgtggaggatgtgacaaacgtggtcagacgggatgtggagaagtggggccccttcgatctggtgtacggcagcacccaacccctgggcagctcttgtgaccggtgccctggctggtacatgtttcagttccaccggatcctgcagtacgccctgccgagacaggagtcccagcggccattcttttggattttcatggacaacttgctgctgaccgaggatgaccaggaaactaccactcggttcctgcagaccgaagccgtgaccctgcaggacgtgagaggccgggactaccagaacgccatgcgggtgtggtccaacatccctggactgaaaagcaagcacgcacctctgacccctaaagaagaggagtacctgcaggcccaggtgcggagcagaagcaagctggacgcccctaaggtggatctgctggtgaagaattgcctcctgcccctgagagagtacttcaagtatttcagccagaatagtctgcccctgggaggcagcggcggcggcgccctggtgacatttgaggacgtcgccgtgcggttcacccaggaggaatgggctctgctggatccttctcagaaaatcctgtaccgggacgtgatgagagagacataccggaatctgacctccgtgggcatcaactgggaatgttgggaccttgaagcctgcttcagaagcctgggaagaaacctgagagtgcaggtggtgaagagaaagtgcgagctgaccaacagcggcccctgcgccgagggcggcccaagcagcggcgcccctcctcccagcggcggcagcccagccggctccccaacctctaccgaggagggcacctctgagtccgccacccccgagagcggccctggcacctccaccgagcccagcgagggcagcgcacccggcagccctgccggcagccccacctccacagaggagggaaccagcaccgagcccagcgaaggcagcgccccaggcaccagcaccgagcctagtgagcaggagattaaacggatcaacaagatcagaagaagacttgtgaaagacagcaacaccaagaaggccggcaagacaggccccatgaaaaccctgctggttagagtgatgacacccgatctgagagagcggctggaaaacctgagaaagaagcctgaaaatatcccccagcccatcagcaatacatctagagccaacctgaataagctgctgaccgattacaccgaaatgaagaaggcgatcctgcatgtgtactgggaagagttccagaaggaccctgtgggcctgatgagccgggtggcccagcctgccagcaagaagatcgatcagaacaagctgaaacctgagatggacgagaagggcaacctgaccaccgccggctttgcctgctctcagtgtggccagcccctgttcgtgtacaagctggagcaggtgtctgagaagggcaaggcttacaccaactacttcggacggtgcaatgtggccgagcacgaaaagctgatcctgctggcccagctgaagcccgagaaggatagcgacgaagccgtgacatatagcctgggaaagtttgggcagagggccctggatttctacagcattcatgtgaccaaggagtccacccaccccgtgaagcccctggcccagatcgccggaaacagatacgcctccggacctgtgggaaaggccctgagcgacgcatgtatgggcacaatcgcctccttcctgtctaagtaccaggacatcatcatcgaacaccagaaggtggtgaagggcaaccagaagagactggagagcctgcgggagctggccggcaaggaaaacctggaataccctagcgtgaccctgccacctcagcctcacaccaaggagggcgttgatgcctacaacgaagtgatcgcccgggtgcgaatgtgggtgaacctgaacctgtggcagaagctgaagctaagcagagatgatgccaagcctctgctgagactgaagggattcccttcctttcctctggtcgagagacaggccaacgaagtggactggtgggacatggtgtgtaacgtgaagaagctgatcaacgagaaaaaggaggatggcaaggtgttttggcagaatctggctggctacaagagacaggaagccctgagaccatacctgagcagcgaggaagatcggaagaagggaaagaaattcgctcggtaccagctgggcgacctgctgctgcacctggaaaagaagcacggcgaggactggggaaaggtgtacgacgaggcctgggagcggattgacaagaaagtggaaggcctgagcaagcacatcaagctggaagaggaacggagaagcgaggacgcccagagcaaggccgccctgaccgactggctgcgggctaaggccagcttcgtgatcgagggcctgaaggaggccgacaaggacgagttctgcagatgcgagctgaagctgcagaagtggtacggggacctgcggggaaagcccttcgccatcgaagccgagaacagcatcctggacatcagcggcttcagcaagcagtacaactgtgccttcatctggcagaaggacggcgtgaagaagctgaacctgtacctgatcatcaactacttcaagggcggcaagctgcggttcaagaagatcaaacctgaagccttcgaagccaacagattctacaccgtgatcaacaaaaagagcggcgagatcgtgcccatggaggtgaacttcaacttcgacgaccccaacctgatcatcctgcctctggcctttggcaagagacagggcagagaattcatctggaacgacctgctgtccctggaaaccggcagcctgaagctggccaacggaagagtgatcgagaagacactgtacaacagaagaacccggcaggatgagcctgccctgttcgtggccctgaccttcgagcggcgggaggtcctggactcctccaatatcaaaccaatgaacctgatcggcgtggcaagaggcgaaaacatccccgccgtgatcgccctgaccgaccccgagggctgcccactgagccggtttaaggatagcctgggaaacccaacccacatcctgagaatcggcgagagctataaggagaagcagcggaccatccaggccaagaaggaggtggagcagcggagagccggcggctacagccggaagtacgccagcaaagccaagaatctggcagacgatatggtgagaaacaccgctagagatctgctgtactacgccgtgacccaggatgccatgctgatcttcgccaacctgagccggggcttcggccggcagggcaagcggaccttcatggccgagagacagtacacacggatggaggactggctgaccgccaagctggcctacgagggcctgagcaagacctacctgtccaagacactggcccagtacacctccaagacatgcagcaactgtgggtttaccatcaccagcgccgactacgacagggtgctggagaagctgaagaagacagcaacaggctggatgaccacaattaacggcaaggagctgaaggtggagggccagattacctactacaacagatacaagagacagaacgtagtcaaggacctgtccgtcgagctggatagactgagcgaagaatctgtgaacaacgacatctcctcctggacaaagggcagaagcggagaagctctgagcctcctgaagaaaagattctcccatagacccgtgcaggagaagttcgtgtgcctgaactgcggcttcgagacacacgcagccgagcaagccgccctgaacatcgccagatcctggctgttcctgcggagccaggagtacaagaaataccagacaaacaagacaaccggcaacaccgataagagagccttcgtcgagacctggcagtccttttaccggaagaagcttaaggaggtgtggaaacctgccgtgcggtctggcggatctggcggaggctccatgacccccggcccccccggcagcctggagatggagcccctgaccttcaaggacgtggccatcgagttctgcctggaggagtggcagtgcctggacaccgcccagcaggacctgtacaggaacgtgatgctggagaactacaggaacctggtgttcctgggcatcgccgtgagcaagcccgacctgatcacctgcctggagcagggcaaggtgccctggaacaggaagaggcacgagatggtgggcggcccaagcagcggcgcccctcctcccagcggcggcagcccagccggctccccaacctctaccgaggagggcacctctgagtccgccacccccgagagcggccctggcacctccaccgagcccagcgagggcagcgcacccggcagccctgccggcagccccacctccacagaggagggaaccagcaccgagcccagcgaaggcagcgccccaggcaccagcaccgagcctagtgagcaggagattaaacggatcaacaagatcagaagaagacttgtgaaagacagcaacaccaagaaggccggcaagacaggccccatgaaaaccctgctggttagagtgatgacacccgatctgagagagcggctggaaaacctgagaaagaagcctgaaaatatcccccagcccatcagcaatacatctagagccaacctgaataagctgctgaccgattacaccgaaatgaagaaggcgatcctgcatgtgtactgggaagagttccagaaggaccctgtgggcctgatgagccgggtggcccagcctgccagcaagaagatcgatcagaacaagctgaaacctgagatggacgagaagggcaacctgaccaccgccggctttgcctgctctcagtgtggccagcccctgttcgtgtacaagctggagcaggtgtctgagaagggcaaggcttacaccaactacttcggacggtgcaatgtggccgagcacgaaaagctgatcctgctggcccagctgaagcccgagaaggatagcgacgaagccgtgacatatagcctgggaaagtttgggcagagggccctggatttctacagcattcatgtgaccaaggagtccacccaccccgtgaagcccctggcccagatcgccggaaacagatacgcctccggacctgtgggaaaggccctgagcgacgcatgtatgggcacaatcgcctccttcctgtctaagtaccaggacatcatcatcgaacaccagaaggtggtgaagggcaaccagaagagactggagagcctgcgggagctggccggcaaggaaaacctggaataccctagcgtgaccctgccacctcagcctcacaccaaggagggcgttgatgcctacaacgaagtgatcgcccgggtgcgaatgtgggtgaacctgaacctgtggcagaagctgaagctaagcagagatgatgccaagcctctgctgagactgaagggattcccttcctttcctctggtcgagagacaggccaacgaagtggactggtgggacatggtgtgtaacgtgaagaagctgatcaacgagaaaaaggaggatggcaaggtgttttggcagaatctggctggctacaagagacaggaagccctgagaccatacctgagcagcgaggaagatcggaagaagggaaagaaattcgctcggtaccagctgggcgacctgctgctgcacctggaaaagaagcacggcgaggactggggaaaggtgtacgacgaggcctgggagcggattgacaagaaagtggaaggcctgagcaagcacatcaagctggaagaggaacggagaagcgaggacgcccagagcaaggccgccctgaccgactggctgcgggctaaggccagcttcgtgatcgagggcctgaaggaggccgacaaggacgagttctgcagatgcgagctgaagctgcagaagtggtacggggacctgcggggaaagcccttcgccatcgaagccgagaacagcatcctggacatcagcggcttcagcaagcagtacaactgtgccttcatctggcagaaggacggcgtgaagaagctgaacctgtacctgatcatcaactacttcaagggcggcaagctgcggttcaagaagatcaaacctgaagccttcgaagccaacagattctacaccgtgatcaacaaaaagagcggcgagatcgtgcccatggaggtgaacttcaacttcgacgaccccaacctgatcatcctgcctctggcctttggcaagagacagggcagagaattcatctggaacgacctgctgtccctggaaaccggcagcctgaagctggccaacggaagagtgatcgagaagacactgtacaacagaagaacccggcaggatgagcctgccctgttcgtggccctgaccttcgagcggcgggaggtcctggactcctccaatatcaaaccaatgaacctgatcggcgtggcaagaggcgaaaacatccccgccgtgatcgccctgaccgaccccgagggctgcccactgagccggtttaaggatagcctgggaaacccaacccacatcctgagaatcggcgagagctataaggagaagcagcggaccatccaggccaagaaggaggtggagcagcggagagccggcggctacagccggaagtacgccagcaaagccaagaatctggcagacgatatggtgagaaacaccgctagagatctgctgtactacgccgtgacccaggatgccatgctgatcttcgccaacctgagccggggcttcggccggcagggcaagcggaccttcatggccgagagacagtacacacggatggaggactggctgaccgccaagctggcctacgagggcctgagcaagacctacctgtccaagacactggcccagtacacctccaagacatgcagcaactgtgggtttaccatcaccagcgccgactacgacagggtgctggagaagctgaagaagacagcaacaggctggatgaccacaattaacggcaaggagctgaaggtggagggccagattacctactacaacagatacaagagacagaacgtagtcaaggacctgtccgtcgagctggatagactgagcgaagaatctgtgaacaacgacatctcctcctggacaaagggcagaagcggagaagctctgagcctcctgaagaaaagattctcccatagacccgtgcaggagaagttcgtgtgcctgaactgcggcttcgagacacacgcagccgagcaagccgccctgaacatcgccagatcctggctgttcctgcggagccaggagtacaagaaataccagacaaacaagacaaccggcaacaccgataagagagccttcgtcgagacctggcagtccttttaccggaagaagcttaaggaggtgtggaaacctgccgtgcggtctggcggatctggcggaggctcctatgacccccggcccccccggcagcctggagatggagcccctgaccttcaaggacgtggccatcgagttctgcctggaggagtggcagtgcctggacaccgcccagcaggacctgtacaggaacgtgatgctggagaactacaggaacctggtgttcctgggcatcgccgtgagcaagcccgacctgatcacctgcctggagcagggcaaggtgccctggaacaggaagaggcacgagatggtgggatctggctccggcagcggccccaagaaaaagagaaaagtctaagctgccttctgcggggcttgccttctggccatgcccttcttctctcccttgcacctgtacctcttggtctttgaataaagcctgagtaggaaggctagcaaaaaaaaaaaaaaaaaaaaaaaaaaaaaaaaaaaaaaaaaaaaaaaaaaaaaaaaaaaaaaaaaaaaaaaaaaaaaaaa

SEQ ID NO: 16040 - RNA, 9485 nt, synthetic construct
  source 1..9485: mol_type = other RNA
aggaaataagagagaaaagaagagtaagaagaaatataagagccaccatggcccctaagaagaagcgtaaagtgagccggatggaacgcctcgtctacgaggtgcggcagaagtgcagaaacatcgaggacatctgcatctcctgcggatctctgaacgtgaccctggagcacccactgttcatcggcggcatgtgccagaactgtaaaaactgttttctggagtgtgcctatcaatacgacgatgacggctaccagagctactgcaccatctgttgcggcggaagagaggtgctgatgtgtggaaataacaactgctgccggtgcttctgcgtggaatgcgtggacctgctggtgggccccggcgccgcccaggccgctattaaggaagatccttggaactgctacatgtgcggccacaagggcacatacggcctgctgagacggagagaggactggcctagcagactgcagatgttcttcgccaataaccacgaccaggagttcgacccccctaaggtgtaccctcccgtccccgccgagaagagaaagcccatccgggtcctgagcctgttcgatggcatcgccaccggtctgctggtgctgaaggacctgggcatccaggtggataggtacattgcctccgaggtgtgcgaggactccatcaccgtgggaatggtgcgtcatcagggcaagatcatgtacgtgggcgacgtgcggagcgtgacacagaagcatatccaggagtggggccctttcgacctggtgatcggcggcagcccttgcaatgacctgagcatcgtgaacccagcccggaagggcctgtacgagggaaccggcagactgttcttcgagttttacagactgctgcacgacgcccggcctaaggaaggcgacgaccggcccttcttttggctgttcgagaatgtggtggccatgggagtcagcgacaagcgggatattagccggttcctggagagcaaccccgtgatgatcgatgccaaggaagtgagcgccgcccaccgggccagatacttctggggcaatctgcctggcatgaacagacccctggccagcaccgtgaacgacaagctggagctgcaggagtgcctggagcacggccggatcgccaagttcagcaaggtgagaaccatcaccacccgaagcaacagcatcaaacaaggcaaggaccagcactttcctgtgttcatgaacgagaaggaggacatcctgtggtgtaccgagatggagagagtgttcgggttcccagtccactacacagatgtcagcaacatgtctagactggccagacagagactgctgggaagaagctggtccgtccctgtgatcagacacctgttcgcccctctgaaggagtacttcgcctgcgtgagcagcggcaacagcaacgccaacagccggggccccagcttctctagcggcctggtgccactgtccctgagagggagccacatgggccccatggagatctacaaaaccgtgagcgcctggaagcggcagcctgtgcgcgtgctgagcctgtttcggaatatcgataaagtcctgaaaagcctgggattcctggagagcggctctggctccggcggtggcaccctgaagtacgtggaggatgtgacaaacgtggtcagacgggatgtggagaagtggggccccttcgatctggtgtacggcagcacccaacccctgggcagctcttgtgaccggtgccctggctggtacatgtttcagttccaccggatcctgcagtacgccctgccgagacaggagtcccagcggccattcttttggattttcatggacaacttgctgctgaccgaggatgaccaggaaactaccactcggttcctgcagaccgaagccgtgaccctgcaggacgtgagaggccgggactaccagaacgccatgcgggtgtggtccaacatccctggactgaaaagcaagcacgcacctctgacccctaaagaagaggagtacctgcaggcccaggtgcggagcagaagcaagctggacgcccctaaggtggatctgctggtgaagaattgcctcctgcccctgagagagtacttcaagtatttcagccagaatagtctgcccctgggaggcagcggcggcggcgccctggtgacatttgaggacgtcgccgtgcggttcacccaggaggaatgggctctgctggatccttctcagaaaatcctgtaccgggacgtgatgagagagacataccggaatctgacctccgtgggcatcaactgggaatgttgggaccttgaagcctgcttcagaagcctgggaagaaacctgagagtgcaggtggtgaagagaaagtgcgagctgaccaacagcggcccctgcgccgagggcggcccaagcagcggcgcccctcctcccagcggcggcagcccagccggctccccaacctctaccgaggagggcacctctgagtccgccacccccgagagcggccctggcacctccaccgagcccagcgagggcagcgcacccggcagccctgccggcagccccacctccacagaggagggaaccagcaccgagcccagcgaaggcagcgccccaggcaccagcaccgagcctagtgagcaggagattaaacggatcaacaagatcagaagaagacttgtgaaagacagcaacaccaagaaggccggcaagacaggccccatgaaaaccctgctggttagagtgatgacacccgatctgagagagcggctggaaaacctgagaaagaagcctgaaaatatcccccagcccatcagcaatacatctagagccaacctgaataagctgctgaccgattacaccgaaatgaagaaggcgatcctgcatgtgtactgggaagagttccagaaggaccctgtgggcctgatgagccgggtggcccagcctgccagcaagaagatcgatcagaacaagctgaaacctgagatggacgagaagggcaacctgaccaccgccggctttgcctgctctcagtgtggccagcccctgttcgtgtacaagctggagcaggtgtctgagaagggcaaggcttacaccaactacttcggacggtgcaatgtggccgagcacgaaaagctgatcctgctggcccagctgaagcccgagaaggatagcgacgaagccgtgacatatagcctgggaaagtttgggcagagggccctggatttctacagcattcatgtgaccaaggagtccacccaccccgtgaagcccctggcccagatcgccggaaacagatacgcctccggacctgtgggaaaggccctgagcgacgcatgtatgggcacaatcgcctccttcctgtctaagtaccaggacatcatcatcgaacaccagaaggtggtgaagggcaaccagaagagactggagagcctgcgggagctggccggcaaggaaaacctggaataccctagcgtgaccctgccacctcagcctcacaccaaggagggcgttgatgcctacaacgaagtgatcgcccgggtgcgaatgtgggtgaacctgaacctgtggcagaagctgaagctaagcagagatgatgccaagcctctgctgagactgaagggattcccttcctttcctctggtcgagagacaggccaacgaagtggactggtgggacatggtgtgtaacgtgaagaagctgatcaacgagaaaaaggaggatggcaaggtgttttggcagaatctggctggctacaagagacaggaagccctgagaccatacctgagcagcgaggaagatcggaagaagggaaagaaattcgctcggtaccagctgggcgacctgctgctgcacctggaaaagaagcacggcgaggactggggaaaggtgtacgacgaggcctgggagcggattgacaagaaagtggaaggcctgagcaagcacatcaagctggaagaggaacggagaagcgaggacgcccagagcaaggccgccctgaccgactggctgcgggctaaggccagcttcgtgatcgagggcctgaaggaggccgacaaggacgagttctgcagatgcgagctgaagctgcagaagtggtacggggacctgcggggaaagcccttcgccatcgaagccgagaacagcatcctggacatcagcggcttcagcaagcagtacaactgtgccttcatctggcagaaggacggcgtgaagaagctgaacctgtacctgatcatcaactacttcaagggcggcaagctgcggttcaagaagatcaaacctgaagccttcgaagccaacagattctacaccgtgatcaacaaaaagagcggcgagatcgtgcccatggaggtgaacttcaacttcgacgaccccaacctgatcatcctgcctctggcctttggcaagagacagggcagagaattcatctggaacgacctgctgtccctggaaaccggcagcctgaagctggccaacggaagagtgatcgagaagacactgtacaacagaagaacccggcaggatgagcctgccctgttcgtggccctgaccttcgagcggcgggaggtcctggactcctccaatatcaaaccaatgaacctgatcggcgtggcaagaggcgaaaacatccccgccgtgatcgccctgaccgaccccgagggctgcccactgagccggtttaaggatagcctgggaaacccaacccacatcctgagaatcggcgagagctataaggagaagcagcggaccatccaggccaagaaggaggtggagcagcggagagccggcggctacagccggaagtacgccagcaaagccaagaatctggcagacgatatggtgagaaacaccgctagagatctgctgtactacgccgtgacccaggatgccatgctgatcttcgccaacctgagccggggcttcggccggcagggcaagcggaccttcatggccgagagacagtacacacggatggaggactggctgaccgccaagctggcctacgagggcctgagcaagacctacctgtccaagacactggcccagtacacctccaagacatgcagcaactgtgggtttaccatcaccagcgccgactacgacagggtgctggagaagctgaagaagacagcaacaggctggatgaccacaattaacggcaaggagctgaaggtggagggccagattacctactacaacagatacaagagacagaacgtagtcaaggacctgtccgtcgagctggatagactgagcgaagaatctgtgaacaacgacatctcctcctggacaaagggcagaagcggagaagctctgagcctcctgaagaaaagattctcccatagacccgtgcaggagaagttcgtgtgcctgaactgcggcttcgagacacacgcagccgagcaagccgccctgaacatcgccagatcctggctgttcctgcggagccaggagtacaagaaataccagacaaacaagacaaccggcaacaccgataagagagccttcgtcgagacctggcagtccttttaccggaagaagcttaaggaggtgtggaaacctgccgtgcggtctggcggatctggcggaggctccatggagctgctgaccttcagggacgtggccatcgagttcagccccgaggagtggaagtgcctggaccccgaccagcagaacctgtacagggacgtgatgctggagaactacaggaacctggtgagcctgggcgtggccatcagcaaccccgacctggtgacctgcctggagcagaggaaggagccctacaacgtgaagatccacaagatcgtggccaggccccccgccgtgtgcagccacagcggcggcccaagcagcggcgcccctcctcccagcggcggcagcccagccggctccccaacctctaccgaggagggcacctctgagtccgccacccccgagagcggccctggcacctccaccgagcccagcgagggcagcgcacccggcagccctgccggcagccccacctccacagaggagggaaccagcaccgagcccagcgaaggcagcgccccaggcaccagcaccgagcctagtgagcaggagattaaacggatcaacaagatcagaagaagacttgtgaaagacagcaacaccaagaaggccggcaagacaggccccatgaaaaccctgctggttagagtgatgacacccgatctgagagagcggctggaaaacctgagaaagaagcctgaaaatatcccccagcccatcagcaatacatctagagccaacctgaataagctgctgaccgattacaccgaaatgaagaaggcgatcctgcatgtgtactgggaagagttccagaaggaccctgtgggcctgatgagccgggtggcccagcctgccagcaagaagatcgatcagaacaagctgaaacctgagatggacgagaagggcaacctgaccaccgccggctttgcctgctctcagtgtggccagcccctgttcgtgtacaagctggagcaggtgtctgagaagggcaaggcttacaccaactacttcggacggtgcaatgtggccgagcacgaaaagctgatcctgctggcccagctgaagcccgagaaggatagcgacgaagccgtgacatatagcctgggaaagtttgggcagagggccctggatttctacagcattcatgtgaccaaggagtccacccaccccgtgaagcccctggcccagatcgccggaaacagatacgcctccggacctgtgggaaaggccctgagcgacgcatgtatgggcacaatcgcctccttcctgtctaagtaccaggacatcatcatcgaacaccagaaggtggtgaagggcaaccagaagagactggagagcctgcgggagctggccggcaaggaaaacctggaataccctagcgtgaccctgccacctcagcctcacaccaaggagggcgttgatgcctacaacgaagtgatcgcccgggtgcgaatgtgggtgaacctgaacctgtggcagaagctgaagctaagcagagatgatgccaagcctctgctgagactgaagggattcccttcctttcctctggtcgagagacaggccaacgaagtggactggtgggacatggtgtgtaacgtgaagaagctgatcaacgagaaaaaggaggatggcaaggtgttttggcagaatctggctggctacaagagacaggaagccctgagaccatacctgagcagcgaggaagatcggaagaagggaaagaaattcgctcggtaccagctgggcgacctgctgctgcacctggaaaagaagcacggcgaggactggggaaaggtgtacgacgaggcctgggagcggattgacaagaaagtggaaggcctgagcaagcacatcaagctggaagaggaacggagaagcgaggacgcccagagcaaggccgccctgaccgactggctgcgggctaaggccagcttcgtgatcgagggcctgaaggaggccgacaaggacgagttctgcagatgcgagctgaagctgcagaagtggtacggggacctgcggggaaagcccttcgccatcgaagccgagaacagcatcctggacatcagcggcttcagcaagcagtacaactgtgccttcatctggcagaaggacggcgtgaagaagctgaacctgtacctgatcatcaactacttcaagggcggcaagctgcggttcaagaagatcaaacctgaagccttcgaagccaacagattctacaccgtgatcaacaaaaagagcggcgagatcgtgcccatggaggtgaacttcaacttcgacgaccccaacctgatcatcctgcctctggcctttggcaagagacagggcagagaattcatctggaacgacctgctgtccctggaaaccggcagcctgaagctggccaacggaagagtgatcgagaagacactgtacaacagaagaacccggcaggatgagcctgccctgttcgtggccctgaccttcgagcggcgggaggtcctggactcctccaatatcaaaccaatgaacctgatcggcgtggcaagaggcgaaaacatccccgccgtgatcgccctgaccgaccccgagggctgcccactgagccggtttaaggatagcctgggaaacccaacccacatcctgagaatcggcgagagctataaggagaagcagcggaccatccaggccaagaaggaggtggagcagcggagagccggcggctacagccggaagtacgccagcaaagccaagaatctggcagacgatatggtgagaaacaccgctagagatctgctgtactacgccgtgacccaggatgccatgctgatcttcgccaacctgagccggggcttcggccggcagggcaagcggaccttcatggccgagagacagtacacacggatggaggactggctgaccgccaagctggcctacgagggcctgagcaagacctacctgtccaagacactggcccagtacacctccaagacatgcagcaactgtgggtttaccatcaccagcgccgactacgacagggtgctggagaagctgaagaagacagcaacaggctggatgaccacaattaacggcaaggagctgaaggtggagggccagattacctactacaacagatacaagagacagaacgtagtcaaggacctgtccgtcgagctggatagactgagcgaagaatctgtgaacaacgacatctcctcctggacaaagggcagaagcggagaagctctgagcctcctgaagaaaagattctcccatagacccgtgcaggagaagttcgtgtgcctgaactgcggcttcgagacacacgcagccgagcaagccgccctgaacatcgccagatcctggctgttcctgcggagccaggagtacaagaaataccagacaaacaagacaaccggcaacaccgataagagagccttcgtcgagacctggcagtccttttaccggaagaagcttaaggaggtgtggaaacctgccgtgcggtctggcggatctggcggaggctcctatggagctgctgaccttcagggacgtggccatcgagttcagccccgaggagtggaagtgcctggaccccgaccagcagaacctgtacagggacgtgatgctggagaactacaggaacctggtgagcctgggcgtggccatcagcaaccccgacctggtgacctgcctggagcagaggaaggagccctacaacgtgaagatccacaagatcgtggccaggccccccgccgtgtgcagccacagcggatctggctccggcagcggccccaagaaaaagagaaaagtctaagctgccttctgcggggcttgccttctggccatgcccttcttctctcccttgcacctgtacctcttggtctttgaataaagcctgagtaggaaggctagcaaaaaaaaaaaaaaaaaaaaaaaaaaaaaaaaaaaaaaaaaaaaaaaaaaaaaaaaaaaaaaaaaaaaaaaaaaaaaaaa

SEQ ID NO: 16041 - RNA, 9485 nt, synthetic construct
  source 1..9485: mol_type = other RNA
aggaaataagagagaaaagaagagtaagaagaaatataagagccaccatggcccctaagaagaagcgtaaagtgagccggatggaacgcctcgtctacgaggtgcggcagaagtgcagaaacatcgaggacatctgcatctcctgcggatctctgaacgtgaccctggagcacccactgttcatcggcggcatgtgccagaactgtaaaaactgttttctggagtgtgcctatcaatacgacgatgacggctaccagagctactgcaccatctgttgcggcggaagagaggtgctgatgtgtggaaataacaactgctgccggtgcttctgcgtggaatgcgtggacctgctggtgggccccggcgccgcccaggccgctattaaggaagatccttggaactgctacatgtgcggccacaagggcacatacggcctgctgagacggagagaggactggcctagcagactgcagatgttcttcgccaataaccacgaccaggagttcgacccccctaaggtgtaccctcccgtccccgccgagaagagaaagcccatccgggtcctgagcctgttcgatggcatcgccaccggtctgctggtgctgaaggacctgggcatccaggtggataggtacattgcctccgaggtgtgcgaggactccatcaccgtgggaatggtgcgtcatcagggcaagatcatgtacgtgggcgacgtgcggagcgtgacacagaagcatatccaggagtggggccctttcgacctggtgatcggcggcagcccttgcaatgacctgagcatcgtgaacccagcccggaagggcctgtacgagggaaccggcagactgttcttcgagttttacagactgctgcacgacgcccggcctaaggaaggcgacgaccggcccttcttttggctgttcgagaatgtggtggccatgggagtcagcgacaagcgggatattagccggttcctggagagcaaccccgtgatgatcgatgccaaggaagtgagcgccgcccaccgggccagatacttctggggcaatctgcctggcatgaacagacccctggccagcaccgtgaacgacaagctggagctgcaggagtgcctggagcacggccggatcgccaagttcagcaaggtgagaaccatcaccacccgaagcaacagcatcaaacaaggcaaggaccagcactttcctgtgttcatgaacgagaaggaggacatcctgtggtgtaccgagatggagagagtgttcgggttcccagtccactacacagatgtcagcaacatgtctagactggccagacagagactgctgggaagaagctggtccgtccctgtgatcagacacctgttcgcccctctgaaggagtacttcgcctgcgtgagcagcggcaacagcaacgccaacagccggggccccagcttctctagcggcctggtgccactgtccctgagagggagccacatgggccccatggagatctacaaaaccgtgagcgcctggaagcggcagcctgtgcgcgtgctgagcctgtttcggaatatcgataaagtcctgaaaagcctgggattcctggagagcggctctggctccggcggtggcaccctgaagtacgtggaggatgtgacaaacgtggtcagacgggatgtggagaagtggggccccttcgatctggtgtacggcagcacccaacccctgggcagctcttgtgaccggtgccctggctggtacatgtttcagttccaccggatcctgcagtacgccctgccgagacaggagtcccagcggccattcttttggattttcatggacaacttgctgctgaccgaggatgaccaggaaactaccactcggttcctgcagaccgaagccgtgaccctgcaggacgtgagaggccgggactaccagaacgccatgcgggtgtggtccaacatccctggactgaaaagcaagcacgcacctctgacccctaaagaagaggagtacctgcaggcccaggtgcggagcagaagcaagctggacgcccctaaggtggatctgctggtgaagaattgcctcctgcccctgagagagtacttcaagtatttcagccagaatagtctgcccctgggaggcagcggcggcggcgccctggtgacatttgaggacgtcgccgtgcggttcacccaggaggaatgggctctgctggatccttctcagaaaatcctgtaccgggacgtgatgagagagacataccggaatctgacctccgtgggcatcaactgggaatgttgggaccttgaagcctgcttcagaagcctgggaagaaacctgagagtgcaggtggtgaagagaaagtgcgagctgaccaacagcggcccctgcgccgagggcggcccaagcagcggcgcccctcctcccagcggcggcagcccagccggctccccaacctctaccgaggagggcacctctgagtccgccacccccgagagcggccctggcacctccaccgagcccagcgagggcagcgcacccggcagccctgccggcagccccacctccacagaggagggaaccagcaccgagcccagcgaaggcagcgccccaggcaccagcaccgagcctagtgagcaggagattaaacggatcaacaagatcagaagaagacttgtgaaagacagcaacaccaagaaggccggcaagacaggccccatgaaaaccctgctggttagagtgatgacacccgatctgagagagcggctggaaaacctgagaaagaagcctgaaaatatcccccagcccatcagcaatacatctagagccaacctgaataagctgctgaccgattacaccgaaatgaagaaggcgatcctgcatgtgtactgggaagagttccagaaggaccctgtgggcctgatgagccgggtggcccagcctgccagcaagaagatcgatcagaacaagctgaaacctgagatggacgagaagggcaacctgaccaccgccggctttgcctgctctcagtgtggccagcccctgttcgtgtacaagctggagcaggtgtctgagaagggcaaggcttacaccaactacttcggacggtgcaatgtggccgagcacgaaaagctgatcctgctggcccagctgaagcccgagaaggatagcgacgaagccgtgacatatagcctgggaaagtttgggcagagggccctggatttctacagcattcatgtgaccaaggagtccacccaccccgtgaagcccctggcccagatcgccggaaacagatacgcctccggacctgtgggaaaggccctgagcgacgcatgtatgggcacaatcgcctccttcctgtctaagtaccaggacatcatcatcgaacaccagaaggtggtgaagggcaaccagaagagactggagagcctgcgggagctggccggcaaggaaaacctggaataccctagcgtgaccctgccacctcagcctcacaccaaggagggcgttgatgcctacaacgaagtgatcgcccgggtgcgaatgtgggtgaacctgaacctgtggcagaagctgaagctaagcagagatgatgccaagcctctgctgagactgaagggattcccttcctttcctctggtcgagagacaggccaacgaagtggactggtgggacatggtgtgtaacgtgaagaagctgatcaacgagaaaaaggaggatggcaaggtgttttggcagaatctggctggctacaagagacaggaagccctgagaccatacctgagcagcgaggaagatcggaagaagggaaagaaattcgctcggtaccagctgggcgacctgctgctgcacctggaaaagaagcacggcgaggactggggaaaggtgtacgacgaggcctgggagcggattgacaagaaagtggaaggcctgagcaagcacatcaagctggaagaggaacggagaagcgaggacgcccagagcaaggccgccctgaccgactggctgcgggctaaggccagcttcgtgatcgagggcctgaaggaggccgacaaggacgagttctgcagatgcgagctgaagctgcagaagtggtacggggacctgcggggaaagcccttcgccatcgaagccgagaacagcatcctggacatcagcggcttcagcaagcagtacaactgtgccttcatctggcagaaggacggcgtgaagaagctgaacctgtacctgatcatcaactacttcaagggcggcaagctgcggttcaagaagatcaaacctgaagccttcgaagccaacagattctacaccgtgatcaacaaaaagagcggcgagatcgtgcccatggaggtgaacttcaacttcgacgaccccaacctgatcatcctgcctctggcctttggcaagagacagggcagagaattcatctggaacgacctgctgtccctggaaaccggcagcctgaagctggccaacggaagagtgatcgagaagacactgtacaacagaagaacccggcaggatgagcctgccctgttcgtggccctgaccttcgagcggcgggaggtcctggactcctccaatatcaaaccaatgaacctgatcggcgtggcaagaggcgaaaacatccccgccgtgatcgccctgaccgaccccgagggctgcccactgagccggtttaaggatagcctgggaaacccaacccacatcctgagaatcggcgagagctataaggagaagcagcggaccatccaggccaagaaggaggtggagcagcggagagccggcggctacagccggaagtacgccagcaaagccaagaatctggcagacgatatggtgagaaacaccgctagagatctgctgtactacgccgtgacccaggatgccatgctgatcttcgccaacctgagccggggcttcggccggcagggcaagcggaccttcatggccgagagacagtacacacggatggaggactggctgaccgccaagctggcctacgagggcctgagcaagacctacctgtccaagacactggcccagtacacctccaagacatgcagcaactgtgggtttaccatcaccagcgccgactacgacagggtgctggagaagctgaagaagacagcaacaggctggatgaccacaattaacggcaaggagctgaaggtggagggccagattacctactacaacagatacaagagacagaacgtagtcaaggacctgtccgtcgagctggatagactgagcgaagaatctgtgaacaacgacatctcctcctggacaaagggcagaagcggagaagctctgagcctcctgaagaaaagattctcccatagacccgtgcaggagaagttcgtgtgcctgaactgcggcttcgagacacacgcagccgagcaagccgccctgaacatcgccagatcctggctgttcctgcggagccaggagtacaagaaataccagacaaacaagacaaccggcaacaccgataagagagccttcgtcgagacctggcagtccttttaccggaagaagcttaaggaggtgtggaaacctgccgtgcggtctggcggatctggcggaggctcctggaaggagagcctgagcttcgaggacgtggccctgtacttcaccagggaggagtggagcaggctggactgggcccagaaggacctgtacagggacgtgatgctggagaactacaggaacatgatcgtgctgggcttccagttccccaagcccgaggtgatctgccagctggagcagtgggaggagccctggatcctggacctgcccagggccggcaccaggaaggccagcggcagcgcctgcggcggcccaagcagcggcgcccctcctcccagcggcggcagcccagccggctccccaacctctaccgaggagggcacctctgagtccgccacccccgagagcggccctggcacctccaccgagcccagcgagggcagcgcacccggcagccctgccggcagccccacctccacagaggagggaaccagcaccgagcccagcgaaggcagcgccccaggcaccagcaccgagcctagtgagcaggagattaaacggatcaacaagatcagaagaagacttgtgaaagacagcaacaccaagaaggccggcaagacaggccccatgaaaaccctgctggttagagtgatgacacccgatctgagagagcggctggaaaacctgagaaagaagcctgaaaatatcccccagcccatcagcaatacatctagagccaacctgaataagctgctgaccgattacaccgaaatgaagaaggcgatcctgcatgtgtactgggaagagttccagaaggaccctgtgggcctgatgagccgggtggcccagcctgccagcaagaagatcgatcagaacaagctgaaacctgagatggacgagaagggcaacctgaccaccgccggctttgcctgctctcagtgtggccagcccctgttcgtgtacaagctggagcaggtgtctgagaagggcaaggcttacaccaactacttcggacggtgcaatgtggccgagcacgaaaagctgatcctgctggcccagctgaagcccgagaaggatagcgacgaagccgtgacatatagcctgggaaagtttgggcagagggccctggatttctacagcattcatgtgaccaaggagtccacccaccccgtgaagcccctggcccagatcgccggaaacagatacgcctccggacctgtgggaaaggccctgagcgacgcatgtatgggcacaatcgcctccttcctgtctaagtaccaggacatcatcatcgaacaccagaaggtggtgaagggcaaccagaagagactggagagcctgcgggagctggccggcaaggaaaacctggaataccctagcgtgaccctgccacctcagcctcacaccaaggagggcgttgatgcctacaacgaagtgatcgcccgggtgcgaatgtgggtgaacctgaacctgtggcagaagctgaagctaagcagagatgatgccaagcctctgctgagactgaagggattcccttcctttcctctggtcgagagacaggccaacgaagtggactggtgggacatggtgtgtaacgtgaagaagctgatcaacgagaaaaaggaggatggcaaggtgttttggcagaatctggctggctacaagagacaggaagccctgagaccatacctgagcagcgaggaagatcggaagaagggaaagaaattcgctcggtaccagctgggcgacctgctgctgcacctggaaaagaagcacggcgaggactggggaaaggtgtacgacgaggcctgggagcggattgacaagaaagtggaaggcctgagcaagcacatcaagctggaagaggaacggagaagcgaggacgcccagagcaaggccgccctgaccgactggctgcgggctaaggccagcttcgtgatcgagggcctgaaggaggccgacaaggacgagttctgcagatgcgagctgaagctgcagaagtggtacggggacctgcggggaaagcccttcgccatcgaagccgagaacagcatcctggacatcagcggcttcagcaagcagtacaactgtgccttcatctggcagaaggacggcgtgaagaagctgaacctgtacctgatcatcaactacttcaagggcggcaagctgcggttcaagaagatcaaacctgaagccttcgaagccaacagattctacaccgtgatcaacaaaaagagcggcgagatcgtgcccatggaggtgaacttcaacttcgacgaccccaacctgatcatcctgcctctggcctttggcaagagacagggcagagaattcatctggaacgacctgctgtccctggaaaccggcagcctgaagctggccaacggaagagtgatcgagaagacactgtacaacagaagaacccggcaggatgagcctgccctgttcgtggccctgaccttcgagcggcgggaggtcctggactcctccaatatcaaaccaatgaacctgatcggcgtggcaagaggcgaaaacatccccgccgtgatcgccctgaccgaccccgagggctgcccactgagccggtttaaggatagcctgggaaacccaacccacatcctgagaatcggcgagagctataaggagaagcagcggaccatccaggccaagaaggaggtggagcagcggagagccggcggctacagccggaagtacgccagcaaagccaagaatctggcagacgatatggtgagaaacaccgctagagatctgctgtactacgccgtgacccaggatgccatgctgatcttcgccaacctgagccggggcttcggccggcagggcaagcggaccttcatggccgagagacagtacacacggatggaggactggctgaccgccaagctggcctacgagggcctgagcaagacctacctgtccaagacactggcccagtacacctccaagacatgcagcaactgtgggtttaccatcaccagcgccgactacgacagggtgctggagaagctgaagaagacagcaacaggctggatgaccacaattaacggcaaggagctgaaggtggagggccagattacctactacaacagatacaagagacagaacgtagtcaaggacctgtccgtcgagctggatagactgagcgaagaatctgtgaacaacgacatctcctcctggacaaagggcagaagcggagaagctctgagcctcctgaagaaaagattctcccatagacccgtgcaggagaagttcgtgtgcctgaactgcggcttcgagacacacgcagccgagcaagccgccctgaacatcgccagatcctggctgttcctgcggagccaggagtacaagaaataccagacaaacaagacaaccggcaacaccgataagagagccttcgtcgagacctggcagtccttttaccggaagaagcttaaggaggtgtggaaacctgccgtgcggtctggcggatctggcggaggctccttggaaggagagcctgagcttcgaggacgtggccctgtacttcaccagggaggagtggagcaggctggactgggcccagaaggacctgtacagggacgtgatgctggagaactacaggaacatgatcgtgctgggcttccagttccccaagcccgaggtgatctgccagctggagcagtgggaggagccctggatcctggacctgcccagggccggcaccaggaaggccagcggcagcgcctgcggatctggctccggcagcggccccaagaaaaagagaaaagtctaagctgccttctgcggggcttgccttctggccatgcccttcttctctcccttgcacctgtacctcttggtctttgaataaagcctgagtaggaaggctagcaaaaaaaaaaaaaaaaaaaaaaaaaaaaaaaaaaaaaaaaaaaaaaaaaaaaaaaaaaaaaaaaaaaaaaaaaaaaaaaa

SEQ ID NO: 16042 - RNA, 9485 nt, synthetic construct
  source 1..9485: mol_type = other RNA
aggaaataagagagaaaagaagagtaagaagaaatataagagccaccatggcccctaagaagaagcgtaaagtgagccggatggaacgcctcgtctacgaggtgcggcagaagtgcagaaacatcgaggacatctgcatctcctgcggatctctgaacgtgaccctggagcacccactgttcatcggcggcatgtgccagaactgtaaaaactgttttctggagtgtgcctatcaatacgacgatgacggctaccagagctactgcaccatctgttgcggcggaagagaggtgctgatgtgtggaaataacaactgctgccggtgcttctgcgtggaatgcgtggacctgctggtgggccccggcgccgcccaggccgctattaaggaagatccttggaactgctacatgtgcggccacaagggcacatacggcctgctgagacggagagaggactggcctagcagactgcagatgttcttcgccaataaccacgaccaggagttcgacccccctaaggtgtaccctcccgtccccgccgagaagagaaagcccatccgggtcctgagcctgttcgatggcatcgccaccggtctgctggtgctgaaggacctgggcatccaggtggataggtacattgcctccgaggtgtgcgaggactccatcaccgtgggaatggtgcgtcatcagggcaagatcatgtacgtgggcgacgtgcggagcgtgacacagaagcatatccaggagtggggccctttcgacctggtgatcggcggcagcccttgcaatgacctgagcatcgtgaacccagcccggaagggcctgtacgagggaaccggcagactgttcttcgagttttacagactgctgcacgacgcccggcctaaggaaggcgacgaccggcccttcttttggctgttcgagaatgtggtggccatgggagtcagcgacaagcgggatattagccggttcctggagagcaaccccgtgatgatcgatgccaaggaagtgagcgccgcccaccgggccagatacttctggggcaatctgcctggcatgaacagacccctggccagcaccgtgaacgacaagctggagctgcaggagtgcctggagcacggccggatcgccaagttcagcaaggtgagaaccatcaccacccgaagcaacagcatcaaacaaggcaaggaccagcactttcctgtgttcatgaacgagaaggaggacatcctgtggtgtaccgagatggagagagtgttcgggttcccagtccactacacagatgtcagcaacatgtctagactggccagacagagactgctgggaagaagctggtccgtccctgtgatcagacacctgttcgcccctctgaaggagtacttcgcctgcgtgagcagcggcaacagcaacgccaacagccggggccccagcttctctagcggcctggtgccactgtccctgagagggagccacatgggccccatggagatctacaaaaccgtgagcgcctggaagcggcagcctgtgcgcgtgctgagcctgtttcggaatatcgataaagtcctgaaaagcctgggattcctggagagcggctctggctccggcggtggcaccctgaagtacgtggaggatgtgacaaacgtggtcagacgggatgtggagaagtggggccccttcgatctggtgtacggcagcacccaacccctgggcagctcttgtgaccggtgccctggctggtacatgtttcagttccaccggatcctgcagtacgccctgccgagacaggagtcccagcggccattcttttggattttcatggacaacttgctgctgaccgaggatgaccaggaaactaccactcggttcctgcagaccgaagccgtgaccctgcaggacgtgagaggccgggactaccagaacgccatgcgggtgtggtccaacatccctggactgaaaagcaagcacgcacctctgacccctaaagaagaggagtacctgcaggcccaggtgcggagcagaagcaagctggacgcccctaaggtggatctgctggtgaagaattgcctcctgcccctgagagagtacttcaagtatttcagccagaatagtctgcccctgggaggcagcggcggcggcgccctggtgacatttgaggacgtcgccgtgcggttcacccaggaggaatgggctctgctggatccttctcagaaaatcctgtaccgggacgtgatgagagagacataccggaatctgacctccgtgggcatcaactgggaatgttgggaccttgaagcctgcttcagaagcctgggaagaaacctgagagtgcaggtggtgaagagaaagtgcgagctgaccaacagcggcccctgcgccgagggcggcccaagcagcggcgcccctcctcccagcggcggcagcccagccggctccccaacctctaccgaggagggcacctctgagtccgccacccccgagagcggccctggcacctccaccgagcccagcgagggcagcgcacccggcagccctgccggcagccccacctccacagaggagggaaccagcaccgagcccagcgaaggcagcgccccaggcaccagcaccgagcctagtgagcaggagattaaacggatcaacaagatcagaagaagacttgtgaaagacagcaacaccaagaaggccggcaagacaggccccatgaaaaccctgctggttagagtgatgacacccgatctgagagagcggctggaaaacctgagaaagaagcctgaaaatatcccccagcccatcagcaatacatctagagccaacctgaataagctgctgaccgattacaccgaaatgaagaaggcgatcctgcatgtgtactgggaagagttccagaaggaccctgtgggcctgatgagccgggtggcccagcctgccagcaagaagatcgatcagaacaagctgaaacctgagatggacgagaagggcaacctgaccaccgccggctttgcctgctctcagtgtggccagcccctgttcgtgtacaagctggagcaggtgtctgagaagggcaaggcttacaccaactacttcggacggtgcaatgtggccgagcacgaaaagctgatcctgctggcccagctgaagcccgagaaggatagcgacgaagccgtgacatatagcctgggaaagtttgggcagagggccctggatttctacagcattcatgtgaccaaggagtccacccaccccgtgaagcccctggcccagatcgccggaaacagatacgcctccggacctgtgggaaaggccctgagcgacgcatgtatgggcacaatcgcctccttcctgtctaagtaccaggacatcatcatcgaacaccagaaggtggtgaagggcaaccagaagagactggagagcctgcgggagctggccggcaaggaaaacctggaataccctagcgtgaccctgccacctcagcctcacaccaaggagggcgttgatgcctacaacgaagtgatcgcccgggtgcgaatgtgggtgaacctgaacctgtggcagaagctgaagctaagcagagatgatgccaagcctctgctgagactgaagggattcccttcctttcctctggtcgagagacaggccaacgaagtggactggtgggacatggtgtgtaacgtgaagaagctgatcaacgagaaaaaggaggatggcaaggtgttttggcagaatctggctggctacaagagacaggaagccctgagaccatacctgagcagcgaggaagatcggaagaagggaaagaaattcgctcggtaccagctgggcgacctgctgctgcacctggaaaagaagcacggcgaggactggggaaaggtgtacgacgaggcctgggagcggattgacaagaaagtggaaggcctgagcaagcacatcaagctggaagaggaacggagaagcgaggacgcccagagcaaggccgccctgaccgactggctgcgggctaaggccagcttcgtgatcgagggcctgaaggaggccgacaaggacgagttctgcagatgcgagctgaagctgcagaagtggtacggggacctgcggggaaagcccttcgccatcgaagccgagaacagcatcctggacatcagcggcttcagcaagcagtacaactgtgccttcatctggcagaaggacggcgtgaagaagctgaacctgtacctgatcatcaactacttcaagggcggcaagctgcggttcaagaagatcaaacctgaagccttcgaagccaacagattctacaccgtgatcaacaaaaagagcggcgagatcgtgcccatggaggtgaacttcaacttcgacgaccccaacctgatcatcctgcctctggcctttggcaagagacagggcagagaattcatctggaacgacctgctgtccctggaaaccggcagcctgaagctggccaacggaagagtgatcgagaagacactgtacaacagaagaacccggcaggatgagcctgccctgttcgtggccctgaccttcgagcggcgggaggtcctggactcctccaatatcaaaccaatgaacctgatcggcgtggcaagaggcgaaaacatccccgccgtgatcgccctgaccgaccccgagggctgcccactgagccggtttaaggatagcctgggaaacccaacccacatcctgagaatcggcgagagctataaggagaagcagcggaccatccaggccaagaaggaggtggagcagcggagagccggcggctacagccggaagtacgccagcaaagccaagaatctggcagacgatatggtgagaaacaccgctagagatctgctgtactacgccgtgacccaggatgccatgctgatcttcgccaacctgagccggggcttcggccggcagggcaagcggaccttcatggccgagagacagtacacacggatggaggactggctgaccgccaagctggcctacgagggcctgagcaagacctacctgtccaagacactggcccagtacacctccaagacatgcagcaactgtgggtttaccatcaccagcgccgactacgacagggtgctggagaagctgaagaagacagcaacaggctggatgaccacaattaacggcaaggagctgaaggtggagggccagattacctactacaacagatacaagagacagaacgtagtcaaggacctgtccgtcgagctggatagactgagcgaagaatctgtgaacaacgacatctcctcctggacaaagggcagaagcggagaagctctgagcctcctgaagaaaagattctcccatagacccgtgcaggagaagttcgtgtgcctgaactgcggcttcgagacacacgcagccgagcaagccgccctgaacatcgccagatcctggctgttcctgcggagccaggagtacaagaaataccagacaaacaagacaaccggcaacaccgataagagagccttcgtcgagacctggcagtccttttaccggaagaagcttaaggaggtgtggaaacctgccgtgcggtctggcggatctggcggaggctccgcccccctgcccctgaccttcgaggacgtggccatctacttcagcgagcaggagtggcagcacctggagacctggcagaaggagctgtacaagcaggtgatgaggaccaactacgagaccctgatcagcctggacaacggcctgcccaagcccgagctgatcagctggatggagctgggcagggagaacttcggcagctggggcgagggccagaaggtggacaggggcatcaggtgcagcgtgggcggcccaagcagcggcgcccctcctcccagcggcggcagcccagccggctccccaacctctaccgaggagggcacctctgagtccgccacccccgagagcggccctggcacctccaccgagcccagcgagggcagcgcacccggcagccctgccggcagccccacctccacagaggagggaaccagcaccgagcccagcgaaggcagcgccccaggcaccagcaccgagcctagtgagcaggagattaaacggatcaacaagatcagaagaagacttgtgaaagacagcaacaccaagaaggccggcaagacaggccccatgaaaaccctgctggttagagtgatgacacccgatctgagagagcggctggaaaacctgagaaagaagcctgaaaatatcccccagcccatcagcaatacatctagagccaacctgaataagctgctgaccgattacaccgaaatgaagaaggcgatcctgcatgtgtactgggaagagttccagaaggaccctgtgggcctgatgagccgggtggcccagcctgccagcaagaagatcgatcagaacaagctgaaacctgagatggacgagaagggcaacctgaccaccgccggctttgcctgctctcagtgtggccagcccctgttcgtgtacaagctggagcaggtgtctgagaagggcaaggcttacaccaactacttcggacggtgcaatgtggccgagcacgaaaagctgatcctgctggcccagctgaagcccgagaaggatagcgacgaagccgtgacatatagcctgggaaagtttgggcagagggccctggatttctacagcattcatgtgaccaaggagtccacccaccccgtgaagcccctggcccagatcgccggaaacagatacgcctccggacctgtgggaaaggccctgagcgacgcatgtatgggcacaatcgcctccttcctgtctaagtaccaggacatcatcatcgaacaccagaaggtggtgaagggcaaccagaagagactggagagcctgcgggagctggccggcaaggaaaacctggaataccctagcgtgaccctgccacctcagcctcacaccaaggagggcgttgatgcctacaacgaagtgatcgcccgggtgcgaatgtgggtgaacctgaacctgtggcagaagctgaagctaagcagagatgatgccaagcctctgctgagactgaagggattcccttcctttcctctggtcgagagacaggccaacgaagtggactggtgggacatggtgtgtaacgtgaagaagctgatcaacgagaaaaaggaggatggcaaggtgttttggcagaatctggctggctacaagagacaggaagccctgagaccatacctgagcagcgaggaagatcggaagaagggaaagaaattcgctcggtaccagctgggcgacctgctgctgcacctggaaaagaagcacggcgaggactggggaaaggtgtacgacgaggcctgggagcggattgacaagaaagtggaaggcctgagcaagcacatcaagctggaagaggaacggagaagcgaggacgcccagagcaaggccgccctgaccgactggctgcgggctaaggccagcttcgtgatcgagggcctgaaggaggccgacaaggacgagttctgcagatgcgagctgaagctgcagaagtggtacggggacctgcggggaaagcccttcgccatcgaagccgagaacagcatcctggacatcagcggcttcagcaagcagtacaactgtgccttcatctggcagaaggacggcgtgaagaagctgaacctgtacctgatcatcaactacttcaagggcggcaagctgcggttcaagaagatcaaacctgaagccttcgaagccaacagattctacaccgtgatcaacaaaaagagcggcgagatcgtgcccatggaggtgaacttcaacttcgacgaccccaacctgatcatcctgcctctggcctttggcaagagacagggcagagaattcatctggaacgacctgctgtccctggaaaccggcagcctgaagctggccaacggaagagtgatcgagaagacactgtacaacagaagaacccggcaggatgagcctgccctgttcgtggccctgaccttcgagcggcgggaggtcctggactcctccaatatcaaaccaatgaacctgatcggcgtggcaagaggcgaaaacatccccgccgtgatcgccctgaccgaccccgagggctgcccactgagccggtttaaggatagcctgggaaacccaacccacatcctgagaatcggcgagagctataaggagaagcagcggaccatccaggccaagaaggaggtggagcagcggagagccggcggctacagccggaagtacgccagcaaagccaagaatctggcagacgatatggtgagaaacaccgctagagatctgctgtactacgccgtgacccaggatgccatgctgatcttcgccaacctgagccggggcttcggccggcagggcaagcggaccttcatggccgagagacagtacacacggatggaggactggctgaccgccaagctggcctacgagggcctgagcaagacctacctgtccaagacactggcccagtacacctccaagacatgcagcaactgtgggtttaccatcaccagcgccgactacgacagggtgctggagaagctgaagaagacagcaacaggctggatgaccacaattaacggcaaggagctgaaggtggagggccagattacctactacaacagatacaagagacagaacgtagtcaaggacctgtccgtcgagctggatagactgagcgaagaatctgtgaacaacgacatctcctcctggacaaagggcagaagcggagaagctctgagcctcctgaagaaaagattctcccatagacccgtgcaggagaagttcgtgtgcctgaactgcggcttcgagacacacgcagccgagcaagccgccctgaacatcgccagatcctggctgttcctgcggagccaggagtacaagaaataccagacaaacaagacaaccggcaacaccgataagagagccttcgtcgagacctggcagtccttttaccggaagaagcttaaggaggtgtggaaacctgccgtgcggtctggcggatctggcggaggctcctgcccccctgcccctgaccttcgaggacgtggccatctacttcagcgagcaggagtggcagcacctggagacctggcagaaggagctgtacaagcaggtgatgaggaccaactacgagaccctgatcagcctggacaacggcctgcccaagcccgagctgatcagctggatggagctgggcagggagaacttcggcagctggggcgagggccagaaggtggacaggggcatcaggtgcagcgtgggatctggctccggcagcggccccaagaaaaagagaaaagtctaagctgccttctgcggggcttgccttctggccatgcccttcttctctcccttgcacctgtacctcttggtctttgaataaagcctgagtaggaaggctagcaaaaaaaaaaaaaaaaaaaaaaaaaaaaaaaaaaaaaaaaaaaaaaaaaaaaaaaaaaaaaaaaaaaaaaaaaaaaaaaa

SEQ ID NO: 16043 - RNA, 9485 nt, synthetic construct
  source 1..9485: mol_type = other RNA
aggaaataagagagaaaagaagagtaagaagaaatataagagccaccatggcccctaagaagaagcgtaaagtgagccggatggaacgcctcgtctacgaggtgcggcagaagtgcagaaacatcgaggacatctgcatctcctgcggatctctgaacgtgaccctggagcacccactgttcatcggcggcatgtgccagaactgtaaaaactgttttctggagtgtgcctatcaatacgacgatgacggctaccagagctactgcaccatctgttgcggcggaagagaggtgctgatgtgtggaaataacaactgctgccggtgcttctgcgtggaatgcgtggacctgctggtgggccccggcgccgcccaggccgctattaaggaagatccttggaactgctacatgtgcggccacaagggcacatacggcctgctgagacggagagaggactggcctagcagactgcagatgttcttcgccaataaccacgaccaggagttcgacccccctaaggtgtaccctcccgtccccgccgagaagagaaagcccatccgggtcctgagcctgttcgatggcatcgccaccggtctgctggtgctgaaggacctgggcatccaggtggataggtacattgcctccgaggtgtgcgaggactccatcaccgtgggaatggtgcgtcatcagggcaagatcatgtacgtgggcgacgtgcggagcgtgacacagaagcatatccaggagtggggccctttcgacctggtgatcggcggcagcccttgcaatgacctgagcatcgtgaacccagcccggaagggcctgtacgagggaaccggcagactgttcttcgagttttacagactgctgcacgacgcccggcctaaggaaggcgacgaccggcccttcttttggctgttcgagaatgtggtggccatgggagtcagcgacaagcgggatattagccggttcctggagagcaaccccgtgatgatcgatgccaaggaagtgagcgccgcccaccgggccagatacttctggggcaatctgcctggcatgaacagacccctggccagcaccgtgaacgacaagctggagctgcaggagtgcctggagcacggccggatcgccaagttcagcaaggtgagaaccatcaccacccgaagcaacagcatcaaacaaggcaaggaccagcactttcctgtgttcatgaacgagaaggaggacatcctgtggtgtaccgagatggagagagtgttcgggttcccagtccactacacagatgtcagcaacatgtctagactggccagacagagactgctgggaagaagctggtccgtccctgtgatcagacacctgttcgcccctctgaaggagtacttcgcctgcgtgagcagcggcaacagcaacgccaacagccggggccccagcttctctagcggcctggtgccactgtccctgagagggagccacatgggccccatggagatctacaaaaccgtgagcgcctggaagcggcagcctgtgcgcgtgctgagcctgtttcggaatatcgataaagtcctgaaaagcctgggattcctggagagcggctctggctccggcggtggcaccctgaagtacgtggaggatgtgacaaacgtggtcagacgggatgtggagaagtggggccccttcgatctggtgtacggcagcacccaacccctgggcagctcttgtgaccggtgccctggctggtacatgtttcagttccaccggatcctgcagtacgccctgccgagacaggagtcccagcggccattcttttggattttcatggacaacttgctgctgaccgaggatgaccaggaaactaccactcggttcctgcagaccgaagccgtgaccctgcaggacgtgagaggccgggactaccagaacgccatgcgggtgtggtccaacatccctggactgaaaagcaagcacgcacctctgacccctaaagaagaggagtacctgcaggcccaggtgcggagcagaagcaagctggacgcccctaaggtggatctgctggtgaagaattgcctcctgcccctgagagagtacttcaagtatttcagccagaatagtctgcccctgggaggcagcggcggcggcgccctggtgacatttgaggacgtcgccgtgcggttcacccaggaggaatgggctctgctggatccttctcagaaaatcctgtaccgggacgtgatgagagagacataccggaatctgacctccgtgggcatcaactgggaatgttgggaccttgaagcctgcttcagaagcctgggaagaaacctgagagtgcaggtggtgaagagaaagtgcgagctgaccaacagcggcccctgcgccgagggcggcccaagcagcggcgcccctcctcccagcggcggcagcccagccggctccccaacctctaccgaggagggcacctctgagtccgccacccccgagagcggccctggcacctccaccgagcccagcgagggcagcgcacccggcagccctgccggcagccccacctccacagaggagggaaccagcaccgagcccagcgaaggcagcgccccaggcaccagcaccgagcctagtgagcaggagattaaacggatcaacaagatcagaagaagacttgtgaaagacagcaacaccaagaaggccggcaagacaggccccatgaaaaccctgctggttagagtgatgacacccgatctgagagagcggctggaaaacctgagaaagaagcctgaaaatatcccccagcccatcagcaatacatctagagccaacctgaataagctgctgaccgattacaccgaaatgaagaaggcgatcctgcatgtgtactgggaagagttccagaaggaccctgtgggcctgatgagccgggtggcccagcctgccagcaagaagatcgatcagaacaagctgaaacctgagatggacgagaagggcaacctgaccaccgccggctttgcctgctctcagtgtggccagcccctgttcgtgtacaagctggagcaggtgtctgagaagggcaaggcttacaccaactacttcggacggtgcaatgtggccgagcacgaaaagctgatcctgctggcccagctgaagcccgagaaggatagcgacgaagccgtgacatatagcctgggaaagtttgggcagagggccctggatttctacagcattcatgtgaccaaggagtccacccaccccgtgaagcccctggcccagatcgccggaaacagatacgcctccggacctgtgggaaaggccctgagcgacgcatgtatgggcacaatcgcctccttcctgtctaagtaccaggacatcatcatcgaacaccagaaggtggtgaagggcaaccagaagagactggagagcctgcgggagctggccggcaaggaaaacctggaataccctagcgtgaccctgccacctcagcctcacaccaaggagggcgttgatgcctacaacgaagtgatcgcccgggtgcgaatgtgggtgaacctgaacctgtggcagaagctgaagctaagcagagatgatgccaagcctctgctgagactgaagggattcccttcctttcctctggtcgagagacaggccaacgaagtggactggtgggacatggtgtgtaacgtgaagaagctgatcaacgagaaaaaggaggatggcaaggtgttttggcagaatctggctggctacaagagacaggaagccctgagaccatacctgagcagcgaggaagatcggaagaagggaaagaaattcgctcggtaccagctgggcgacctgctgctgcacctggaaaagaagcacggcgaggactggggaaaggtgtacgacgaggcctgggagcggattgacaagaaagtggaaggcctgagcaagcacatcaagctggaagaggaacggagaagcgaggacgcccagagcaaggccgccctgaccgactggctgcgggctaaggccagcttcgtgatcgagggcctgaaggaggccgacaaggacgagttctgcagatgcgagctgaagctgcagaagtggtacggggacctgcggggaaagcccttcgccatcgaagccgagaacagcatcctggacatcagcggcttcagcaagcagtacaactgtgccttcatctggcagaaggacggcgtgaagaagctgaacctgtacctgatcatcaactacttcaagggcggcaagctgcggttcaagaagatcaaacctgaagccttcgaagccaacagattctacaccgtgatcaacaaaaagagcggcgagatcgtgcccatggaggtgaacttcaacttcgacgaccccaacctgatcatcctgcctctggcctttggcaagagacagggcagagaattcatctggaacgacctgctgtccctggaaaccggcagcctgaagctggccaacggaagagtgatcgagaagacactgtacaacagaagaacccggcaggatgagcctgccctgttcgtggccctgaccttcgagcggcgggaggtcctggactcctccaatatcaaaccaatgaacctgatcggcgtggcaagaggcgaaaacatccccgccgtgatcgccctgaccgaccccgagggctgcccactgagccggtttaaggatagcctgggaaacccaacccacatcctgagaatcggcgagagctataaggagaagcagcggaccatccaggccaagaaggaggtggagcagcggagagccggcggctacagccggaagtacgccagcaaagccaagaatctggcagacgatatggtgagaaacaccgctagagatctgctgtactacgccgtgacccaggatgccatgctgatcttcgccaacctgagccggggcttcggccggcagggcaagcggaccttcatggccgagagacagtacacacggatggaggactggctgaccgccaagctggcctacgagggcctgagcaagacctacctgtccaagacactggcccagtacacctccaagacatgcagcaactgtgggtttaccatcaccagcgccgactacgacagggtgctggagaagctgaagaagacagcaacaggctggatgaccacaattaacggcaaggagctgaaggtggagggccagattacctactacaacagatacaagagacagaacgtagtcaaggacctgtccgtcgagctggatagactgagcgaagaatctgtgaacaacgacatctcctcctggacaaagggcagaagcggagaagctctgagcctcctgaagaaaagattctcccatagacccgtgcaggagaagttcgtgtgcctgaactgcggcttcgagacacacgcagccgagcaagccgccctgaacatcgccagatcctggctgttcctgcggagccaggagtacaagaaataccagacaaacaagacaaccggcaacaccgataagagagccttcgtcgagacctggcagtccttttaccggaagaagcttaaggaggtgtggaaacctgccgtgcggtctggcggatctggcggaggctcctaccagacccccgtgagcttcaaggacgtggtggtgggcttcacccaggaggagtggcacaggctgagccccgcccagagggccctgtacagggacgtgatgctggagacctacagcaacctgctgagcgtgggctacgagggcaccaagcccgacgtgatcctgaggctggagcaggaggaggccccctggatcggcgaggccgcctgccccggctgccactgctgggaggacatctggcagggcggcccaagcagcggcgcccctcctcccagcggcggcagcccagccggctccccaacctctaccgaggagggcacctctgagtccgccacccccgagagcggccctggcacctccaccgagcccagcgagggcagcgcacccggcagccctgccggcagccccacctccacagaggagggaaccagcaccgagcccagcgaaggcagcgccccaggcaccagcaccgagcctagtgagcaggagattaaacggatcaacaagatcagaagaagacttgtgaaagacagcaacaccaagaaggccggcaagacaggccccatgaaaaccctgctggttagagtgatgacacccgatctgagagagcggctggaaaacctgagaaagaagcctgaaaatatcccccagcccatcagcaatacatctagagccaacctgaataagctgctgaccgattacaccgaaatgaagaaggcgatcctgcatgtgtactgggaagagttccagaaggaccctgtgggcctgatgagccgggtggcccagcctgccagcaagaagatcgatcagaacaagctgaaacctgagatggacgagaagggcaacctgaccaccgccggctttgcctgctctcagtgtggccagcccctgttcgtgtacaagctggagcaggtgtctgagaagggcaaggcttacaccaactacttcggacggtgcaatgtggccgagcacgaaaagctgatcctgctggcccagctgaagcccgagaaggatagcgacgaagccgtgacatatagcctgggaaagtttgggcagagggccctggatttctacagcattcatgtgaccaaggagtccacccaccccgtgaagcccctggcccagatcgccggaaacagatacgcctccggacctgtgggaaaggccctgagcgacgcatgtatgggcacaatcgcctccttcctgtctaagtaccaggacatcatcatcgaacaccagaaggtggtgaagggcaaccagaagagactggagagcctgcgggagctggccggcaaggaaaacctggaataccctagcgtgaccctgccacctcagcctcacaccaaggagggcgttgatgcctacaacgaagtgatcgcccgggtgcgaatgtgggtgaacctgaacctgtggcagaagctgaagctaagcagagatgatgccaagcctctgctgagactgaagggattcccttcctttcctctggtcgagagacaggccaacgaagtggactggtgggacatggtgtgtaacgtgaagaagctgatcaacgagaaaaaggaggatggcaaggtgttttggcagaatctggctggctacaagagacaggaagccctgagaccatacctgagcagcgaggaagatcggaagaagggaaagaaattcgctcggtaccagctgggcgacctgctgctgcacctggaaaagaagcacggcgaggactggggaaaggtgtacgacgaggcctgggagcggattgacaagaaagtggaaggcctgagcaagcacatcaagctggaagaggaacggagaagcgaggacgcccagagcaaggccgccctgaccgactggctgcgggctaaggccagcttcgtgatcgagggcctgaaggaggccgacaaggacgagttctgcagatgcgagctgaagctgcagaagtggtacggggacctgcggggaaagcccttcgccatcgaagccgagaacagcatcctggacatcagcggcttcagcaagcagtacaactgtgccttcatctggcagaaggacggcgtgaagaagctgaacctgtacctgatcatcaactacttcaagggcggcaagctgcggttcaagaagatcaaacctgaagccttcgaagccaacagattctacaccgtgatcaacaaaaagagcggcgagatcgtgcccatggaggtgaacttcaacttcgacgaccccaacctgatcatcctgcctctggcctttggcaagagacagggcagagaattcatctggaacgacctgctgtccctggaaaccggcagcctgaagctggccaacggaagagtgatcgagaagacactgtacaacagaagaacccggcaggatgagcctgccctgttcgtggccctgaccttcgagcggcgggaggtcctggactcctccaatatcaaaccaatgaacctgatcggcgtggcaagaggcgaaaacatccccgccgtgatcgccctgaccgaccccgagggctgcccactgagccggtttaaggatagcctgggaaacccaacccacatcctgagaatcggcgagagctataaggagaagcagcggaccatccaggccaagaaggaggtggagcagcggagagccggcggctacagccggaagtacgccagcaaagccaagaatctggcagacgatatggtgagaaacaccgctagagatctgctgtactacgccgtgacccaggatgccatgctgatcttcgccaacctgagccggggcttcggccggcagggcaagcggaccttcatggccgagagacagtacacacggatggaggactggctgaccgccaagctggcctacgagggcctgagcaagacctacctgtccaagacactggcccagtacacctccaagacatgcagcaactgtgggtttaccatcaccagcgccgactacgacagggtgctggagaagctgaagaagacagcaacaggctggatgaccacaattaacggcaaggagctgaaggtggagggccagattacctactacaacagatacaagagacagaacgtagtcaaggacctgtccgtcgagctggatagactgagcgaagaatctgtgaacaacgacatctcctcctggacaaagggcagaagcggagaagctctgagcctcctgaagaaaagattctcccatagacccgtgcaggagaagttcgtgtgcctgaactgcggcttcgagacacacgcagccgagcaagccgccctgaacatcgccagatcctggctgttcctgcggagccaggagtacaagaaataccagacaaacaagacaaccggcaacaccgataagagagccttcgtcgagacctggcagtccttttaccggaagaagcttaaggaggtgtggaaacctgccgtgcggtctggcggatctggcggaggctccttaccagacccccgtgagcttcaaggacgtggtggtgggcttcacccaggaggagtggcacaggctgagccccgcccagagggccctgtacagggacgtgatgctggagacctacagcaacctgctgagcgtgggctacgagggcaccaagcccgacgtgatcctgaggctggagcaggaggaggccccctggatcggcgaggccgcctgccccggctgccactgctgggaggacatctggcagggatctggctccggcagcggccccaagaaaaagagaaaagtctaagctgccttctgcggggcttgccttctggccatgcccttcttctctcccttgcacctgtacctcttggtctttgaataaagcctgagtaggaaggctagcaaaaaaaaaaaaaaaaaaaaaaaaaaaaaaaaaaaaaaaaaaaaaaaaaaaaaaaaaaaaaaaaaaaaaaaaaaaaaaaa

SEQ ID NO: 16044 - RNA, 9485 nt, synthetic construct
  source 1..9485: mol_type = other RNA
aggaaataagagagaaaagaagagtaagaagaaatataagagccaccatggcccctaagaagaagcgtaaagtgagccggatggaacgcctcgtctacgaggtgcggcagaagtgcagaaacatcgaggacatctgcatctcctgcggatctctgaacgtgaccctggagcacccactgttcatcggcggcatgtgccagaactgtaaaaactgttttctggagtgtgcctatcaatacgacgatgacggctaccagagctactgcaccatctgttgcggcggaagagaggtgctgatgtgtggaaataacaactgctgccggtgcttctgcgtggaatgcgtggacctgctggtgggccccggcgccgcccaggccgctattaaggaagatccttggaactgctacatgtgcggccacaagggcacatacggcctgctgagacggagagaggactggcctagcagactgcagatgttcttcgccaataaccacgaccaggagttcgacccccctaaggtgtaccctcccgtccccgccgagaagagaaagcccatccgggtcctgagcctgttcgatggcatcgccaccggtctgctggtgctgaaggacctgggcatccaggtggataggtacattgcctccgaggtgtgcgaggactccatcaccgtgggaatggtgcgtcatcagggcaagatcatgtacgtgggcgacgtgcggagcgtgacacagaagcatatccaggagtggggccctttcgacctggtgatcggcggcagcccttgcaatgacctgagcatcgtgaacccagcccggaagggcctgtacgagggaaccggcagactgttcttcgagttttacagactgctgcacgacgcccggcctaaggaaggcgacgaccggcccttcttttggctgttcgagaatgtggtggccatgggagtcagcgacaagcgggatattagccggttcctggagagcaaccccgtgatgatcgatgccaaggaagtgagcgccgcccaccgggccagatacttctggggcaatctgcctggcatgaacagacccctggccagcaccgtgaacgacaagctggagctgcaggagtgcctggagcacggccggatcgccaagttcagcaaggtgagaaccatcaccacccgaagcaacagcatcaaacaaggcaaggaccagcactttcctgtgttcatgaacgagaaggaggacatcctgtggtgtaccgagatggagagagtgttcgggttcccagtccactacacagatgtcagcaacatgtctagactggccagacagagactgctgggaagaagctggtccgtccctgtgatcagacacctgttcgcccctctgaaggagtacttcgcctgcgtgagcagcggcaacagcaacgccaacagccggggccccagcttctctagcggcctggtgccactgtccctgagagggagccacatgggccccatggagatctacaaaaccgtgagcgcctggaagcggcagcctgtgcgcgtgctgagcctgtttcggaatatcgataaagtcctgaaaagcctgggattcctggagagcggctctggctccggcggtggcaccctgaagtacgtggaggatgtgacaaacgtggtcagacgggatgtggagaagtggggccccttcgatctggtgtacggcagcacccaacccctgggcagctcttgtgaccggtgccctggctggtacatgtttcagttccaccggatcctgcagtacgccctgccgagacaggagtcccagcggccattcttttggattttcatggacaacttgctgctgaccgaggatgaccaggaaactaccactcggttcctgcagaccgaagccgtgaccctgcaggacgtgagaggccgggactaccagaacgccatgcgggtgtggtccaacatccctggactgaaaagcaagcacgcacctctgacccctaaagaagaggagtacctgcaggcccaggtgcggagcagaagcaagctggacgcccctaaggtggatctgctggtgaagaattgcctcctgcccctgagagagtacttcaagtatttcagccagaatagtctgcccctgggaggcagcggcggcggcgccctggtgacatttgaggacgtcgccgtgcggttcacccaggaggaatgggctctgctggatccttctcagaaaatcctgtaccgggacgtgatgagagagacataccggaatctgacctccgtgggcatcaactgggaatgttgggaccttgaagcctgcttcagaagcctgggaagaaacctgagagtgcaggtggtgaagagaaagtgcgagctgaccaacagcggcccctgcgccgagggcggcccaagcagcggcgcccctcctcccagcggcggcagcccagccggctccccaacctctaccgaggagggcacctctgagtccgccacccccgagagcggccctggcacctccaccgagcccagcgagggcagcgcacccggcagccctgccggcagccccacctccacagaggagggaaccagcaccgagcccagcgaaggcagcgccccaggcaccagcaccgagcctagtgagcaggagattaaacggatcaacaagatcagaagaagacttgtgaaagacagcaacaccaagaaggccggcaagacaggccccatgaaaaccctgctggttagagtgatgacacccgatctgagagagcggctggaaaacctgagaaagaagcctgaaaatatcccccagcccatcagcaatacatctagagccaacctgaataagctgctgaccgattacaccgaaatgaagaaggcgatcctgcatgtgtactgggaagagttccagaaggaccctgtgggcctgatgagccgggtggcccagcctgccagcaagaagatcgatcagaacaagctgaaacctgagatggacgagaagggcaacctgaccaccgccggctttgcctgctctcagtgtggccagcccctgttcgtgtacaagctggagcaggtgtctgagaagggcaaggcttacaccaactacttcggacggtgcaatgtggccgagcacgaaaagctgatcctgctggcccagctgaagcccgagaaggatagcgacgaagccgtgacatatagcctgggaaagtttgggcagagggccctggatttctacagcattcatgtgaccaaggagtccacccaccccgtgaagcccctggcccagatcgccggaaacagatacgcctccggacctgtgggaaaggccctgagcgacgcatgtatgggcacaatcgcctccttcctgtctaagtaccaggacatcatcatcgaacaccagaaggtggtgaagggcaaccagaagagactggagagcctgcgggagctggccggcaaggaaaacctggaataccctagcgtgaccctgccacctcagcctcacaccaaggagggcgttgatgcctacaacgaagtgatcgcccgggtgcgaatgtgggtgaacctgaacctgtggcagaagctgaagctaagcagagatgatgccaagcctctgctgagactgaagggattcccttcctttcctctggtcgagagacaggccaacgaagtggactggtgggacatggtgtgtaacgtgaagaagctgatcaacgagaaaaaggaggatggcaaggtgttttggcagaatctggctggctacaagagacaggaagccctgagaccatacctgagcagcgaggaagatcggaagaagggaaagaaattcgctcggtaccagctgggcgacctgctgctgcacctggaaaagaagcacggcgaggactggggaaaggtgtacgacgaggcctgggagcggattgacaagaaagtggaaggcctgagcaagcacatcaagctggaagaggaacggagaagcgaggacgcccagagcaaggccgccctgaccgactggctgcgggctaaggccagcttcgtgatcgagggcctgaaggaggccgacaaggacgagttctgcagatgcgagctgaagctgcagaagtggtacggggacctgcggggaaagcccttcgccatcgaagccgagaacagcatcctggacatcagcggcttcagcaagcagtacaactgtgccttcatctggcagaaggacggcgtgaagaagctgaacctgtacctgatcatcaactacttcaagggcggcaagctgcggttcaagaagatcaaacctgaagccttcgaagccaacagattctacaccgtgatcaacaaaaagagcggcgagatcgtgcccatggaggtgaacttcaacttcgacgaccccaacctgatcatcctgcctctggcctttggcaagagacagggcagagaattcatctggaacgacctgctgtccctggaaaccggcagcctgaagctggccaacggaagagtgatcgagaagacactgtacaacagaagaacccggcaggatgagcctgccctgttcgtggccctgaccttcgagcggcgggaggtcctggactcctccaatatcaaaccaatgaacctgatcggcgtggcaagaggcgaaaacatccccgccgtgatcgccctgaccgaccccgagggctgcccactgagccggtttaaggatagcctgggaaacccaacccacatcctgagaatcggcgagagctataaggagaagcagcggaccatccaggccaagaaggaggtggagcagcggagagccggcggctacagccggaagtacgccagcaaagccaagaatctggcagacgatatggtgagaaacaccgctagagatctgctgtactacgccgtgacccaggatgccatgctgatcttcgccaacctgagccggggcttcggccggcagggcaagcggaccttcatggccgagagacagtacacacggatggaggactggctgaccgccaagctggcctacgagggcctgagcaagacctacctgtccaagacactggcccagtacacctccaagacatgcagcaactgtgggtttaccatcaccagcgccgactacgacagggtgctggagaagctgaagaagacagcaacaggctggatgaccacaattaacggcaaggagctgaaggtggagggccagattacctactacaacagatacaagagacagaacgtagtcaaggacctgtccgtcgagctggatagactgagcgaagaatctgtgaacaacgacatctcctcctggacaaagggcagaagcggagaagctctgagcctcctgaagaaaagattctcccatagacccgtgcaggagaagttcgtgtgcctgaactgcggcttcgagacacacgcagccgagcaagccgccctgaacatcgccagatcctggctgttcctgcggagccaggagtacaagaaataccagacaaacaagacaaccggcaacaccgataagagagccttcgtcgagacctggcagtccttttaccggaagaagcttaaggaggtgtggaaacctgccgtgcggtctggcggatctggcggaggctccaaggaggccagcgtggccttcagggacgtggccgtggacttcacccaggaggagtggaggctgctgagccccgcccagaggaccctgcacagggaggtgatgctggagacctacaaccacctggtgagcctggagatccccagcagcaagcccaagctgatcgcccagctggagaggggcgaggagccctggagggaggagaggaagtgcagcctggacctgtgccccgagagcaagcccgagggcggcccaagcagcggcgcccctcctcccagcggcggcagcccagccggctccccaacctctaccgaggagggcacctctgagtccgccacccccgagagcggccctggcacctccaccgagcccagcgagggcagcgcacccggcagccctgccggcagccccacctccacagaggagggaaccagcaccgagcccagcgaaggcagcgccccaggcaccagcaccgagcctagtgagcaggagattaaacggatcaacaagatcagaagaagacttgtgaaagacagcaacaccaagaaggccggcaagacaggccccatgaaaaccctgctggttagagtgatgacacccgatctgagagagcggctggaaaacctgagaaagaagcctgaaaatatcccccagcccatcagcaatacatctagagccaacctgaataagctgctgaccgattacaccgaaatgaagaaggcgatcctgcatgtgtactgggaagagttccagaaggaccctgtgggcctgatgagccgggtggcccagcctgccagcaagaagatcgatcagaacaagctgaaacctgagatggacgagaagggcaacctgaccaccgccggctttgcctgctctcagtgtggccagcccctgttcgtgtacaagctggagcaggtgtctgagaagggcaaggcttacaccaactacttcggacggtgcaatgtggccgagcacgaaaagctgatcctgctggcccagctgaagcccgagaaggatagcgacgaagccgtgacatatagcctgggaaagtttgggcagagggccctggatttctacagcattcatgtgaccaaggagtccacccaccccgtgaagcccctggcccagatcgccggaaacagatacgcctccggacctgtgggaaaggccctgagcgacgcatgtatgggcacaatcgcctccttcctgtctaagtaccaggacatcatcatcgaacaccagaaggtggtgaagggcaaccagaagagactggagagcctgcgggagctggccggcaaggaaaacctggaataccctagcgtgaccctgccacctcagcctcacaccaaggagggcgttgatgcctacaacgaagtgatcgcccgggtgcgaatgtgggtgaacctgaacctgtggcagaagctgaagctaagcagagatgatgccaagcctctgctgagactgaagggattcccttcctttcctctggtcgagagacaggccaacgaagtggactggtgggacatggtgtgtaacgtgaagaagctgatcaacgagaaaaaggaggatggcaaggtgttttggcagaatctggctggctacaagagacaggaagccctgagaccatacctgagcagcgaggaagatcggaagaagggaaagaaattcgctcggtaccagctgggcgacctgctgctgcacctggaaaagaagcacggcgaggactggggaaaggtgtacgacgaggcctgggagcggattgacaagaaagtggaaggcctgagcaagcacatcaagctggaagaggaacggagaagcgaggacgcccagagcaaggccgccctgaccgactggctgcgggctaaggccagcttcgtgatcgagggcctgaaggaggccgacaaggacgagttctgcagatgcgagctgaagctgcagaagtggtacggggacctgcggggaaagcccttcgccatcgaagccgagaacagcatcctggacatcagcggcttcagcaagcagtacaactgtgccttcatctggcagaaggacggcgtgaagaagctgaacctgtacctgatcatcaactacttcaagggcggcaagctgcggttcaagaagatcaaacctgaagccttcgaagccaacagattctacaccgtgatcaacaaaaagagcggcgagatcgtgcccatggaggtgaacttcaacttcgacgaccccaacctgatcatcctgcctctggcctttggcaagagacagggcagagaattcatctggaacgacctgctgtccctggaaaccggcagcctgaagctggccaacggaagagtgatcgagaagacactgtacaacagaagaacccggcaggatgagcctgccctgttcgtggccctgaccttcgagcggcgggaggtcctggactcctccaatatcaaaccaatgaacctgatcggcgtggcaagaggcgaaaacatccccgccgtgatcgccctgaccgaccccgagggctgcccactgagccggtttaaggatagcctgggaaacccaacccacatcctgagaatcggcgagagctataaggagaagcagcggaccatccaggccaagaaggaggtggagcagcggagagccggcggctacagccggaagtacgccagcaaagccaagaatctggcagacgatatggtgagaaacaccgctagagatctgctgtactacgccgtgacccaggatgccatgctgatcttcgccaacctgagccggggcttcggccggcagggcaagcggaccttcatggccgagagacagtacacacggatggaggactggctgaccgccaagctggcctacgagggcctgagcaagacctacctgtccaagacactggcccagtacacctccaagacatgcagcaactgtgggtttaccatcaccagcgccgactacgacagggtgctggagaagctgaagaagacagcaacaggctggatgaccacaattaacggcaaggagctgaaggtggagggccagattacctactacaacagatacaagagacagaacgtagtcaaggacctgtccgtcgagctggatagactgagcgaagaatctgtgaacaacgacatctcctcctggacaaagggcagaagcggagaagctctgagcctcctgaagaaaagattctcccatagacccgtgcaggagaagttcgtgtgcctgaactgcggcttcgagacacacgcagccgagcaagccgccctgaacatcgccagatcctggctgttcctgcggagccaggagtacaagaaataccagacaaacaagacaaccggcaacaccgataagagagccttcgtcgagacctggcagtccttttaccggaagaagcttaaggaggtgtggaaacctgccgtgcggtctggcggatctggcggaggctcctaaggaggccagcgtggccttcagggacgtggccgtggacttcacccaggaggagtggaggctgctgagccccgcccagaggaccctgcacagggaggtgatgctggagacctacaaccacctggtgagcctggagatccccagcagcaagcccaagctgatcgcccagctggagaggggcgaggagccctggagggaggagaggaagtgcagcctggacctgtgccccgagagcaagcccgagggatctggctccggcagcggccccaagaaaaagagaaaagtctaagctgccttctgcggggcttgccttctggccatgcccttcttctctcccttgcacctgtacctcttggtctttgaataaagcctgagtaggaaggctagcaaaaaaaaaaaaaaaaaaaaaaaaaaaaaaaaaaaaaaaaaaaaaaaaaaaaaaaaaaaaaaaaaaaaaaaaaaaaaaaa

SEQ ID NO: 16045 - RNA, 9485 nt, synthetic construct
  source 1..9485: mol_type = other RNA
aggaaataagagagaaaagaagagtaagaagaaatataagagccaccatggcccctaagaagaagcgtaaagtgagccggatggaacgcctcgtctacgaggtgcggcagaagtgcagaaacatcgaggacatctgcatctcctgcggatctctgaacgtgaccctggagcacccactgttcatcggcggcatgtgccagaactgtaaaaactgttttctggagtgtgcctatcaatacgacgatgacggctaccagagctactgcaccatctgttgcggcggaagagaggtgctgatgtgtggaaataacaactgctgccggtgcttctgcgtggaatgcgtggacctgctggtgggccccggcgccgcccaggccgctattaaggaagatccttggaactgctacatgtgcggccacaagggcacatacggcctgctgagacggagagaggactggcctagcagactgcagatgttcttcgccaataaccacgaccaggagttcgacccccctaaggtgtaccctcccgtccccgccgagaagagaaagcccatccgggtcctgagcctgttcgatggcatcgccaccggtctgctggtgctgaaggacctgggcatccaggtggataggtacattgcctccgaggtgtgcgaggactccatcaccgtgggaatggtgcgtcatcagggcaagatcatgtacgtgggcgacgtgcggagcgtgacacagaagcatatccaggagtggggccctttcgacctggtgatcggcggcagcccttgcaatgacctgagcatcgtgaacccagcccggaagggcctgtacgagggaaccggcagactgttcttcgagttttacagactgctgcacgacgcccggcctaaggaaggcgacgaccggcccttcttttggctgttcgagaatgtggtggccatgggagtcagcgacaagcgggatattagccggttcctggagagcaaccccgtgatgatcgatgccaaggaagtgagcgccgcccaccgggccagatacttctggggcaatctgcctggcatgaacagacccctggccagcaccgtgaacgacaagctggagctgcaggagtgcctggagcacggccggatcgccaagttcagcaaggtgagaaccatcaccacccgaagcaacagcatcaaacaaggcaaggaccagcactttcctgtgttcatgaacgagaaggaggacatcctgtggtgtaccgagatggagagagtgttcgggttcccagtccactacacagatgtcagcaacatgtctagactggccagacagagactgctgggaagaagctggtccgtccctgtgatcagacacctgttcgcccctctgaaggagtacttcgcctgcgtgagcagcggcaacagcaacgccaacagccggggccccagcttctctagcggcctggtgccactgtccctgagagggagccacatgggccccatggagatctacaaaaccgtgagcgcctggaagcggcagcctgtgcgcgtgctgagcctgtttcggaatatcgataaagtcctgaaaagcctgggattcctggagagcggctctggctccggcggtggcaccctgaagtacgtggaggatgtgacaaacgtggtcagacgggatgtggagaagtggggccccttcgatctggtgtacggcagcacccaacccctgggcagctcttgtgaccggtgccctggctggtacatgtttcagttccaccggatcctgcagtacgccctgccgagacaggagtcccagcggccattcttttggattttcatggacaacttgctgctgaccgaggatgaccaggaaactaccactcggttcctgcagaccgaagccgtgaccctgcaggacgtgagaggccgggactaccagaacgccatgcgggtgtggtccaacatccctggactgaaaagcaagcacgcacctctgacccctaaagaagaggagtacctgcaggcccaggtgcggagcagaagcaagctggacgcccctaaggtggatctgctggtgaagaattgcctcctgcccctgagagagtacttcaagtatttcagccagaatagtctgcccctgggaggcagcggcggcggcgccctggtgacatttgaggacgtcgccgtgcggttcacccaggaggaatgggctctgctggatccttctcagaaaatcctgtaccgggacgtgatgagagagacataccggaatctgacctccgtgggcatcaactgggaatgttgggaccttgaagcctgcttcagaagcctgggaagaaacctgagagtgcaggtggtgaagagaaagtgcgagctgaccaacagcggcccctgcgccgagggcggcccaagcagcggcgcccctcctcccagcggcggcagcccagccggctccccaacctctaccgaggagggcacctctgagtccgccacccccgagagcggccctggcacctccaccgagcccagcgagggcagcgcacccggcagccctgccggcagccccacctccacagaggagggaaccagcaccgagcccagcgaaggcagcgccccaggcaccagcaccgagcctagtgagcaggagattaaacggatcaacaagatcagaagaagacttgtgaaagacagcaacaccaagaaggccggcaagacaggccccatgaaaaccctgctggttagagtgatgacacccgatctgagagagcggctggaaaacctgagaaagaagcctgaaaatatcccccagcccatcagcaatacatctagagccaacctgaataagctgctgaccgattacaccgaaatgaagaaggcgatcctgcatgtgtactgggaagagttccagaaggaccctgtgggcctgatgagccgggtggcccagcctgccagcaagaagatcgatcagaacaagctgaaacctgagatggacgagaagggcaacctgaccaccgccggctttgcctgctctcagtgtggccagcccctgttcgtgtacaagctggagcaggtgtctgagaagggcaaggcttacaccaactacttcggacggtgcaatgtggccgagcacgaaaagctgatcctgctggcccagctgaagcccgagaaggatagcgacgaagccgtgacatatagcctgggaaagtttgggcagagggccctggatttctacagcattcatgtgaccaaggagtccacccaccccgtgaagcccctggcccagatcgccggaaacagatacgcctccggacctgtgggaaaggccctgagcgacgcatgtatgggcacaatcgcctccttcctgtctaagtaccaggacatcatcatcgaacaccagaaggtggtgaagggcaaccagaagagactggagagcctgcgggagctggccggcaaggaaaacctggaataccctagcgtgaccctgccacctcagcctcacaccaaggagggcgttgatgcctacaacgaagtgatcgcccgggtgcgaatgtgggtgaacctgaacctgtggcagaagctgaagctaagcagagatgatgccaagcctctgctgagactgaagggattcccttcctttcctctggtcgagagacaggccaacgaagtggactggtgggacatggtgtgtaacgtgaagaagctgatcaacgagaaaaaggaggatggcaaggtgttttggcagaatctggctggctacaagagacaggaagccctgagaccatacctgagcagcgaggaagatcggaagaagggaaagaaattcgctcggtaccagctgggcgacctgctgctgcacctggaaaagaagcacggcgaggactggggaaaggtgtacgacgaggcctgggagcggattgacaagaaagtggaaggcctgagcaagcacatcaagctggaagaggaacggagaagcgaggacgcccagagcaaggccgccctgaccgactggctgcgggctaaggccagcttcgtgatcgagggcctgaaggaggccgacaaggacgagttctgcagatgcgagctgaagctgcagaagtggtacggggacctgcggggaaagcccttcgccatcgaagccgagaacagcatcctggacatcagcggcttcagcaagcagtacaactgtgccttcatctggcagaaggacggcgtgaagaagctgaacctgtacctgatcatcaactacttcaagggcggcaagctgcggttcaagaagatcaaacctgaagccttcgaagccaacagattctacaccgtgatcaacaaaaagagcggcgagatcgtgcccatggaggtgaacttcaacttcgacgaccccaacctgatcatcctgcctctggcctttggcaagagacagggcagagaattcatctggaacgacctgctgtccctggaaaccggcagcctgaagctggccaacggaagagtgatcgagaagacactgtacaacagaagaacccggcaggatgagcctgccctgttcgtggccctgaccttcgagcggcgggaggtcctggactcctccaatatcaaaccaatgaacctgatcggcgtggcaagaggcgaaaacatccccgccgtgatcgccctgaccgaccccgagggctgcccactgagccggtttaaggatagcctgggaaacccaacccacatcctgagaatcggcgagagctataaggagaagcagcggaccatccaggccaagaaggaggtggagcagcggagagccggcggctacagccggaagtacgccagcaaagccaagaatctggcagacgatatggtgagaaacaccgctagagatctgctgtactacgccgtgacccaggatgccatgctgatcttcgccaacctgagccggggcttcggccggcagggcaagcggaccttcatggccgagagacagtacacacggatggaggactggctgaccgccaagctggcctacgagggcctgagcaagacctacctgtccaagacactggcccagtacacctccaagacatgcagcaactgtgggtttaccatcaccagcgccgactacgacagggtgctggagaagctgaagaagacagcaacaggctggatgaccacaattaacggcaaggagctgaaggtggagggccagattacctactacaacagatacaagagacagaacgtagtcaaggacctgtccgtcgagctggatagactgagcgaagaatctgtgaacaacgacatctcctcctggacaaagggcagaagcggagaagctctgagcctcctgaagaaaagattctcccatagacccgtgcaggagaagttcgtgtgcctgaactgcggcttcgagacacacgcagccgagcaagccgccctgaacatcgccagatcctggctgttcctgcggagccaggagtacaagaaataccagacaaacaagacaaccggcaacaccgataagagagccttcgtcgagacctggcagtccttttaccggaagaagcttaaggaggtgtggaaacctgccgtgcggtctggcggatctggcggaggctcccacagcgagggcaggctgaccttccaggacgtggccatcgacttcacccaggaggagtgggagtgcctggaccccggccagaggaagctgtacagggacgtgatggtggagaactacaggaacctggccagcctgggcctggtgagcaaggtggacctggtgaccttcctggagctgctgaaggaccccaggaacatcaggaggatgaagaccaccgccatctaccccgccgtgagcccccagggcggcccaagcagcggcgcccctcctcccagcggcggcagcccagccggctccccaacctctaccgaggagggcacctctgagtccgccacccccgagagcggccctggcacctccaccgagcccagcgagggcagcgcacccggcagccctgccggcagccccacctccacagaggagggaaccagcaccgagcccagcgaaggcagcgccccaggcaccagcaccgagcctagtgagcaggagattaaacggatcaacaagatcagaagaagacttgtgaaagacagcaacaccaagaaggccggcaagacaggccccatgaaaaccctgctggttagagtgatgacacccgatctgagagagcggctggaaaacctgagaaagaagcctgaaaatatcccccagcccatcagcaatacatctagagccaacctgaataagctgctgaccgattacaccgaaatgaagaaggcgatcctgcatgtgtactgggaagagttccagaaggaccctgtgggcctgatgagccgggtggcccagcctgccagcaagaagatcgatcagaacaagctgaaacctgagatggacgagaagggcaacctgaccaccgccggctttgcctgctctcagtgtggccagcccctgttcgtgtacaagctggagcaggtgtctgagaagggcaaggcttacaccaactacttcggacggtgcaatgtggccgagcacgaaaagctgatcctgctggcccagctgaagcccgagaaggatagcgacgaagccgtgacatatagcctgggaaagtttgggcagagggccctggatttctacagcattcatgtgaccaaggagtccacccaccccgtgaagcccctggcccagatcgccggaaacagatacgcctccggacctgtgggaaaggccctgagcgacgcatgtatgggcacaatcgcctccttcctgtctaagtaccaggacatcatcatcgaacaccagaaggtggtgaagggcaaccagaagagactggagagcctgcgggagctggccggcaaggaaaacctggaataccctagcgtgaccctgccacctcagcctcacaccaaggagggcgttgatgcctacaacgaagtgatcgcccgggtgcgaatgtgggtgaacctgaacctgtggcagaagctgaagctaagcagagatgatgccaagcctctgctgagactgaagggattcccttcctttcctctggtcgagagacaggccaacgaagtggactggtgggacatggtgtgtaacgtgaagaagctgatcaacgagaaaaaggaggatggcaaggtgttttggcagaatctggctggctacaagagacaggaagccctgagaccatacctgagcagcgaggaagatcggaagaagggaaagaaattcgctcggtaccagctgggcgacctgctgctgcacctggaaaagaagcacggcgaggactggggaaaggtgtacgacgaggcctgggagcggattgacaagaaagtggaaggcctgagcaagcacatcaagctggaagaggaacggagaagcgaggacgcccagagcaaggccgccctgaccgactggctgcgggctaaggccagcttcgtgatcgagggcctgaaggaggccgacaaggacgagttctgcagatgcgagctgaagctgcagaagtggtacggggacctgcggggaaagcccttcgccatcgaagccgagaacagcatcctggacatcagcggcttcagcaagcagtacaactgtgccttcatctggcagaaggacggcgtgaagaagctgaacctgtacctgatcatcaactacttcaagggcggcaagctgcggttcaagaagatcaaacctgaagccttcgaagccaacagattctacaccgtgatcaacaaaaagagcggcgagatcgtgcccatggaggtgaacttcaacttcgacgaccccaacctgatcatcctgcctctggcctttggcaagagacagggcagagaattcatctggaacgacctgctgtccctggaaaccggcagcctgaagctggccaacggaagagtgatcgagaagacactgtacaacagaagaacccggcaggatgagcctgccctgttcgtggccctgaccttcgagcggcgggaggtcctggactcctccaatatcaaaccaatgaacctgatcggcgtggcaagaggcgaaaacatccccgccgtgatcgccctgaccgaccccgagggctgcccactgagccggtttaaggatagcctgggaaacccaacccacatcctgagaatcggcgagagctataaggagaagcagcggaccatccaggccaagaaggaggtggagcagcggagagccggcggctacagccggaagtacgccagcaaagccaagaatctggcagacgatatggtgagaaacaccgctagagatctgctgtactacgccgtgacccaggatgccatgctgatcttcgccaacctgagccggggcttcggccggcagggcaagcggaccttcatggccgagagacagtacacacggatggaggactggctgaccgccaagctggcctacgagggcctgagcaagacctacctgtccaagacactggcccagtacacctccaagacatgcagcaactgtgggtttaccatcaccagcgccgactacgacagggtgctggagaagctgaagaagacagcaacaggctggatgaccacaattaacggcaaggagctgaaggtggagggccagattacctactacaacagatacaagagacagaacgtagtcaaggacctgtccgtcgagctggatagactgagcgaagaatctgtgaacaacgacatctcctcctggacaaagggcagaagcggagaagctctgagcctcctgaagaaaagattctcccatagacccgtgcaggagaagttcgtgtgcctgaactgcggcttcgagacacacgcagccgagcaagccgccctgaacatcgccagatcctggctgttcctgcggagccaggagtacaagaaataccagacaaacaagacaaccggcaacaccgataagagagccttcgtcgagacctggcagtccttttaccggaagaagcttaaggaggtgtggaaacctgccgtgcggtctggcggatctggcggaggctcctcacagcgagggcaggctgaccttccaggacgtggccatcgacttcacccaggaggagtgggagtgcctggaccccggccagaggaagctgtacagggacgtgatggtggagaactacaggaacctggccagcctgggcctggtgagcaaggtggacctggtgaccttcctggagctgctgaaggaccccaggaacatcaggaggatgaagaccaccgccatctaccccgccgtgagcccccagggatctggctccggcagcggccccaagaaaaagagaaaagtctaagctgccttctgcggggcttgccttctggccatgcccttcttctctcccttgcacctgtacctcttggtctttgaataaagcctgagtaggaaggctagcaaaaaaaaaaaaaaaaaaaaaaaaaaaaaaaaaaaaaaaaaaaaaaaaaaaaaaaaaaaaaaaaaaaaaaaaaaaaaaaa

SEQ ID NO: 16046 - RNA, 9485 nt, synthetic construct
  source 1..9485: mol_type = other RNA
aggaaataagagagaaaagaagagtaagaagaaatataagagccaccatggcccctaagaagaagcgtaaagtgagccggatggaacgcctcgtctacgaggtgcggcagaagtgcagaaacatcgaggacatctgcatctcctgcggatctctgaacgtgaccctggagcacccactgttcatcggcggcatgtgccagaactgtaaaaactgttttctggagtgtgcctatcaatacgacgatgacggctaccagagctactgcaccatctgttgcggcggaagagaggtgctgatgtgtggaaataacaactgctgccggtgcttctgcgtggaatgcgtggacctgctggtgggccccggcgccgcccaggccgctattaaggaagatccttggaactgctacatgtgcggccacaagggcacatacggcctgctgagacggagagaggactggcctagcagactgcagatgttcttcgccaataaccacgaccaggagttcgacccccctaaggtgtaccctcccgtccccgccgagaagagaaagcccatccgggtcctgagcctgttcgatggcatcgccaccggtctgctggtgctgaaggacctgggcatccaggtggataggtacattgcctccgaggtgtgcgaggactccatcaccgtgggaatggtgcgtcatcagggcaagatcatgtacgtgggcgacgtgcggagcgtgacacagaagcatatccaggagtggggccctttcgacctggtgatcggcggcagcccttgcaatgacctgagcatcgtgaacccagcccggaagggcctgtacgagggaaccggcagactgttcttcgagttttacagactgctgcacgacgcccggcctaaggaaggcgacgaccggcccttcttttggctgttcgagaatgtggtggccatgggagtcagcgacaagcgggatattagccggttcctggagagcaaccccgtgatgatcgatgccaaggaagtgagcgccgcccaccgggccagatacttctggggcaatctgcctggcatgaacagacccctggccagcaccgtgaacgacaagctggagctgcaggagtgcctggagcacggccggatcgccaagttcagcaaggtgagaaccatcaccacccgaagcaacagcatcaaacaaggcaaggaccagcactttcctgtgttcatgaacgagaaggaggacatcctgtggtgtaccgagatggagagagtgttcgggttcccagtccactacacagatgtcagcaacatgtctagactggccagacagagactgctgggaagaagctggtccgtccctgtgatcagacacctgttcgcccctctgaaggagtacttcgcctgcgtgagcagcggcaacagcaacgccaacagccggggccccagcttctctagcggcctggtgccactgtccctgagagggagccacatgggccccatggagatctacaaaaccgtgagcgcctggaagcggcagcctgtgcgcgtgctgagcctgtttcggaatatcgataaagtcctgaaaagcctgggattcctggagagcggctctggctccggcggtggcaccctgaagtacgtggaggatgtgacaaacgtggtcagacgggatgtggagaagtggggccccttcgatctggtgtacggcagcacccaacccctgggcagctcttgtgaccggtgccctggctggtacatgtttcagttccaccggatcctgcagtacgccctgccgagacaggagtcccagcggccattcttttggattttcatggacaacttgctgctgaccgaggatgaccaggaaactaccactcggttcctgcagaccgaagccgtgaccctgcaggacgtgagaggccgggactaccagaacgccatgcgggtgtggtccaacatccctggactgaaaagcaagcacgcacctctgacccctaaagaagaggagtacctgcaggcccaggtgcggagcagaagcaagctggacgcccctaaggtggatctgctggtgaagaattgcctcctgcccctgagagagtacttcaagtatttcagccagaatagtctgcccctgggaggcagcggcggcggcgccctggtgacatttgaggacgtcgccgtgcggttcacccaggaggaatgggctctgctggatccttctcagaaaatcctgtaccgggacgtgatgagagagacataccggaatctgacctccgtgggcatcaactgggaatgttgggaccttgaagcctgcttcagaagcctgggaagaaacctgagagtgcaggtggtgaagagaaagtgcgagctgaccaacagcggcccctgcgccgagggcggcccaagcagcggcgcccctcctcccagcggcggcagcccagccggctccccaacctctaccgaggagggcacctctgagtccgccacccccgagagcggccctggcacctccaccgagcccagcgagggcagcgcacccggcagccctgccggcagccccacctccacagaggagggaaccagcaccgagcccagcgaaggcagcgccccaggcaccagcaccgagcctagtgagcaggagattaaacggatcaacaagatcagaagaagacttgtgaaagacagcaacaccaagaaggccggcaagacaggccccatgaaaaccctgctggttagagtgatgacacccgatctgagagagcggctggaaaacctgagaaagaagcctgaaaatatcccccagcccatcagcaatacatctagagccaacctgaataagctgctgaccgattacaccgaaatgaagaaggcgatcctgcatgtgtactgggaagagttccagaaggaccctgtgggcctgatgagccgggtggcccagcctgccagcaagaagatcgatcagaacaagctgaaacctgagatggacgagaagggcaacctgaccaccgccggctttgcctgctctcagtgtggccagcccctgttcgtgtacaagctggagcaggtgtctgagaagggcaaggcttacaccaactacttcggacggtgcaatgtggccgagcacgaaaagctgatcctgctggcccagctgaagcccgagaaggatagcgacgaagccgtgacatatagcctgggaaagtttgggcagagggccctggatttctacagcattcatgtgaccaaggagtccacccaccccgtgaagcccctggcccagatcgccggaaacagatacgcctccggacctgtgggaaaggccctgagcgacgcatgtatgggcacaatcgcctccttcctgtctaagtaccaggacatcatcatcgaacaccagaaggtggtgaagggcaaccagaagagactggagagcctgcgggagctggccggcaaggaaaacctggaataccctagcgtgaccctgccacctcagcctcacaccaaggagggcgttgatgcctacaacgaagtgatcgcccgggtgcgaatgtgggtgaacctgaacctgtggcagaagctgaagctaagcagagatgatgccaagcctctgctgagactgaagggattcccttcctttcctctggtcgagagacaggccaacgaagtggactggtgggacatggtgtgtaacgtgaagaagctgatcaacgagaaaaaggaggatggcaaggtgttttggcagaatctggctggctacaagagacaggaagccctgagaccatacctgagcagcgaggaagatcggaagaagggaaagaaattcgctcggtaccagctgggcgacctgctgctgcacctggaaaagaagcacggcgaggactggggaaaggtgtacgacgaggcctgggagcggattgacaagaaagtggaaggcctgagcaagcacatcaagctggaagaggaacggagaagcgaggacgcccagagcaaggccgccctgaccgactggctgcgggctaaggccagcttcgtgatcgagggcctgaaggaggccgacaaggacgagttctgcagatgcgagctgaagctgcagaagtggtacggggacctgcggggaaagcccttcgccatcgaagccgagaacagcatcctggacatcagcggcttcagcaagcagtacaactgtgccttcatctggcagaaggacggcgtgaagaagctgaacctgtacctgatcatcaactacttcaagggcggcaagctgcggttcaagaagatcaaacctgaagccttcgaagccaacagattctacaccgtgatcaacaaaaagagcggcgagatcgtgcccatggaggtgaacttcaacttcgacgaccccaacctgatcatcctgcctctggcctttggcaagagacagggcagagaattcatctggaacgacctgctgtccctggaaaccggcagcctgaagctggccaacggaagagtgatcgagaagacactgtacaacagaagaacccggcaggatgagcctgccctgttcgtggccctgaccttcgagcggcgggaggtcctggactcctccaatatcaaaccaatgaacctgatcggcgtggcaagaggcgaaaacatccccgccgtgatcgccctgaccgaccccgagggctgcccactgagccggtttaaggatagcctgggaaacccaacccacatcctgagaatcggcgagagctataaggagaagcagcggaccatccaggccaagaaggaggtggagcagcggagagccggcggctacagccggaagtacgccagcaaagccaagaatctggcagacgatatggtgagaaacaccgctagagatctgctgtactacgccgtgacccaggatgccatgctgatcttcgccaacctgagccggggcttcggccggcagggcaagcggaccttcatggccgagagacagtacacacggatggaggactggctgaccgccaagctggcctacgagggcctgagcaagacctacctgtccaagacactggcccagtacacctccaagacatgcagcaactgtgggtttaccatcaccagcgccgactacgacagggtgctggagaagctgaagaagacagcaacaggctggatgaccacaattaacggcaaggagctgaaggtggagggccagattacctactacaacagatacaagagacagaacgtagtcaaggacctgtccgtcgagctggatagactgagcgaagaatctgtgaacaacgacatctcctcctggacaaagggcagaagcggagaagctctgagcctcctgaagaaaagattctcccatagacccgtgcaggagaagttcgtgtgcctgaactgcggcttcgagacacacgcagccgagcaagccgccctgaacatcgccagatcctggctgttcctgcggagccaggagtacaagaaataccagacaaacaagacaaccggcaacaccgataagagagccttcgtcgagacctggcagtccttttaccggaagaagcttaaggaggtgtggaaacctgccgtgcggtctggcggatctggcggaggctccatgaacatggagggcctggtgatgttccaggacctgagcatcgacttcagccaggaggagtgggagtgcctggacgccgcccagaaggacctgtacagggacgtgatgatggagaactacagcagcctggtgagcctgggcctgagcatccccaagcccgacgtgatcagcctgctggagcagggcaaggagccctggatggtgagcagggacgtgctgggcggctggtgcaggggcctggagggcggcccaagcagcggcgcccctcctcccagcggcggcagcccagccggctccccaacctctaccgaggagggcacctctgagtccgccacccccgagagcggccctggcacctccaccgagcccagcgagggcagcgcacccggcagccctgccggcagccccacctccacagaggagggaaccagcaccgagcccagcgaaggcagcgccccaggcaccagcaccgagcctagtgagcaggagattaaacggatcaacaagatcagaagaagacttgtgaaagacagcaacaccaagaaggccggcaagacaggccccatgaaaaccctgctggttagagtgatgacacccgatctgagagagcggctggaaaacctgagaaagaagcctgaaaatatcccccagcccatcagcaatacatctagagccaacctgaataagctgctgaccgattacaccgaaatgaagaaggcgatcctgcatgtgtactgggaagagttccagaaggaccctgtgggcctgatgagccgggtggcccagcctgccagcaagaagatcgatcagaacaagctgaaacctgagatggacgagaagggcaacctgaccaccgccggctttgcctgctctcagtgtggccagcccctgttcgtgtacaagctggagcaggtgtctgagaagggcaaggcttacaccaactacttcggacggtgcaatgtggccgagcacgaaaagctgatcctgctggcccagctgaagcccgagaaggatagcgacgaagccgtgacatatagcctgggaaagtttgggcagagggccctggatttctacagcattcatgtgaccaaggagtccacccaccccgtgaagcccctggcccagatcgccggaaacagatacgcctccggacctgtgggaaaggccctgagcgacgcatgtatgggcacaatcgcctccttcctgtctaagtaccaggacatcatcatcgaacaccagaaggtggtgaagggcaaccagaagagactggagagcctgcgggagctggccggcaaggaaaacctggaataccctagcgtgaccctgccacctcagcctcacaccaaggagggcgttgatgcctacaacgaagtgatcgcccgggtgcgaatgtgggtgaacctgaacctgtggcagaagctgaagctaagcagagatgatgccaagcctctgctgagactgaagggattcccttcctttcctctggtcgagagacaggccaacgaagtggactggtgggacatggtgtgtaacgtgaagaagctgatcaacgagaaaaaggaggatggcaaggtgttttggcagaatctggctggctacaagagacaggaagccctgagaccatacctgagcagcgaggaagatcggaagaagggaaagaaattcgctcggtaccagctgggcgacctgctgctgcacctggaaaagaagcacggcgaggactggggaaaggtgtacgacgaggcctgggagcggattgacaagaaagtggaaggcctgagcaagcacatcaagctggaagaggaacggagaagcgaggacgcccagagcaaggccgccctgaccgactggctgcgggctaaggccagcttcgtgatcgagggcctgaaggaggccgacaaggacgagttctgcagatgcgagctgaagctgcagaagtggtacggggacctgcggggaaagcccttcgccatcgaagccgagaacagcatcctggacatcagcggcttcagcaagcagtacaactgtgccttcatctggcagaaggacggcgtgaagaagctgaacctgtacctgatcatcaactacttcaagggcggcaagctgcggttcaagaagatcaaacctgaagccttcgaagccaacagattctacaccgtgatcaacaaaaagagcggcgagatcgtgcccatggaggtgaacttcaacttcgacgaccccaacctgatcatcctgcctctggcctttggcaagagacagggcagagaattcatctggaacgacctgctgtccctggaaaccggcagcctgaagctggccaacggaagagtgatcgagaagacactgtacaacagaagaacccggcaggatgagcctgccctgttcgtggccctgaccttcgagcggcgggaggtcctggactcctccaatatcaaaccaatgaacctgatcggcgtggcaagaggcgaaaacatccccgccgtgatcgccctgaccgaccccgagggctgcccactgagccggtttaaggatagcctgggaaacccaacccacatcctgagaatcggcgagagctataaggagaagcagcggaccatccaggccaagaaggaggtggagcagcggagagccggcggctacagccggaagtacgccagcaaagccaagaatctggcagacgatatggtgagaaacaccgctagagatctgctgtactacgccgtgacccaggatgccatgctgatcttcgccaacctgagccggggcttcggccggcagggcaagcggaccttcatggccgagagacagtacacacggatggaggactggctgaccgccaagctggcctacgagggcctgagcaagacctacctgtccaagacactggcccagtacacctccaagacatgcagcaactgtgggtttaccatcaccagcgccgactacgacagggtgctggagaagctgaagaagacagcaacaggctggatgaccacaattaacggcaaggagctgaaggtggagggccagattacctactacaacagatacaagagacagaacgtagtcaaggacctgtccgtcgagctggatagactgagcgaagaatctgtgaacaacgacatctcctcctggacaaagggcagaagcggagaagctctgagcctcctgaagaaaagattctcccatagacccgtgcaggagaagttcgtgtgcctgaactgcggcttcgagacacacgcagccgagcaagccgccctgaacatcgccagatcctggctgttcctgcggagccaggagtacaagaaataccagacaaacaagacaaccggcaacaccgataagagagccttcgtcgagacctggcagtccttttaccggaagaagcttaaggaggtgtggaaacctgccgtgcggtctggcggatctggcggaggctcctatgaacatggagggcctggtgatgttccaggacctgagcatcgacttcagccaggaggagtgggagtgcctggacgccgcccagaaggacctgtacagggacgtgatgatggagaactacagcagcctggtgagcctgggcctgagcatccccaagcccgacgtgatcagcctgctggagcagggcaaggagccctggatggtgagcagggacgtgctgggcggctggtgcaggggcctggagggatctggctccggcagcggccccaagaaaaagagaaaagtctaagctgccttctgcggggcttgccttctggccatgcccttcttctctcccttgcacctgtacctcttggtctttgaataaagcctgagtaggaaggctagcaaaaaaaaaaaaaaaaaaaaaaaaaaaaaaaaaaaaaaaaaaaaaaaaaaaaaaaaaaaaaaaaaaaaaaaaaaaaaaaa

SEQ ID NO: 16047 - RNA, 9485 nt, synthetic construct
  source 1..9485: mol_type = other RNA
aggaaataagagagaaaagaagagtaagaagaaatataagagccaccatggcccctaagaagaagcgtaaagtgagccggatggaacgcctcgtctacgaggtgcggcagaagtgcagaaacatcgaggacatctgcatctcctgcggatctctgaacgtgaccctggagcacccactgttcatcggcggcatgtgccagaactgtaaaaactgttttctggagtgtgcctatcaatacgacgatgacggctaccagagctactgcaccatctgttgcggcggaagagaggtgctgatgtgtggaaataacaactgctgccggtgcttctgcgtggaatgcgtggacctgctggtgggccccggcgccgcccaggccgctattaaggaagatccttggaactgctacatgtgcggccacaagggcacatacggcctgctgagacggagagaggactggcctagcagactgcagatgttcttcgccaataaccacgaccaggagttcgacccccctaaggtgtaccctcccgtccccgccgagaagagaaagcccatccgggtcctgagcctgttcgatggcatcgccaccggtctgctggtgctgaaggacctgggcatccaggtggataggtacattgcctccgaggtgtgcgaggactccatcaccgtgggaatggtgcgtcatcagggcaagatcatgtacgtgggcgacgtgcggagcgtgacacagaagcatatccaggagtggggccctttcgacctggtgatcggcggcagcccttgcaatgacctgagcatcgtgaacccagcccggaagggcctgtacgagggaaccggcagactgttcttcgagttttacagactgctgcacgacgcccggcctaaggaaggcgacgaccggcccttcttttggctgttcgagaatgtggtggccatgggagtcagcgacaagcgggatattagccggttcctggagagcaaccccgtgatgatcgatgccaaggaagtgagcgccgcccaccgggccagatacttctggggcaatctgcctggcatgaacagacccctggccagcaccgtgaacgacaagctggagctgcaggagtgcctggagcacggccggatcgccaagttcagcaaggtgagaaccatcaccacccgaagcaacagcatcaaacaaggcaaggaccagcactttcctgtgttcatgaacgagaaggaggacatcctgtggtgtaccgagatggagagagtgttcgggttcccagtccactacacagatgtcagcaacatgtctagactggccagacagagactgctgggaagaagctggtccgtccctgtgatcagacacctgttcgcccctctgaaggagtacttcgcctgcgtgagcagcggcaacagcaacgccaacagccggggccccagcttctctagcggcctggtgccactgtccctgagagggagccacatgggccccatggagatctacaaaaccgtgagcgcctggaagcggcagcctgtgcgcgtgctgagcctgtttcggaatatcgataaagtcctgaaaagcctgggattcctggagagcggctctggctccggcggtggcaccctgaagtacgtggaggatgtgacaaacgtggtcagacgggatgtggagaagtggggccccttcgatctggtgtacggcagcacccaacccctgggcagctcttgtgaccggtgccctggctggtacatgtttcagttccaccggatcctgcagtacgccctgccgagacaggagtcccagcggccattcttttggattttcatggacaacttgctgctgaccgaggatgaccaggaaactaccactcggttcctgcagaccgaagccgtgaccctgcaggacgtgagaggccgggactaccagaacgccatgcgggtgtggtccaacatccctggactgaaaagcaagcacgcacctctgacccctaaagaagaggagtacctgcaggcccaggtgcggagcagaagcaagctggacgcccctaaggtggatctgctggtgaagaattgcctcctgcccctgagagagtacttcaagtatttcagccagaatagtctgcccctgggaggcagcggcggcggcgccctggtgacatttgaggacgtcgccgtgcggttcacccaggaggaatgggctctgctggatccttctcagaaaatcctgtaccgggacgtgatgagagagacataccggaatctgacctccgtgggcatcaactgggaatgttgggaccttgaagcctgcttcagaagcctgggaagaaacctgagagtgcaggtggtgaagagaaagtgcgagctgaccaacagcggcccctgcgccgagggcggcccaagcagcggcgcccctcctcccagcggcggcagcccagccggctccccaacctctaccgaggagggcacctctgagtccgccacccccgagagcggccctggcacctccaccgagcccagcgagggcagcgcacccggcagccctgccggcagccccacctccacagaggagggaaccagcaccgagcccagcgaaggcagcgccccaggcaccagcaccgagcctagtgagcaggagattaaacggatcaacaagatcagaagaagacttgtgaaagacagcaacaccaagaaggccggcaagacaggccccatgaaaaccctgctggttagagtgatgacacccgatctgagagagcggctggaaaacctgagaaagaagcctgaaaatatcccccagcccatcagcaatacatctagagccaacctgaataagctgctgaccgattacaccgaaatgaagaaggcgatcctgcatgtgtactgggaagagttccagaaggaccctgtgggcctgatgagccgggtggcccagcctgccagcaagaagatcgatcagaacaagctgaaacctgagatggacgagaagggcaacctgaccaccgccggctttgcctgctctcagtgtggccagcccctgttcgtgtacaagctggagcaggtgtctgagaagggcaaggcttacaccaactacttcggacggtgcaatgtggccgagcacgaaaagctgatcctgctggcccagctgaagcccgagaaggatagcgacgaagccgtgacatatagcctgggaaagtttgggcagagggccctggatttctacagcattcatgtgaccaaggagtccacccaccccgtgaagcccctggcccagatcgccggaaacagatacgcctccggacctgtgggaaaggccctgagcgacgcatgtatgggcacaatcgcctccttcctgtctaagtaccaggacatcatcatcgaacaccagaaggtggtgaagggcaaccagaagagactggagagcctgcgggagctggccggcaaggaaaacctggaataccctagcgtgaccctgccacctcagcctcacaccaaggagggcgttgatgcctacaacgaagtgatcgcccgggtgcgaatgtgggtgaacctgaacctgtggcagaagctgaagctaagcagagatgatgccaagcctctgctgagactgaagggattcccttcctttcctctggtcgagagacaggccaacgaagtggactggtgggacatggtgtgtaacgtgaagaagctgatcaacgagaaaaaggaggatggcaaggtgttttggcagaatctggctggctacaagagacaggaagccctgagaccatacctgagcagcgaggaagatcggaagaagggaaagaaattcgctcggtaccagctgggcgacctgctgctgcacctggaaaagaagcacggcgaggactggggaaaggtgtacgacgaggcctgggagcggattgacaagaaagtggaaggcctgagcaagcacatcaagctggaagaggaacggagaagcgaggacgcccagagcaaggccgccctgaccgactggctgcgggctaaggccagcttcgtgatcgagggcctgaaggaggccgacaaggacgagttctgcagatgcgagctgaagctgcagaagtggtacggggacctgcggggaaagcccttcgccatcgaagccgagaacagcatcctggacatcagcggcttcagcaagcagtacaactgtgccttcatctggcagaaggacggcgtgaagaagctgaacctgtacctgatcatcaactacttcaagggcggcaagctgcggttcaagaagatcaaacctgaagccttcgaagccaacagattctacaccgtgatcaacaaaaagagcggcgagatcgtgcccatggaggtgaacttcaacttcgacgaccccaacctgatcatcctgcctctggcctttggcaagagacagggcagagaattcatctggaacgacctgctgtccctggaaaccggcagcctgaagctggccaacggaagagtgatcgagaagacactgtacaacagaagaacccggcaggatgagcctgccctgttcgtggccctgaccttcgagcggcgggaggtcctggactcctccaatatcaaaccaatgaacctgatcggcgtggcaagaggcgaaaacatccccgccgtgatcgccctgaccgaccccgagggctgcccactgagccggtttaaggatagcctgggaaacccaacccacatcctgagaatcggcgagagctataaggagaagcagcggaccatccaggccaagaaggaggtggagcagcggagagccggcggctacagccggaagtacgccagcaaagccaagaatctggcagacgatatggtgagaaacaccgctagagatctgctgtactacgccgtgacccaggatgccatgctgatcttcgccaacctgagccggggcttcggccggcagggcaagcggaccttcatggccgagagacagtacacacggatggaggactggctgaccgccaagctggcctacgagggcctgagcaagacctacctgtccaagacactggcccagtacacctccaagacatgcagcaactgtgggtttaccatcaccagcgccgactacgacagggtgctggagaagctgaagaagacagcaacaggctggatgaccacaattaacggcaaggagctgaaggtggagggccagattacctactacaacagatacaagagacagaacgtagtcaaggacctgtccgtcgagctggatagactgagcgaagaatctgtgaacaacgacatctcctcctggacaaagggcagaagcggagaagctctgagcctcctgaagaaaagattctcccatagacccgtgcaggagaagttcgtgtgcctgaactgcggcttcgagacacacgcagccgagcaagccgccctgaacatcgccagatcctggctgttcctgcggagccaggagtacaagaaataccagacaaacaagacaaccggcaacaccgataagagagccttcgtcgagacctggcagtccttttaccggaagaagcttaaggaggtgtggaaacctgccgtgcggtctggcggatctggcggaggctccatcaagagccccctgaccttcggcgacgtggccgtggagttcagcggcgaggagtgggcctggctggacagcgcccagaggagcctgcacaggagcgtgatgctggagaactacaggaacctggccagcctgggcctgtgcctgagcaagcccgagatgatcagcagcctggagcagaggaaggagccctgggccgtgaagaggaagagcaccagcggcaagtgccccgacctgcagaccctgggcggcccaagcagcggcgcccctcctcccagcggcggcagcccagccggctccccaacctctaccgaggagggcacctctgagtccgccacccccgagagcggccctggcacctccaccgagcccagcgagggcagcgcacccggcagccctgccggcagccccacctccacagaggagggaaccagcaccgagcccagcgaaggcagcgccccaggcaccagcaccgagcctagtgagcaggagattaaacggatcaacaagatcagaagaagacttgtgaaagacagcaacaccaagaaggccggcaagacaggccccatgaaaaccctgctggttagagtgatgacacccgatctgagagagcggctggaaaacctgagaaagaagcctgaaaatatcccccagcccatcagcaatacatctagagccaacctgaataagctgctgaccgattacaccgaaatgaagaaggcgatcctgcatgtgtactgggaagagttccagaaggaccctgtgggcctgatgagccgggtggcccagcctgccagcaagaagatcgatcagaacaagctgaaacctgagatggacgagaagggcaacctgaccaccgccggctttgcctgctctcagtgtggccagcccctgttcgtgtacaagctggagcaggtgtctgagaagggcaaggcttacaccaactacttcggacggtgcaatgtggccgagcacgaaaagctgatcctgctggcccagctgaagcccgagaaggatagcgacgaagccgtgacatatagcctgggaaagtttgggcagagggccctggatttctacagcattcatgtgaccaaggagtccacccaccccgtgaagcccctggcccagatcgccggaaacagatacgcctccggacctgtgggaaaggccctgagcgacgcatgtatgggcacaatcgcctccttcctgtctaagtaccaggacatcatcatcgaacaccagaaggtggtgaagggcaaccagaagagactggagagcctgcgggagctggccggcaaggaaaacctggaataccctagcgtgaccctgccacctcagcctcacaccaaggagggcgttgatgcctacaacgaagtgatcgcccgggtgcgaatgtgggtgaacctgaacctgtggcagaagctgaagctaagcagagatgatgccaagcctctgctgagactgaagggattcccttcctttcctctggtcgagagacaggccaacgaagtggactggtgggacatggtgtgtaacgtgaagaagctgatcaacgagaaaaaggaggatggcaaggtgttttggcagaatctggctggctacaagagacaggaagccctgagaccatacctgagcagcgaggaagatcggaagaagggaaagaaattcgctcggtaccagctgggcgacctgctgctgcacctggaaaagaagcacggcgaggactggggaaaggtgtacgacgaggcctgggagcggattgacaagaaagtggaaggcctgagcaagcacatcaagctggaagaggaacggagaagcgaggacgcccagagcaaggccgccctgaccgactggctgcgggctaaggccagcttcgtgatcgagggcctgaaggaggccgacaaggacgagttctgcagatgcgagctgaagctgcagaagtggtacggggacctgcggggaaagcccttcgccatcgaagccgagaacagcatcctggacatcagcggcttcagcaagcagtacaactgtgccttcatctggcagaaggacggcgtgaagaagctgaacctgtacctgatcatcaactacttcaagggcggcaagctgcggttcaagaagatcaaacctgaagccttcgaagccaacagattctacaccgtgatcaacaaaaagagcggcgagatcgtgcccatggaggtgaacttcaacttcgacgaccccaacctgatcatcctgcctctggcctttggcaagagacagggcagagaattcatctggaacgacctgctgtccctggaaaccggcagcctgaagctggccaacggaagagtgatcgagaagacactgtacaacagaagaacccggcaggatgagcctgccctgttcgtggccctgaccttcgagcggcgggaggtcctggactcctccaatatcaaaccaatgaacctgatcggcgtggcaagaggcgaaaacatccccgccgtgatcgccctgaccgaccccgagggctgcccactgagccggtttaaggatagcctgggaaacccaacccacatcctgagaatcggcgagagctataaggagaagcagcggaccatccaggccaagaaggaggtggagcagcggagagccggcggctacagccggaagtacgccagcaaagccaagaatctggcagacgatatggtgagaaacaccgctagagatctgctgtactacgccgtgacccaggatgccatgctgatcttcgccaacctgagccggggcttcggccggcagggcaagcggaccttcatggccgagagacagtacacacggatggaggactggctgaccgccaagctggcctacgagggcctgagcaagacctacctgtccaagacactggcccagtacacctccaagacatgcagcaactgtgggtttaccatcaccagcgccgactacgacagggtgctggagaagctgaagaagacagcaacaggctggatgaccacaattaacggcaaggagctgaaggtggagggccagattacctactacaacagatacaagagacagaacgtagtcaaggacctgtccgtcgagctggatagactgagcgaagaatctgtgaacaacgacatctcctcctggacaaagggcagaagcggagaagctctgagcctcctgaagaaaagattctcccatagacccgtgcaggagaagttcgtgtgcctgaactgcggcttcgagacacacgcagccgagcaagccgccctgaacatcgccagatcctggctgttcctgcggagccaggagtacaagaaataccagacaaacaagacaaccggcaacaccgataagagagccttcgtcgagacctggcagtccttttaccggaagaagcttaaggaggtgtggaaacctgccgtgcggtctggcggatctggcggaggctcctatcaagagccccctgaccttcggcgacgtggccgtggagttcagcggcgaggagtgggcctggctggacagcgcccagaggagcctgcacaggagcgtgatgctggagaactacaggaacctggccagcctgggcctgtgcctgagcaagcccgagatgatcagcagcctggagcagaggaaggagccctgggccgtgaagaggaagagcaccagcggcaagtgccccgacctgcagaccctgggatctggctccggcagcggccccaagaaaaagagaaaagtctaagctgccttctgcggggcttgccttctggccatgcccttcttctctcccttgcacctgtacctcttggtctttgaataaagcctgagtaggaaggctagcaaaaaaaaaaaaaaaaaaaaaaaaaaaaaaaaaaaaaaaaaaaaaaaaaaaaaaaaaaaaaaaaaaaaaaaaaaaaaaaa

SEQ ID NO: 16048 - RNA, 9485 nt, synthetic construct
  source 1..9485: mol_type = other RNA
aggaaataagagagaaaagaagagtaagaagaaatataagagccaccatggcccctaagaagaagcgtaaagtgagccggatggaacgcctcgtctacgaggtgcggcagaagtgcagaaacatcgaggacatctgcatctcctgcggatctctgaacgtgaccctggagcacccactgttcatcggcggcatgtgccagaactgtaaaaactgttttctggagtgtgcctatcaatacgacgatgacggctaccagagctactgcaccatctgttgcggcggaagagaggtgctgatgtgtggaaataacaactgctgccggtgcttctgcgtggaatgcgtggacctgctggtgggccccggcgccgcccaggccgctattaaggaagatccttggaactgctacatgtgcggccacaagggcacatacggcctgctgagacggagagaggactggcctagcagactgcagatgttcttcgccaataaccacgaccaggagttcgacccccctaaggtgtaccctcccgtccccgccgagaagagaaagcccatccgggtcctgagcctgttcgatggcatcgccaccggtctgctggtgctgaaggacctgggcatccaggtggataggtacattgcctccgaggtgtgcgaggactccatcaccgtgggaatggtgcgtcatcagggcaagatcatgtacgtgggcgacgtgcggagcgtgacacagaagcatatccaggagtggggccctttcgacctggtgatcggcggcagcccttgcaatgacctgagcatcgtgaacccagcccggaagggcctgtacgagggaaccggcagactgttcttcgagttttacagactgctgcacgacgcccggcctaaggaaggcgacgaccggcccttcttttggctgttcgagaatgtggtggccatgggagtcagcgacaagcgggatattagccggttcctggagagcaaccccgtgatgatcgatgccaaggaagtgagcgccgcccaccgggccagatacttctggggcaatctgcctggcatgaacagacccctggccagcaccgtgaacgacaagctggagctgcaggagtgcctggagcacggccggatcgccaagttcagcaaggtgagaaccatcaccacccgaagcaacagcatcaaacaaggcaaggaccagcactttcctgtgttcatgaacgagaaggaggacatcctgtggtgtaccgagatggagagagtgttcgggttcccagtccactacacagatgtcagcaacatgtctagactggccagacagagactgctgggaagaagctggtccgtccctgtgatcagacacctgttcgcccctctgaaggagtacttcgcctgcgtgagcagcggcaacagcaacgccaacagccggggccccagcttctctagcggcctggtgccactgtccctgagagggagccacatgggccccatggagatctacaaaaccgtgagcgcctggaagcggcagcctgtgcgcgtgctgagcctgtttcggaatatcgataaagtcctgaaaagcctgggattcctggagagcggctctggctccggcggtggcaccctgaagtacgtggaggatgtgacaaacgtggtcagacgggatgtggagaagtggggccccttcgatctggtgtacggcagcacccaacccctgggcagctcttgtgaccggtgccctggctggtacatgtttcagttccaccggatcctgcagtacgccctgccgagacaggagtcccagcggccattcttttggattttcatggacaacttgctgctgaccgaggatgaccaggaaactaccactcggttcctgcagaccgaagccgtgaccctgcaggacgtgagaggccgggactaccagaacgccatgcgggtgtggtccaacatccctggactgaaaagcaagcacgcacctctgacccctaaagaagaggagtacctgcaggcccaggtgcggagcagaagcaagctggacgcccctaaggtggatctgctggtgaagaattgcctcctgcccctgagagagtacttcaagtatttcagccagaatagtctgcccctgggaggcagcggcggcggcgccctggtgacatttgaggacgtcgccgtgcggttcacccaggaggaatgggctctgctggatccttctcagaaaatcctgtaccgggacgtgatgagagagacataccggaatctgacctccgtgggcatcaactgggaatgttgggaccttgaagcctgcttcagaagcctgggaagaaacctgagagtgcaggtggtgaagagaaagtgcgagctgaccaacagcggcccctgcgccgagggcggcccaagcagcggcgcccctcctcccagcggcggcagcccagccggctccccaacctctaccgaggagggcacctctgagtccgccacccccgagagcggccctggcacctccaccgagcccagcgagggcagcgcacccggcagccctgccggcagccccacctccacagaggagggaaccagcaccgagcccagcgaaggcagcgccccaggcaccagcaccgagcctagtgagcaggagattaaacggatcaacaagatcagaagaagacttgtgaaagacagcaacaccaagaaggccggcaagacaggccccatgaaaaccctgctggttagagtgatgacacccgatctgagagagcggctggaaaacctgagaaagaagcctgaaaatatcccccagcccatcagcaatacatctagagccaacctgaataagctgctgaccgattacaccgaaatgaagaaggcgatcctgcatgtgtactgggaagagttccagaaggaccctgtgggcctgatgagccgggtggcccagcctgccagcaagaagatcgatcagaacaagctgaaacctgagatggacgagaagggcaacctgaccaccgccggctttgcctgctctcagtgtggccagcccctgttcgtgtacaagctggagcaggtgtctgagaagggcaaggcttacaccaactacttcggacggtgcaatgtggccgagcacgaaaagctgatcctgctggcccagctgaagcccgagaaggatagcgacgaagccgtgacatatagcctgggaaagtttgggcagagggccctggatttctacagcattcatgtgaccaaggagtccacccaccccgtgaagcccctggcccagatcgccggaaacagatacgcctccggacctgtgggaaaggccctgagcgacgcatgtatgggcacaatcgcctccttcctgtctaagtaccaggacatcatcatcgaacaccagaaggtggtgaagggcaaccagaagagactggagagcctgcgggagctggccggcaaggaaaacctggaataccctagcgtgaccctgccacctcagcctcacaccaaggagggcgttgatgcctacaacgaagtgatcgcccgggtgcgaatgtgggtgaacctgaacctgtggcagaagctgaagctaagcagagatgatgccaagcctctgctgagactgaagggattcccttcctttcctctggtcgagagacaggccaacgaagtggactggtgggacatggtgtgtaacgtgaagaagctgatcaacgagaaaaaggaggatggcaaggtgttttggcagaatctggctggctacaagagacaggaagccctgagaccatacctgagcagcgaggaagatcggaagaagggaaagaaattcgctcggtaccagctgggcgacctgctgctgcacctggaaaagaagcacggcgaggactggggaaaggtgtacgacgaggcctgggagcggattgacaagaaagtggaaggcctgagcaagcacatcaagctggaagaggaacggagaagcgaggacgcccagagcaaggccgccctgaccgactggctgcgggctaaggccagcttcgtgatcgagggcctgaaggaggccgacaaggacgagttctgcagatgcgagctgaagctgcagaagtggtacggggacctgcggggaaagcccttcgccatcgaagccgagaacagcatcctggacatcagcggcttcagcaagcagtacaactgtgccttcatctggcagaaggacggcgtgaagaagctgaacctgtacctgatcatcaactacttcaagggcggcaagctgcggttcaagaagatcaaacctgaagccttcgaagccaacagattctacaccgtgatcaacaaaaagagcggcgagatcgtgcccatggaggtgaacttcaacttcgacgaccccaacctgatcatcctgcctctggcctttggcaagagacagggcagagaattcatctggaacgacctgctgtccctggaaaccggcagcctgaagctggccaacggaagagtgatcgagaagacactgtacaacagaagaacccggcaggatgagcctgccctgttcgtggccctgaccttcgagcggcgggaggtcctggactcctccaatatcaaaccaatgaacctgatcggcgtggcaagaggcgaaaacatccccgccgtgatcgccctgaccgaccccgagggctgcccactgagccggtttaaggatagcctgggaaacccaacccacatcctgagaatcggcgagagctataaggagaagcagcggaccatccaggccaagaaggaggtggagcagcggagagccggcggctacagccggaagtacgccagcaaagccaagaatctggcagacgatatggtgagaaacaccgctagagatctgctgtactacgccgtgacccaggatgccatgctgatcttcgccaacctgagccggggcttcggccggcagggcaagcggaccttcatggccgagagacagtacacacggatggaggactggctgaccgccaagctggcctacgagggcctgagcaagacctacctgtccaagacactggcccagtacacctccaagacatgcagcaactgtgggtttaccatcaccagcgccgactacgacagggtgctggagaagctgaagaagacagcaacaggctggatgaccacaattaacggcaaggagctgaaggtggagggccagattacctactacaacagatacaagagacagaacgtagtcaaggacctgtccgtcgagctggatagactgagcgaagaatctgtgaacaacgacatctcctcctggacaaagggcagaagcggagaagctctgagcctcctgaagaaaagattctcccatagacccgtgcaggagaagttcgtgtgcctgaactgcggcttcgagacacacgcagccgagcaagccgccctgaacatcgccagatcctggctgttcctgcggagccaggagtacaagaaataccagacaaacaagacaaccggcaacaccgataagagagccttcgtcgagacctggcagtccttttaccggaagaagcttaaggaggtgtggaaacctgccgtgcggtctggcggatctggcggaggctccctgcccctgaccttcgaggacgtggccgtgtacttcagcgagcaggagtggcagaacctggaggcctggcagaaggagctgtacaagcaggtgatgagggccaactacgagatcctgctgagcctggacaacggcctgcccaagcccgagctgatcagctggatcgagcagggcaaggagctgttcaagaagtggggcgagagccagcagagcaggagcatcatctgcagcagcgccgacctgggcggcccaagcagcggcgcccctcctcccagcggcggcagcccagccggctccccaacctctaccgaggagggcacctctgagtccgccacccccgagagcggccctggcacctccaccgagcccagcgagggcagcgcacccggcagccctgccggcagccccacctccacagaggagggaaccagcaccgagcccagcgaaggcagcgccccaggcaccagcaccgagcctagtgagcaggagattaaacggatcaacaagatcagaagaagacttgtgaaagacagcaacaccaagaaggccggcaagacaggccccatgaaaaccctgctggttagagtgatgacacccgatctgagagagcggctggaaaacctgagaaagaagcctgaaaatatcccccagcccatcagcaatacatctagagccaacctgaataagctgctgaccgattacaccgaaatgaagaaggcgatcctgcatgtgtactgggaagagttccagaaggaccctgtgggcctgatgagccgggtggcccagcctgccagcaagaagatcgatcagaacaagctgaaacctgagatggacgagaagggcaacctgaccaccgccggctttgcctgctctcagtgtggccagcccctgttcgtgtacaagctggagcaggtgtctgagaagggcaaggcttacaccaactacttcggacggtgcaatgtggccgagcacgaaaagctgatcctgctggcccagctgaagcccgagaaggatagcgacgaagccgtgacatatagcctgggaaagtttgggcagagggccctggatttctacagcattcatgtgaccaaggagtccacccaccccgtgaagcccctggcccagatcgccggaaacagatacgcctccggacctgtgggaaaggccctgagcgacgcatgtatgggcacaatcgcctccttcctgtctaagtaccaggacatcatcatcgaacaccagaaggtggtgaagggcaaccagaagagactggagagcctgcgggagctggccggcaaggaaaacctggaataccctagcgtgaccctgccacctcagcctcacaccaaggagggcgttgatgcctacaacgaagtgatcgcccgggtgcgaatgtgggtgaacctgaacctgtggcagaagctgaagctaagcagagatgatgccaagcctctgctgagactgaagggattcccttcctttcctctggtcgagagacaggccaacgaagtggactggtgggacatggtgtgtaacgtgaagaagctgatcaacgagaaaaaggaggatggcaaggtgttttggcagaatctggctggctacaagagacaggaagccctgagaccatacctgagcagcgaggaagatcggaagaagggaaagaaattcgctcggtaccagctgggcgacctgctgctgcacctggaaaagaagcacggcgaggactggggaaaggtgtacgacgaggcctgggagcggattgacaagaaagtggaaggcctgagcaagcacatcaagctggaagaggaacggagaagcgaggacgcccagagcaaggccgccctgaccgactggctgcgggctaaggccagcttcgtgatcgagggcctgaaggaggccgacaaggacgagttctgcagatgcgagctgaagctgcagaagtggtacggggacctgcggggaaagcccttcgccatcgaagccgagaacagcatcctggacatcagcggcttcagcaagcagtacaactgtgccttcatctggcagaaggacggcgtgaagaagctgaacctgtacctgatcatcaactacttcaagggcggcaagctgcggttcaagaagatcaaacctgaagccttcgaagccaacagattctacaccgtgatcaacaaaaagagcggcgagatcgtgcccatggaggtgaacttcaacttcgacgaccccaacctgatcatcctgcctctggcctttggcaagagacagggcagagaattcatctggaacgacctgctgtccctggaaaccggcagcctgaagctggccaacggaagagtgatcgagaagacactgtacaacagaagaacccggcaggatgagcctgccctgttcgtggccctgaccttcgagcggcgggaggtcctggactcctccaatatcaaaccaatgaacctgatcggcgtggcaagaggcgaaaacatccccgccgtgatcgccctgaccgaccccgagggctgcccactgagccggtttaaggatagcctgggaaacccaacccacatcctgagaatcggcgagagctataaggagaagcagcggaccatccaggccaagaaggaggtggagcagcggagagccggcggctacagccggaagtacgccagcaaagccaagaatctggcagacgatatggtgagaaacaccgctagagatctgctgtactacgccgtgacccaggatgccatgctgatcttcgccaacctgagccggggcttcggccggcagggcaagcggaccttcatggccgagagacagtacacacggatggaggactggctgaccgccaagctggcctacgagggcctgagcaagacctacctgtccaagacactggcccagtacacctccaagacatgcagcaactgtgggtttaccatcaccagcgccgactacgacagggtgctggagaagctgaagaagacagcaacaggctggatgaccacaattaacggcaaggagctgaaggtggagggccagattacctactacaacagatacaagagacagaacgtagtcaaggacctgtccgtcgagctggatagactgagcgaagaatctgtgaacaacgacatctcctcctggacaaagggcagaagcggagaagctctgagcctcctgaagaaaagattctcccatagacccgtgcaggagaagttcgtgtgcctgaactgcggcttcgagacacacgcagccgagcaagccgccctgaacatcgccagatcctggctgttcctgcggagccaggagtacaagaaataccagacaaacaagacaaccggcaacaccgataagagagccttcgtcgagacctggcagtccttttaccggaagaagcttaaggaggtgtggaaacctgccgtgcggtctggcggatctggcggaggctcctctgcccctgaccttcgaggacgtggccgtgtacttcagcgagcaggagtggcagaacctggaggcctggcagaaggagctgtacaagcaggtgatgagggccaactacgagatcctgctgagcctggacaacggcctgcccaagcccgagctgatcagctggatcgagcagggcaaggagctgttcaagaagtggggcgagagccagcagagcaggagcatcatctgcagcagcgccgacctgggatctggctccggcagcggccccaagaaaaagagaaaagtctaagctgccttctgcggggcttgccttctggccatgcccttcttctctcccttgcacctgtacctcttggtctttgaataaagcctgagtaggaaggctagcaaaaaaaaaaaaaaaaaaaaaaaaaaaaaaaaaaaaaaaaaaaaaaaaaaaaaaaaaaaaaaaaaaaaaaaaaaaaaaaa

SEQ ID NO: 16049 - RNA, 9485 nt, synthetic construct
  source 1..9485: mol_type = other RNA
aggaaataagagagaaaagaagagtaagaagaaatataagagccaccatggcccctaagaagaagcgtaaagtgagccggatggaacgcctcgtctacgaggtgcggcagaagtgcagaaacatcgaggacatctgcatctcctgcggatctctgaacgtgaccctggagcacccactgttcatcggcggcatgtgccagaactgtaaaaactgttttctggagtgtgcctatcaatacgacgatgacggctaccagagctactgcaccatctgttgcggcggaagagaggtgctgatgtgtggaaataacaactgctgccggtgcttctgcgtggaatgcgtggacctgctggtgggccccggcgccgcccaggccgctattaaggaagatccttggaactgctacatgtgcggccacaagggcacatacggcctgctgagacggagagaggactggcctagcagactgcagatgttcttcgccaataaccacgaccaggagttcgacccccctaaggtgtaccctcccgtccccgccgagaagagaaagcccatccgggtcctgagcctgttcgatggcatcgccaccggtctgctggtgctgaaggacctgggcatccaggtggataggtacattgcctccgaggtgtgcgaggactccatcaccgtgggaatggtgcgtcatcagggcaagatcatgtacgtgggcgacgtgcggagcgtgacacagaagcatatccaggagtggggccctttcgacctggtgatcggcggcagcccttgcaatgacctgagcatcgtgaacccagcccggaagggcctgtacgagggaaccggcagactgttcttcgagttttacagactgctgcacgacgcccggcctaaggaaggcgacgaccggcccttcttttggctgttcgagaatgtggtggccatgggagtcagcgacaagcgggatattagccggttcctggagagcaaccccgtgatgatcgatgccaaggaagtgagcgccgcccaccgggccagatacttctggggcaatctgcctggcatgaacagacccctggccagcaccgtgaacgacaagctggagctgcaggagtgcctggagcacggccggatcgccaagttcagcaaggtgagaaccatcaccacccgaagcaacagcatcaaacaaggcaaggaccagcactttcctgtgttcatgaacgagaaggaggacatcctgtggtgtaccgagatggagagagtgttcgggttcccagtccactacacagatgtcagcaacatgtctagactggccagacagagactgctgggaagaagctggtccgtccctgtgatcagacacctgttcgcccctctgaaggagtacttcgcctgcgtgagcagcggcaacagcaacgccaacagccggggccccagcttctctagcggcctggtgccactgtccctgagagggagccacatgggccccatggagatctacaaaaccgtgagcgcctggaagcggcagcctgtgcgcgtgctgagcctgtttcggaatatcgataaagtcctgaaaagcctgggattcctggagagcggctctggctccggcggtggcaccctgaagtacgtggaggatgtgacaaacgtggtcagacgggatgtggagaagtggggccccttcgatctggtgtacggcagcacccaacccctgggcagctcttgtgaccggtgccctggctggtacatgtttcagttccaccggatcctgcagtacgccctgccgagacaggagtcccagcggccattcttttggattttcatggacaacttgctgctgaccgaggatgaccaggaaactaccactcggttcctgcagaccgaagccgtgaccctgcaggacgtgagaggccgggactaccagaacgccatgcgggtgtggtccaacatccctggactgaaaagcaagcacgcacctctgacccctaaagaagaggagtacctgcaggcccaggtgcggagcagaagcaagctggacgcccctaaggtggatctgctggtgaagaattgcctcctgcccctgagagagtacttcaagtatttcagccagaatagtctgcccctgggaggcagcggcggcggcgccctggtgacatttgaggacgtcgccgtgcggttcacccaggaggaatgggctctgctggatccttctcagaaaatcctgtaccgggacgtgatgagagagacataccggaatctgacctccgtgggcatcaactgggaatgttgggaccttgaagcctgcttcagaagcctgggaagaaacctgagagtgcaggtggtgaagagaaagtgcgagctgaccaacagcggcccctgcgccgagggcggcccaagcagcggcgcccctcctcccagcggcggcagcccagccggctccccaacctctaccgaggagggcacctctgagtccgccacccccgagagcggccctggcacctccaccgagcccagcgagggcagcgcacccggcagccctgccggcagccccacctccacagaggagggaaccagcaccgagcccagcgaaggcagcgccccaggcaccagcaccgagcctagtgagcaggagattaaacggatcaacaagatcagaagaagacttgtgaaagacagcaacaccaagaaggccggcaagacaggccccatgaaaaccctgctggttagagtgatgacacccgatctgagagagcggctggaaaacctgagaaagaagcctgaaaatatcccccagcccatcagcaatacatctagagccaacctgaataagctgctgaccgattacaccgaaatgaagaaggcgatcctgcatgtgtactgggaagagttccagaaggaccctgtgggcctgatgagccgggtggcccagcctgccagcaagaagatcgatcagaacaagctgaaacctgagatggacgagaagggcaacctgaccaccgccggctttgcctgctctcagtgtggccagcccctgttcgtgtacaagctggagcaggtgtctgagaagggcaaggcttacaccaactacttcggacggtgcaatgtggccgagcacgaaaagctgatcctgctggcccagctgaagcccgagaaggatagcgacgaagccgtgacatatagcctgggaaagtttgggcagagggccctggatttctacagcattcatgtgaccaaggagtccacccaccccgtgaagcccctggcccagatcgccggaaacagatacgcctccggacctgtgggaaaggccctgagcgacgcatgtatgggcacaatcgcctccttcctgtctaagtaccaggacatcatcatcgaacaccagaaggtggtgaagggcaaccagaagagactggagagcctgcgggagctggccggcaaggaaaacctggaataccctagcgtgaccctgccacctcagcctcacaccaaggagggcgttgatgcctacaacgaagtgatcgcccgggtgcgaatgtgggtgaacctgaacctgtggcagaagctgaagctaagcagagatgatgccaagcctctgctgagactgaagggattcccttcctttcctctggtcgagagacaggccaacgaagtggactggtgggacatggtgtgtaacgtgaagaagctgatcaacgagaaaaaggaggatggcaaggtgttttggcagaatctggctggctacaagagacaggaagccctgagaccatacctgagcagcgaggaagatcggaagaagggaaagaaattcgctcggtaccagctgggcgacctgctgctgcacctggaaaagaagcacggcgaggactggggaaaggtgtacgacgaggcctgggagcggattgacaagaaagtggaaggcctgagcaagcacatcaagctggaagaggaacggagaagcgaggacgcccagagcaaggccgccctgaccgactggctgcgggctaaggccagcttcgtgatcgagggcctgaaggaggccgacaaggacgagttctgcagatgcgagctgaagctgcagaagtggtacggggacctgcggggaaagcccttcgccatcgaagccgagaacagcatcctggacatcagcggcttcagcaagcagtacaactgtgccttcatctggcagaaggacggcgtgaagaagctgaacctgtacctgatcatcaactacttcaagggcggcaagctgcggttcaagaagatcaaacctgaagccttcgaagccaacagattctacaccgtgatcaacaaaaagagcggcgagatcgtgcccatggaggtgaacttcaacttcgacgaccccaacctgatcatcctgcctctggcctttggcaagagacagggcagagaattcatctggaacgacctgctgtccctggaaaccggcagcctgaagctggccaacggaagagtgatcgagaagacactgtacaacagaagaacccggcaggatgagcctgccctgttcgtggccctgaccttcgagcggcgggaggtcctggactcctccaatatcaaaccaatgaacctgatcggcgtggcaagaggcgaaaacatccccgccgtgatcgccctgaccgaccccgagggctgcccactgagccggtttaaggatagcctgggaaacccaacccacatcctgagaatcggcgagagctataaggagaagcagcggaccatccaggccaagaaggaggtggagcagcggagagccggcggctacagccggaagtacgccagcaaagccaagaatctggcagacgatatggtgagaaacaccgctagagatctgctgtactacgccgtgacccaggatgccatgctgatcttcgccaacctgagccggggcttcggccggcagggcaagcggaccttcatggccgagagacagtacacacggatggaggactggctgaccgccaagctggcctacgagggcctgagcaagacctacctgtccaagacactggcccagtacacctccaagacatgcagcaactgtgggtttaccatcaccagcgccgactacgacagggtgctggagaagctgaagaagacagcaacaggctggatgaccacaattaacggcaaggagctgaaggtggagggccagattacctactacaacagatacaagagacagaacgtagtcaaggacctgtccgtcgagctggatagactgagcgaagaatctgtgaacaacgacatctcctcctggacaaagggcagaagcggagaagctctgagcctcctgaagaaaagattctcccatagacccgtgcaggagaagttcgtgtgcctgaactgcggcttcgagacacacgcagccgagcaagccgccctgaacatcgccagatcctggctgttcctgcggagccaggagtacaagaaataccagacaaacaagacaaccggcaacaccgataagagagccttcgtcgagacctggcagtccttttaccggaagaagcttaaggaggtgtggaaacctgccgtgcggtctggcggatctggcggaggctccctgcaggacctggtgaccttcaaggacgtgaccgtggagttcaaccaggaggagtgggccctgctggacagcagccagcagaagctgtacagggacgtgatgctggagaactacggcaacctggccagcctgggctaccacgtggacaagcccagcctgatcagccagctggagcaggaggacaaggtgatgaccgaggagggcggcatcctgcccggcacctgccccgacctggagaccgtgggcggcccaagcagcggcgcccctcctcccagcggcggcagcccagccggctccccaacctctaccgaggagggcacctctgagtccgccacccccgagagcggccctggcacctccaccgagcccagcgagggcagcgcacccggcagccctgccggcagccccacctccacagaggagggaaccagcaccgagcccagcgaaggcagcgccccaggcaccagcaccgagcctagtgagcaggagattaaacggatcaacaagatcagaagaagacttgtgaaagacagcaacaccaagaaggccggcaagacaggccccatgaaaaccctgctggttagagtgatgacacccgatctgagagagcggctggaaaacctgagaaagaagcctgaaaatatcccccagcccatcagcaatacatctagagccaacctgaataagctgctgaccgattacaccgaaatgaagaaggcgatcctgcatgtgtactgggaagagttccagaaggaccctgtgggcctgatgagccgggtggcccagcctgccagcaagaagatcgatcagaacaagctgaaacctgagatggacgagaagggcaacctgaccaccgccggctttgcctgctctcagtgtggccagcccctgttcgtgtacaagctggagcaggtgtctgagaagggcaaggcttacaccaactacttcggacggtgcaatgtggccgagcacgaaaagctgatcctgctggcccagctgaagcccgagaaggatagcgacgaagccgtgacatatagcctgggaaagtttgggcagagggccctggatttctacagcattcatgtgaccaaggagtccacccaccccgtgaagcccctggcccagatcgccggaaacagatacgcctccggacctgtgggaaaggccctgagcgacgcatgtatgggcacaatcgcctccttcctgtctaagtaccaggacatcatcatcgaacaccagaaggtggtgaagggcaaccagaagagactggagagcctgcgggagctggccggcaaggaaaacctggaataccctagcgtgaccctgccacctcagcctcacaccaaggagggcgttgatgcctacaacgaagtgatcgcccgggtgcgaatgtgggtgaacctgaacctgtggcagaagctgaagctaagcagagatgatgccaagcctctgctgagactgaagggattcccttcctttcctctggtcgagagacaggccaacgaagtggactggtgggacatggtgtgtaacgtgaagaagctgatcaacgagaaaaaggaggatggcaaggtgttttggcagaatctggctggctacaagagacaggaagccctgagaccatacctgagcagcgaggaagatcggaagaagggaaagaaattcgctcggtaccagctgggcgacctgctgctgcacctggaaaagaagcacggcgaggactggggaaaggtgtacgacgaggcctgggagcggattgacaagaaagtggaaggcctgagcaagcacatcaagctggaagaggaacggagaagcgaggacgcccagagcaaggccgccctgaccgactggctgcgggctaaggccagcttcgtgatcgagggcctgaaggaggccgacaaggacgagttctgcagatgcgagctgaagctgcagaagtggtacggggacctgcggggaaagcccttcgccatcgaagccgagaacagcatcctggacatcagcggcttcagcaagcagtacaactgtgccttcatctggcagaaggacggcgtgaagaagctgaacctgtacctgatcatcaactacttcaagggcggcaagctgcggttcaagaagatcaaacctgaagccttcgaagccaacagattctacaccgtgatcaacaaaaagagcggcgagatcgtgcccatggaggtgaacttcaacttcgacgaccccaacctgatcatcctgcctctggcctttggcaagagacagggcagagaattcatctggaacgacctgctgtccctggaaaccggcagcctgaagctggccaacggaagagtgatcgagaagacactgtacaacagaagaacccggcaggatgagcctgccctgttcgtggccctgaccttcgagcggcgggaggtcctggactcctccaatatcaaaccaatgaacctgatcggcgtggcaagaggcgaaaacatccccgccgtgatcgccctgaccgaccccgagggctgcccactgagccggtttaaggatagcctgggaaacccaacccacatcctgagaatcggcgagagctataaggagaagcagcggaccatccaggccaagaaggaggtggagcagcggagagccggcggctacagccggaagtacgccagcaaagccaagaatctggcagacgatatggtgagaaacaccgctagagatctgctgtactacgccgtgacccaggatgccatgctgatcttcgccaacctgagccggggcttcggccggcagggcaagcggaccttcatggccgagagacagtacacacggatggaggactggctgaccgccaagctggcctacgagggcctgagcaagacctacctgtccaagacactggcccagtacacctccaagacatgcagcaactgtgggtttaccatcaccagcgccgactacgacagggtgctggagaagctgaagaagacagcaacaggctggatgaccacaattaacggcaaggagctgaaggtggagggccagattacctactacaacagatacaagagacagaacgtagtcaaggacctgtccgtcgagctggatagactgagcgaagaatctgtgaacaacgacatctcctcctggacaaagggcagaagcggagaagctctgagcctcctgaagaaaagattctcccatagacccgtgcaggagaagttcgtgtgcctgaactgcggcttcgagacacacgcagccgagcaagccgccctgaacatcgccagatcctggctgttcctgcggagccaggagtacaagaaataccagacaaacaagacaaccggcaacaccgataagagagccttcgtcgagacctggcagtccttttaccggaagaagcttaaggaggtgtggaaacctgccgtgcggtctggcggatctggcggaggctcctctgcaggacctggtgaccttcaaggacgtgaccgtggagttcaaccaggaggagtgggccctgctggacagcagccagcagaagctgtacagggacgtgatgctggagaactacggcaacctggccagcctgggctaccacgtggacaagcccagcctgatcagccagctggagcaggaggacaaggtgatgaccgaggagggcggcatcctgcccggcacctgccccgacctggagaccgtgggatctggctccggcagcggccccaagaaaaagagaaaagtctaagctgccttctgcggggcttgccttctggccatgcccttcttctctcccttgcacctgtacctcttggtctttgaataaagcctgagtaggaaggctagcaaaaaaaaaaaaaaaaaaaaaaaaaaaaaaaaaaaaaaaaaaaaaaaaaaaaaaaaaaaaaaaaaaaaaaaaaaaaaaaa

SEQ ID NO: 16050 - RNA, 9485 nt, synthetic construct
  source 1..9485: mol_type = other RNA
aggaaataagagagaaaagaagagtaagaagaaatataagagccaccatggcccctaagaagaagcgtaaagtgagccggatggaacgcctcgtctacgaggtgcggcagaagtgcagaaacatcgaggacatctgcatctcctgcggatctctgaacgtgaccctggagcacccactgttcatcggcggcatgtgccagaactgtaaaaactgttttctggagtgtgcctatcaatacgacgatgacggctaccagagctactgcaccatctgttgcggcggaagagaggtgctgatgtgtggaaataacaactgctgccggtgcttctgcgtggaatgcgtggacctgctggtgggccccggcgccgcccaggccgctattaaggaagatccttggaactgctacatgtgcggccacaagggcacatacggcctgctgagacggagagaggactggcctagcagactgcagatgttcttcgccaataaccacgaccaggagttcgacccccctaaggtgtaccctcccgtccccgccgagaagagaaagcccatccgggtcctgagcctgttcgatggcatcgccaccggtctgctggtgctgaaggacctgggcatccaggtggataggtacattgcctccgaggtgtgcgaggactccatcaccgtgggaatggtgcgtcatcagggcaagatcatgtacgtgggcgacgtgcggagcgtgacacagaagcatatccaggagtggggccctttcgacctggtgatcggcggcagcccttgcaatgacctgagcatcgtgaacccagcccggaagggcctgtacgagggaaccggcagactgttcttcgagttttacagactgctgcacgacgcccggcctaaggaaggcgacgaccggcccttcttttggctgttcgagaatgtggtggccatgggagtcagcgacaagcgggatattagccggttcctggagagcaaccccgtgatgatcgatgccaaggaagtgagcgccgcccaccgggccagatacttctggggcaatctgcctggcatgaacagacccctggccagcaccgtgaacgacaagctggagctgcaggagtgcctggagcacggccggatcgccaagttcagcaaggtgagaaccatcaccacccgaagcaacagcatcaaacaaggcaaggaccagcactttcctgtgttcatgaacgagaaggaggacatcctgtggtgtaccgagatggagagagtgttcgggttcccagtccactacacagatgtcagcaacatgtctagactggccagacagagactgctgggaagaagctggtccgtccctgtgatcagacacctgttcgcccctctgaaggagtacttcgcctgcgtgagcagcggcaacagcaacgccaacagccggggccccagcttctctagcggcctggtgccactgtccctgagagggagccacatgggccccatggagatctacaaaaccgtgagcgcctggaagcggcagcctgtgcgcgtgctgagcctgtttcggaatatcgataaagtcctgaaaagcctgggattcctggagagcggctctggctccggcggtggcaccctgaagtacgtggaggatgtgacaaacgtggtcagacgggatgtggagaagtggggccccttcgatctggtgtacggcagcacccaacccctgggcagctcttgtgaccggtgccctggctggtacatgtttcagttccaccggatcctgcagtacgccctgccgagacaggagtcccagcggccattcttttggattttcatggacaacttgctgctgaccgaggatgaccaggaaactaccactcggttcctgcagaccgaagccgtgaccctgcaggacgtgagaggccgggactaccagaacgccatgcgggtgtggtccaacatccctggactgaaaagcaagcacgcacctctgacccctaaagaagaggagtacctgcaggcccaggtgcggagcagaagcaagctggacgcccctaaggtggatctgctggtgaagaattgcctcctgcccctgagagagtacttcaagtatttcagccagaatagtctgcccctgggaggcagcggcggcggcgccctggtgacatttgaggacgtcgccgtgcggttcacccaggaggaatgggctctgctggatccttctcagaaaatcctgtaccgggacgtgatgagagagacataccggaatctgacctccgtgggcatcaactgggaatgttgggaccttgaagcctgcttcagaagcctgggaagaaacctgagagtgcaggtggtgaagagaaagtgcgagctgaccaacagcggcccctgcgccgagggcggcccaagcagcggcgcccctcctcccagcggcggcagcccagccggctccccaacctctaccgaggagggcacctctgagtccgccacccccgagagcggccctggcacctccaccgagcccagcgagggcagcgcacccggcagccctgccggcagccccacctccacagaggagggaaccagcaccgagcccagcgaaggcagcgccccaggcaccagcaccgagcctagtgagcaggagattaaacggatcaacaagatcagaagaagacttgtgaaagacagcaacaccaagaaggccggcaagacaggccccatgaaaaccctgctggttagagtgatgacacccgatctgagagagcggctggaaaacctgagaaagaagcctgaaaatatcccccagcccatcagcaatacatctagagccaacctgaataagctgctgaccgattacaccgaaatgaagaaggcgatcctgcatgtgtactgggaagagttccagaaggaccctgtgggcctgatgagccgggtggcccagcctgccagcaagaagatcgatcagaacaagctgaaacctgagatggacgagaagggcaacctgaccaccgccggctttgcctgctctcagtgtggccagcccctgttcgtgtacaagctggagcaggtgtctgagaagggcaaggcttacaccaactacttcggacggtgcaatgtggccgagcacgaaaagctgatcctgctggcccagctgaagcccgagaaggatagcgacgaagccgtgacatatagcctgggaaagtttgggcagagggccctggatttctacagcattcatgtgaccaaggagtccacccaccccgtgaagcccctggcccagatcgccggaaacagatacgcctccggacctgtgggaaaggccctgagcgacgcatgtatgggcacaatcgcctccttcctgtctaagtaccaggacatcatcatcgaacaccagaaggtggtgaagggcaaccagaagagactggagagcctgcgggagctggccggcaaggaaaacctggaataccctagcgtgaccctgccacctcagcctcacaccaaggagggcgttgatgcctacaacgaagtgatcgcccgggtgcgaatgtgggtgaacctgaacctgtggcagaagctgaagctaagcagagatgatgccaagcctctgctgagactgaagggattcccttcctttcctctggtcgagagacaggccaacgaagtggactggtgggacatggtgtgtaacgtgaagaagctgatcaacgagaaaaaggaggatggcaaggtgttttggcagaatctggctggctacaagagacaggaagccctgagaccatacctgagcagcgaggaagatcggaagaagggaaagaaattcgctcggtaccagctgggcgacctgctgctgcacctggaaaagaagcacggcgaggactggggaaaggtgtacgacgaggcctgggagcggattgacaagaaagtggaaggcctgagcaagcacatcaagctggaagaggaacggagaagcgaggacgcccagagcaaggccgccctgaccgactggctgcgggctaaggccagcttcgtgatcgagggcctgaaggaggccgacaaggacgagttctgcagatgcgagctgaagctgcagaagtggtacggggacctgcggggaaagcccttcgccatcgaagccgagaacagcatcctggacatcagcggcttcagcaagcagtacaactgtgccttcatctggcagaaggacggcgtgaagaagctgaacctgtacctgatcatcaactacttcaagggcggcaagctgcggttcaagaagatcaaacctgaagccttcgaagccaacagattctacaccgtgatcaacaaaaagagcggcgagatcgtgcccatggaggtgaacttcaacttcgacgaccccaacctgatcatcctgcctctggcctttggcaagagacagggcagagaattcatctggaacgacctgctgtccctggaaaccggcagcctgaagctggccaacggaagagtgatcgagaagacactgtacaacagaagaacccggcaggatgagcctgccctgttcgtggccctgaccttcgagcggcgggaggtcctggactcctccaatatcaaaccaatgaacctgatcggcgtggcaagaggcgaaaacatccccgccgtgatcgccctgaccgaccccgagggctgcccactgagccggtttaaggatagcctgggaaacccaacccacatcctgagaatcggcgagagctataaggagaagcagcggaccatccaggccaagaaggaggtggagcagcggagagccggcggctacagccggaagtacgccagcaaagccaagaatctggcagacgatatggtgagaaacaccgctagagatctgctgtactacgccgtgacccaggatgccatgctgatcttcgccaacctgagccggggcttcggccggcagggcaagcggaccttcatggccgagagacagtacacacggatggaggactggctgaccgccaagctggcctacgagggcctgagcaagacctacctgtccaagacactggcccagtacacctccaagacatgcagcaactgtgggtttaccatcaccagcgccgactacgacagggtgctggagaagctgaagaagacagcaacaggctggatgaccacaattaacggcaaggagctgaaggtggagggccagattacctactacaacagatacaagagacagaacgtagtcaaggacctgtccgtcgagctggatagactgagcgaagaatctgtgaacaacgacatctcctcctggacaaagggcagaagcggagaagctctgagcctcctgaagaaaagattctcccatagacccgtgcaggagaagttcgtgtgcctgaactgcggcttcgagacacacgcagccgagcaagccgccctgaacatcgccagatcctggctgttcctgcggagccaggagtacaagaaataccagacaaacaagacaaccggcaacaccgataagagagccttcgtcgagacctggcagtccttttaccggaagaagcttaaggaggtgtggaaacctgccgtgcggtctggcggatctggcggaggctccgagcaggagcccgtgaccttcaaggacgtggccgtggacttcacccaggaggagtggggccagctggacctggtgcagaggaccctgtacagggacgtgatgctggagacctacggccacctgctgagcgtgggcaaccagaccgccaagcccgaggtgatcagcctgctggagcagggcgaggagccctggagcgtggagcagacctgcccccagagggcctgccccgagtggatgaggaacggcggcccaagcagcggcgcccctcctcccagcggcggcagcccagccggctccccaacctctaccgaggagggcacctctgagtccgccacccccgagagcggccctggcacctccaccgagcccagcgagggcagcgcacccggcagccctgccggcagccccacctccacagaggagggaaccagcaccgagcccagcgaaggcagcgccccaggcaccagcaccgagcctagtgagcaggagattaaacggatcaacaagatcagaagaagacttgtgaaagacagcaacaccaagaaggccggcaagacaggccccatgaaaaccctgctggttagagtgatgacacccgatctgagagagcggctggaaaacctgagaaagaagcctgaaaatatcccccagcccatcagcaatacatctagagccaacctgaataagctgctgaccgattacaccgaaatgaagaaggcgatcctgcatgtgtactgggaagagttccagaaggaccctgtgggcctgatgagccgggtggcccagcctgccagcaagaagatcgatcagaacaagctgaaacctgagatggacgagaagggcaacctgaccaccgccggctttgcctgctctcagtgtggccagcccctgttcgtgtacaagctggagcaggtgtctgagaagggcaaggcttacaccaactacttcggacggtgcaatgtggccgagcacgaaaagctgatcctgctggcccagctgaagcccgagaaggatagcgacgaagccgtgacatatagcctgggaaagtttgggcagagggccctggatttctacagcattcatgtgaccaaggagtccacccaccccgtgaagcccctggcccagatcgccggaaacagatacgcctccggacctgtgggaaaggccctgagcgacgcatgtatgggcacaatcgcctccttcctgtctaagtaccaggacatcatcatcgaacaccagaaggtggtgaagggcaaccagaagagactggagagcctgcgggagctggccggcaaggaaaacctggaataccctagcgtgaccctgccacctcagcctcacaccaaggagggcgttgatgcctacaacgaagtgatcgcccgggtgcgaatgtgggtgaacctgaacctgtggcagaagctgaagctaagcagagatgatgccaagcctctgctgagactgaagggattcccttcctttcctctggtcgagagacaggccaacgaagtggactggtgggacatggtgtgtaacgtgaagaagctgatcaacgagaaaaaggaggatggcaaggtgttttggcagaatctggctggctacaagagacaggaagccctgagaccatacctgagcagcgaggaagatcggaagaagggaaagaaattcgctcggtaccagctgggcgacctgctgctgcacctggaaaagaagcacggcgaggactggggaaaggtgtacgacgaggcctgggagcggattgacaagaaagtggaaggcctgagcaagcacatcaagctggaagaggaacggagaagcgaggacgcccagagcaaggccgccctgaccgactggctgcgggctaaggccagcttcgtgatcgagggcctgaaggaggccgacaaggacgagttctgcagatgcgagctgaagctgcagaagtggtacggggacctgcggggaaagcccttcgccatcgaagccgagaacagcatcctggacatcagcggcttcagcaagcagtacaactgtgccttcatctggcagaaggacggcgtgaagaagctgaacctgtacctgatcatcaactacttcaagggcggcaagctgcggttcaagaagatcaaacctgaagccttcgaagccaacagattctacaccgtgatcaacaaaaagagcggcgagatcgtgcccatggaggtgaacttcaacttcgacgaccccaacctgatcatcctgcctctggcctttggcaagagacagggcagagaattcatctggaacgacctgctgtccctggaaaccggcagcctgaagctggccaacggaagagtgatcgagaagacactgtacaacagaagaacccggcaggatgagcctgccctgttcgtggccctgaccttcgagcggcgggaggtcctggactcctccaatatcaaaccaatgaacctgatcggcgtggcaagaggcgaaaacatccccgccgtgatcgccctgaccgaccccgagggctgcccactgagccggtttaaggatagcctgggaaacccaacccacatcctgagaatcggcgagagctataaggagaagcagcggaccatccaggccaagaaggaggtggagcagcggagagccggcggctacagccggaagtacgccagcaaagccaagaatctggcagacgatatggtgagaaacaccgctagagatctgctgtactacgccgtgacccaggatgccatgctgatcttcgccaacctgagccggggcttcggccggcagggcaagcggaccttcatggccgagagacagtacacacggatggaggactggctgaccgccaagctggcctacgagggcctgagcaagacctacctgtccaagacactggcccagtacacctccaagacatgcagcaactgtgggtttaccatcaccagcgccgactacgacagggtgctggagaagctgaagaagacagcaacaggctggatgaccacaattaacggcaaggagctgaaggtggagggccagattacctactacaacagatacaagagacagaacgtagtcaaggacctgtccgtcgagctggatagactgagcgaagaatctgtgaacaacgacatctcctcctggacaaagggcagaagcggagaagctctgagcctcctgaagaaaagattctcccatagacccgtgcaggagaagttcgtgtgcctgaactgcggcttcgagacacacgcagccgagcaagccgccctgaacatcgccagatcctggctgttcctgcggagccaggagtacaagaaataccagacaaacaagacaaccggcaacaccgataagagagccttcgtcgagacctggcagtccttttaccggaagaagcttaaggaggtgtggaaacctgccgtgcggtctggcggatctggcggaggctcctgagcaggagcccgtgaccttcaaggacgtggccgtggacttcacccaggaggagtggggccagctggacctggtgcagaggaccctgtacagggacgtgatgctggagacctacggccacctgctgagcgtgggcaaccagaccgccaagcccgaggtgatcagcctgctggagcagggcgaggagccctggagcgtggagcagacctgcccccagagggcctgccccgagtggatgaggaacggatctggctccggcagcggccccaagaaaaagagaaaagtctaagctgccttctgcggggcttgccttctggccatgcccttcttctctcccttgcacctgtacctcttggtctttgaataaagcctgagtaggaaggctagcaaaaaaaaaaaaaaaaaaaaaaaaaaaaaaaaaaaaaaaaaaaaaaaaaaaaaaaaaaaaaaaaaaaaaaaaaaaaaaaa

SEQ ID NO: 16051 - RNA, 9485 nt, synthetic construct
  source 1..9485: mol_type = other RNA
aggaaataagagagaaaagaagagtaagaagaaatataagagccaccatggcccctaagaagaagcgtaaagtgagccggatggaacgcctcgtctacgaggtgcggcagaagtgcagaaacatcgaggacatctgcatctcctgcggatctctgaacgtgaccctggagcacccactgttcatcggcggcatgtgccagaactgtaaaaactgttttctggagtgtgcctatcaatacgacgatgacggctaccagagctactgcaccatctgttgcggcggaagagaggtgctgatgtgtggaaataacaactgctgccggtgcttctgcgtggaatgcgtggacctgctggtgggccccggcgccgcccaggccgctattaaggaagatccttggaactgctacatgtgcggccacaagggcacatacggcctgctgagacggagagaggactggcctagcagactgcagatgttcttcgccaataaccacgaccaggagttcgacccccctaaggtgtaccctcccgtccccgccgagaagagaaagcccatccgggtcctgagcctgttcgatggcatcgccaccggtctgctggtgctgaaggacctgggcatccaggtggataggtacattgcctccgaggtgtgcgaggactccatcaccgtgggaatggtgcgtcatcagggcaagatcatgtacgtgggcgacgtgcggagcgtgacacagaagcatatccaggagtggggccctttcgacctggtgatcggcggcagcccttgcaatgacctgagcatcgtgaacccagcccggaagggcctgtacgagggaaccggcagactgttcttcgagttttacagactgctgcacgacgcccggcctaaggaaggcgacgaccggcccttcttttggctgttcgagaatgtggtggccatgggagtcagcgacaagcgggatattagccggttcctggagagcaaccccgtgatgatcgatgccaaggaagtgagcgccgcccaccgggccagatacttctggggcaatctgcctggcatgaacagacccctggccagcaccgtgaacgacaagctggagctgcaggagtgcctggagcacggccggatcgccaagttcagcaaggtgagaaccatcaccacccgaagcaacagcatcaaacaaggcaaggaccagcactttcctgtgttcatgaacgagaaggaggacatcctgtggtgtaccgagatggagagagtgttcgggttcccagtccactacacagatgtcagcaacatgtctagactggccagacagagactgctgggaagaagctggtccgtccctgtgatcagacacctgttcgcccctctgaaggagtacttcgcctgcgtgagcagcggcaacagcaacgccaacagccggggccccagcttctctagcggcctggtgccactgtccctgagagggagccacatgggccccatggagatctacaaaaccgtgagcgcctggaagcggcagcctgtgcgcgtgctgagcctgtttcggaatatcgataaagtcctgaaaagcctgggattcctggagagcggctctggctccggcggtggcaccctgaagtacgtggaggatgtgacaaacgtggtcagacgggatgtggagaagtggggccccttcgatctggtgtacggcagcacccaacccctgggcagctcttgtgaccggtgccctggctggtacatgtttcagttccaccggatcctgcagtacgccctgccgagacaggagtcccagcggccattcttttggattttcatggacaacttgctgctgaccgaggatgaccaggaaactaccactcggttcctgcagaccgaagccgtgaccctgcaggacgtgagaggccgggactaccagaacgccatgcgggtgtggtccaacatccctggactgaaaagcaagcacgcacctctgacccctaaagaagaggagtacctgcaggcccaggtgcggagcagaagcaagctggacgcccctaaggtggatctgctggtgaagaattgcctcctgcccctgagagagtacttcaagtatttcagccagaatagtctgcccctgggaggcagcggcggcggcgccctggtgacatttgaggacgtcgccgtgcggttcacccaggaggaatgggctctgctggatccttctcagaaaatcctgtaccgggacgtgatgagagagacataccggaatctgacctccgtgggcatcaactgggaatgttgggaccttgaagcctgcttcagaagcctgggaagaaacctgagagtgcaggtggtgaagagaaagtgcgagctgaccaacagcggcccctgcgccgagggcggcccaagcagcggcgcccctcctcccagcggcggcagcccagccggctccccaacctctaccgaggagggcacctctgagtccgccacccccgagagcggccctggcacctccaccgagcccagcgagggcagcgcacccggcagccctgccggcagccccacctccacagaggagggaaccagcaccgagcccagcgaaggcagcgccccaggcaccagcaccgagcctagtgagcaggagattaaacggatcaacaagatcagaagaagacttgtgaaagacagcaacaccaagaaggccggcaagacaggccccatgaaaaccctgctggttagagtgatgacacccgatctgagagagcggctggaaaacctgagaaagaagcctgaaaatatcccccagcccatcagcaatacatctagagccaacctgaataagctgctgaccgattacaccgaaatgaagaaggcgatcctgcatgtgtactgggaagagttccagaaggaccctgtgggcctgatgagccgggtggcccagcctgccagcaagaagatcgatcagaacaagctgaaacctgagatggacgagaagggcaacctgaccaccgccggctttgcctgctctcagtgtggccagcccctgttcgtgtacaagctggagcaggtgtctgagaagggcaaggcttacaccaactacttcggacggtgcaatgtggccgagcacgaaaagctgatcctgctggcccagctgaagcccgagaaggatagcgacgaagccgtgacatatagcctgggaaagtttgggcagagggccctggatttctacagcattcatgtgaccaaggagtccacccaccccgtgaagcccctggcccagatcgccggaaacagatacgcctccggacctgtgggaaaggccctgagcgacgcatgtatgggcacaatcgcctccttcctgtctaagtaccaggacatcatcatcgaacaccagaaggtggtgaagggcaaccagaagagactggagagcctgcgggagctggccggcaaggaaaacctggaataccctagcgtgaccctgccacctcagcctcacaccaaggagggcgttgatgcctacaacgaagtgatcgcccgggtgcgaatgtgggtgaacctgaacctgtggcagaagctgaagctaagcagagatgatgccaagcctctgctgagactgaagggattcccttcctttcctctggtcgagagacaggccaacgaagtggactggtgggacatggtgtgtaacgtgaagaagctgatcaacgagaaaaaggaggatggcaaggtgttttggcagaatctggctggctacaagagacaggaagccctgagaccatacctgagcagcgaggaagatcggaagaagggaaagaaattcgctcggtaccagctgggcgacctgctgctgcacctggaaaagaagcacggcgaggactggggaaaggtgtacgacgaggcctgggagcggattgacaagaaagtggaaggcctgagcaagcacatcaagctggaagaggaacggagaagcgaggacgcccagagcaaggccgccctgaccgactggctgcgggctaaggccagcttcgtgatcgagggcctgaaggaggccgacaaggacgagttctgcagatgcgagctgaagctgcagaagtggtacggggacctgcggggaaagcccttcgccatcgaagccgagaacagcatcctggacatcagcggcttcagcaagcagtacaactgtgccttcatctggcagaaggacggcgtgaagaagctgaacctgtacctgatcatcaactacttcaagggcggcaagctgcggttcaagaagatcaaacctgaagccttcgaagccaacagattctacaccgtgatcaacaaaaagagcggcgagatcgtgcccatggaggtgaacttcaacttcgacgaccccaacctgatcatcctgcctctggcctttggcaagagacagggcagagaattcatctggaacgacctgctgtccctggaaaccggcagcctgaagctggccaacggaagagtgatcgagaagacactgtacaacagaagaacccggcaggatgagcctgccctgttcgtggccctgaccttcgagcggcgggaggtcctggactcctccaatatcaaaccaatgaacctgatcggcgtggcaagaggcgaaaacatccccgccgtgatcgccctgaccgaccccgagggctgcccactgagccggtttaaggatagcctgggaaacccaacccacatcctgagaatcggcgagagctataaggagaagcagcggaccatccaggccaagaaggaggtggagcagcggagagccggcggctacagccggaagtacgccagcaaagccaagaatctggcagacgatatggtgagaaacaccgctagagatctgctgtactacgccgtgacccaggatgccatgctgatcttcgccaacctgagccggggcttcggccggcagggcaagcggaccttcatggccgagagacagtacacacggatggaggactggctgaccgccaagctggcctacgagggcctgagcaagacctacctgtccaagacactggcccagtacacctccaagacatgcagcaactgtgggtttaccatcaccagcgccgactacgacagggtgctggagaagctgaagaagacagcaacaggctggatgaccacaattaacggcaaggagctgaaggtggagggccagattacctactacaacagatacaagagacagaacgtagtcaaggacctgtccgtcgagctggatagactgagcgaagaatctgtgaacaacgacatctcctcctggacaaagggcagaagcggagaagctctgagcctcctgaagaaaagattctcccatagacccgtgcaggagaagttcgtgtgcctgaactgcggcttcgagacacacgcagccgagcaagccgccctgaacatcgccagatcctggctgttcctgcggagccaggagtacaagaaataccagacaaacaagacaaccggcaacaccgataagagagccttcgtcgagacctggcagtccttttaccggaagaagcttaaggaggtgtggaaacctgccgtgcggtctggcggatctggcggaggctccatgcccctgaaggcccagtaccaggagatggtgaccttcgaggacgtggccgtgcacttcaccaagaccgagtggaccggcctgagccccgcccagagggccctgtacaggagcgtgatgctggagaacttcggcaacctgaccgccctgggctaccccgtgcccaagcccgccctgatcagcctgctggagggcggcgacatggcctggggcctggaggcccaggacgacccccccgccgagggcggcccaagcagcggcgcccctcctcccagcggcggcagcccagccggctccccaacctctaccgaggagggcacctctgagtccgccacccccgagagcggccctggcacctccaccgagcccagcgagggcagcgcacccggcagccctgccggcagccccacctccacagaggagggaaccagcaccgagcccagcgaaggcagcgccccaggcaccagcaccgagcctagtgagcaggagattaaacggatcaacaagatcagaagaagacttgtgaaagacagcaacaccaagaaggccggcaagacaggccccatgaaaaccctgctggttagagtgatgacacccgatctgagagagcggctggaaaacctgagaaagaagcctgaaaatatcccccagcccatcagcaatacatctagagccaacctgaataagctgctgaccgattacaccgaaatgaagaaggcgatcctgcatgtgtactgggaagagttccagaaggaccctgtgggcctgatgagccgggtggcccagcctgccagcaagaagatcgatcagaacaagctgaaacctgagatggacgagaagggcaacctgaccaccgccggctttgcctgctctcagtgtggccagcccctgttcgtgtacaagctggagcaggtgtctgagaagggcaaggcttacaccaactacttcggacggtgcaatgtggccgagcacgaaaagctgatcctgctggcccagctgaagcccgagaaggatagcgacgaagccgtgacatatagcctgggaaagtttgggcagagggccctggatttctacagcattcatgtgaccaaggagtccacccaccccgtgaagcccctggcccagatcgccggaaacagatacgcctccggacctgtgggaaaggccctgagcgacgcatgtatgggcacaatcgcctccttcctgtctaagtaccaggacatcatcatcgaacaccagaaggtggtgaagggcaaccagaagagactggagagcctgcgggagctggccggcaaggaaaacctggaataccctagcgtgaccctgccacctcagcctcacaccaaggagggcgttgatgcctacaacgaagtgatcgcccgggtgcgaatgtgggtgaacctgaacctgtggcagaagctgaagctaagcagagatgatgccaagcctctgctgagactgaagggattcccttcctttcctctggtcgagagacaggccaacgaagtggactggtgggacatggtgtgtaacgtgaagaagctgatcaacgagaaaaaggaggatggcaaggtgttttggcagaatctggctggctacaagagacaggaagccctgagaccatacctgagcagcgaggaagatcggaagaagggaaagaaattcgctcggtaccagctgggcgacctgctgctgcacctggaaaagaagcacggcgaggactggggaaaggtgtacgacgaggcctgggagcggattgacaagaaagtggaaggcctgagcaagcacatcaagctggaagaggaacggagaagcgaggacgcccagagcaaggccgccctgaccgactggctgcgggctaaggccagcttcgtgatcgagggcctgaaggaggccgacaaggacgagttctgcagatgcgagctgaagctgcagaagtggtacggggacctgcggggaaagcccttcgccatcgaagccgagaacagcatcctggacatcagcggcttcagcaagcagtacaactgtgccttcatctggcagaaggacggcgtgaagaagctgaacctgtacctgatcatcaactacttcaagggcggcaagctgcggttcaagaagatcaaacctgaagccttcgaagccaacagattctacaccgtgatcaacaaaaagagcggcgagatcgtgcccatggaggtgaacttcaacttcgacgaccccaacctgatcatcctgcctctggcctttggcaagagacagggcagagaattcatctggaacgacctgctgtccctggaaaccggcagcctgaagctggccaacggaagagtgatcgagaagacactgtacaacagaagaacccggcaggatgagcctgccctgttcgtggccctgaccttcgagcggcgggaggtcctggactcctccaatatcaaaccaatgaacctgatcggcgtggcaagaggcgaaaacatccccgccgtgatcgccctgaccgaccccgagggctgcccactgagccggtttaaggatagcctgggaaacccaacccacatcctgagaatcggcgagagctataaggagaagcagcggaccatccaggccaagaaggaggtggagcagcggagagccggcggctacagccggaagtacgccagcaaagccaagaatctggcagacgatatggtgagaaacaccgctagagatctgctgtactacgccgtgacccaggatgccatgctgatcttcgccaacctgagccggggcttcggccggcagggcaagcggaccttcatggccgagagacagtacacacggatggaggactggctgaccgccaagctggcctacgagggcctgagcaagacctacctgtccaagacactggcccagtacacctccaagacatgcagcaactgtgggtttaccatcaccagcgccgactacgacagggtgctggagaagctgaagaagacagcaacaggctggatgaccacaattaacggcaaggagctgaaggtggagggccagattacctactacaacagatacaagagacagaacgtagtcaaggacctgtccgtcgagctggatagactgagcgaagaatctgtgaacaacgacatctcctcctggacaaagggcagaagcggagaagctctgagcctcctgaagaaaagattctcccatagacccgtgcaggagaagttcgtgtgcctgaactgcggcttcgagacacacgcagccgagcaagccgccctgaacatcgccagatcctggctgttcctgcggagccaggagtacaagaaataccagacaaacaagacaaccggcaacaccgataagagagccttcgtcgagacctggcagtccttttaccggaagaagcttaaggaggtgtggaaacctgccgtgcggtctggcggatctggcggaggctcctatgcccctgaaggcccagtaccaggagatggtgaccttcgaggacgtggccgtgcacttcaccaagaccgagtggaccggcctgagccccgcccagagggccctgtacaggagcgtgatgctggagaacttcggcaacctgaccgccctgggctaccccgtgcccaagcccgccctgatcagcctgctggagggcggcgacatggcctggggcctggaggcccaggacgacccccccgccgagggatctggctccggcagcggccccaagaaaaagagaaaagtctaagctgccttctgcggggcttgccttctggccatgcccttcttctctcccttgcacctgtacctcttggtctttgaataaagcctgagtaggaaggctagcaaaaaaaaaaaaaaaaaaaaaaaaaaaaaaaaaaaaaaaaaaaaaaaaaaaaaaaaaaaaaaaaaaaaaaaaaaaaaaaa

SEQ ID NO: 16052 - RNA, 9485 nt, synthetic construct
  source 1..9485: mol_type = other RNA
aggaaataagagagaaaagaagagtaagaagaaatataagagccaccatggcccctaagaagaagcgtaaagtgagccggatggaacgcctcgtctacgaggtgcggcagaagtgcagaaacatcgaggacatctgcatctcctgcggatctctgaacgtgaccctggagcacccactgttcatcggcggcatgtgccagaactgtaaaaactgttttctggagtgtgcctatcaatacgacgatgacggctaccagagctactgcaccatctgttgcggcggaagagaggtgctgatgtgtggaaataacaactgctgccggtgcttctgcgtggaatgcgtggacctgctggtgggccccggcgccgcccaggccgctattaaggaagatccttggaactgctacatgtgcggccacaagggcacatacggcctgctgagacggagagaggactggcctagcagactgcagatgttcttcgccaataaccacgaccaggagttcgacccccctaaggtgtaccctcccgtccccgccgagaagagaaagcccatccgggtcctgagcctgttcgatggcatcgccaccggtctgctggtgctgaaggacctgggcatccaggtggataggtacattgcctccgaggtgtgcgaggactccatcaccgtgggaatggtgcgtcatcagggcaagatcatgtacgtgggcgacgtgcggagcgtgacacagaagcatatccaggagtggggccctttcgacctggtgatcggcggcagcccttgcaatgacctgagcatcgtgaacccagcccggaagggcctgtacgagggaaccggcagactgttcttcgagttttacagactgctgcacgacgcccggcctaaggaaggcgacgaccggcccttcttttggctgttcgagaatgtggtggccatgggagtcagcgacaagcgggatattagccggttcctggagagcaaccccgtgatgatcgatgccaaggaagtgagcgccgcccaccgggccagatacttctggggcaatctgcctggcatgaacagacccctggccagcaccgtgaacgacaagctggagctgcaggagtgcctggagcacggccggatcgccaagttcagcaaggtgagaaccatcaccacccgaagcaacagcatcaaacaaggcaaggaccagcactttcctgtgttcatgaacgagaaggaggacatcctgtggtgtaccgagatggagagagtgttcgggttcccagtccactacacagatgtcagcaacatgtctagactggccagacagagactgctgggaagaagctggtccgtccctgtgatcagacacctgttcgcccctctgaaggagtacttcgcctgcgtgagcagcggcaacagcaacgccaacagccggggccccagcttctctagcggcctggtgccactgtccctgagagggagccacatgggccccatggagatctacaaaaccgtgagcgcctggaagcggcagcctgtgcgcgtgctgagcctgtttcggaatatcgataaagtcctgaaaagcctgggattcctggagagcggctctggctccggcggtggcaccctgaagtacgtggaggatgtgacaaacgtggtcagacgggatgtggagaagtggggccccttcgatctggtgtacggcagcacccaacccctgggcagctcttgtgaccggtgccctggctggtacatgtttcagttccaccggatcctgcagtacgccctgccgagacaggagtcccagcggccattcttttggattttcatggacaacttgctgctgaccgaggatgaccaggaaactaccactcggttcctgcagaccgaagccgtgaccctgcaggacgtgagaggccgggactaccagaacgccatgcgggtgtggtccaacatccctggactgaaaagcaagcacgcacctctgacccctaaagaagaggagtacctgcaggcccaggtgcggagcagaagcaagctggacgcccctaaggtggatctgctggtgaagaattgcctcctgcccctgagagagtacttcaagtatttcagccagaatagtctgcccctgggaggcagcggcggcggcgccctggtgacatttgaggacgtcgccgtgcggttcacccaggaggaatgggctctgctggatccttctcagaaaatcctgtaccgggacgtgatgagagagacataccggaatctgacctccgtgggcatcaactgggaatgttgggaccttgaagcctgcttcagaagcctgggaagaaacctgagagtgcaggtggtgaagagaaagtgcgagctgaccaacagcggcccctgcgccgagggcggcccaagcagcggcgcccctcctcccagcggcggcagcccagccggctccccaacctctaccgaggagggcacctctgagtccgccacccccgagagcggccctggcacctccaccgagcccagcgagggcagcgcacccggcagccctgccggcagccccacctccacagaggagggaaccagcaccgagcccagcgaaggcagcgccccaggcaccagcaccgagcctagtgagcaggagattaaacggatcaacaagatcagaagaagacttgtgaaagacagcaacaccaagaaggccggcaagacaggccccatgaaaaccctgctggttagagtgatgacacccgatctgagagagcggctggaaaacctgagaaagaagcctgaaaatatcccccagcccatcagcaatacatctagagccaacctgaataagctgctgaccgattacaccgaaatgaagaaggcgatcctgcatgtgtactgggaagagttccagaaggaccctgtgggcctgatgagccgggtggcccagcctgccagcaagaagatcgatcagaacaagctgaaacctgagatggacgagaagggcaacctgaccaccgccggctttgcctgctctcagtgtggccagcccctgttcgtgtacaagctggagcaggtgtctgagaagggcaaggcttacaccaactacttcggacggtgcaatgtggccgagcacgaaaagctgatcctgctggcccagctgaagcccgagaaggatagcgacgaagccgtgacatatagcctgggaaagtttgggcagagggccctggatttctacagcattcatgtgaccaaggagtccacccaccccgtgaagcccctggcccagatcgccggaaacagatacgcctccggacctgtgggaaaggccctgagcgacgcatgtatgggcacaatcgcctccttcctgtctaagtaccaggacatcatcatcgaacaccagaaggtggtgaagggcaaccagaagagactggagagcctgcgggagctggccggcaaggaaaacctggaataccctagcgtgaccctgccacctcagcctcacaccaaggagggcgttgatgcctacaacgaagtgatcgcccgggtgcgaatgtgggtgaacctgaacctgtggcagaagctgaagctaagcagagatgatgccaagcctctgctgagactgaagggattcccttcctttcctctggtcgagagacaggccaacgaagtggactggtgggacatggtgtgtaacgtgaagaagctgatcaacgagaaaaaggaggatggcaaggtgttttggcagaatctggctggctacaagagacaggaagccctgagaccatacctgagcagcgaggaagatcggaagaagggaaagaaattcgctcggtaccagctgggcgacctgctgctgcacctggaaaagaagcacggcgaggactggggaaaggtgtacgacgaggcctgggagcggattgacaagaaagtggaaggcctgagcaagcacatcaagctggaagaggaacggagaagcgaggacgcccagagcaaggccgccctgaccgactggctgcgggctaaggccagcttcgtgatcgagggcctgaaggaggccgacaaggacgagttctgcagatgcgagctgaagctgcagaagtggtacggggacctgcggggaaagcccttcgccatcgaagccgagaacagcatcctggacatcagcggcttcagcaagcagtacaactgtgccttcatctggcagaaggacggcgtgaagaagctgaacctgtacctgatcatcaactacttcaagggcggcaagctgcggttcaagaagatcaaacctgaagccttcgaagccaacagattctacaccgtgatcaacaaaaagagcggcgagatcgtgcccatggaggtgaacttcaacttcgacgaccccaacctgatcatcctgcctctggcctttggcaagagacagggcagagaattcatctggaacgacctgctgtccctggaaaccggcagcctgaagctggccaacggaagagtgatcgagaagacactgtacaacagaagaacccggcaggatgagcctgccctgttcgtggccctgaccttcgagcggcgggaggtcctggactcctccaatatcaaaccaatgaacctgatcggcgtggcaagaggcgaaaacatccccgccgtgatcgccctgaccgaccccgagggctgcccactgagccggtttaaggatagcctgggaaacccaacccacatcctgagaatcggcgagagctataaggagaagcagcggaccatccaggccaagaaggaggtggagcagcggagagccggcggctacagccggaagtacgccagcaaagccaagaatctggcagacgatatggtgagaaacaccgctagagatctgctgtactacgccgtgacccaggatgccatgctgatcttcgccaacctgagccggggcttcggccggcagggcaagcggaccttcatggccgagagacagtacacacggatggaggactggctgaccgccaagctggcctacgagggcctgagcaagacctacctgtccaagacactggcccagtacacctccaagacatgcagcaactgtgggtttaccatcaccagcgccgactacgacagggtgctggagaagctgaagaagacagcaacaggctggatgaccacaattaacggcaaggagctgaaggtggagggccagattacctactacaacagatacaagagacagaacgtagtcaaggacctgtccgtcgagctggatagactgagcgaagaatctgtgaacaacgacatctcctcctggacaaagggcagaagcggagaagctctgagcctcctgaagaaaagattctcccatagacccgtgcaggagaagttcgtgtgcctgaactgcggcttcgagacacacgcagccgagcaagccgccctgaacatcgccagatcctggctgttcctgcggagccaggagtacaagaaataccagacaaacaagacaaccggcaacaccgataagagagccttcgtcgagacctggcagtccttttaccggaagaagcttaaggaggtgtggaaacctgccgtgcggtctggcggatctggcggaggctccgtgcccgccctggtgaccttcagggacgtggccgtggacttcacccaggaggagtggaggcacctggagcccgcccagagggccctgcacagggacgtgatgctggagaacttccagaacctggtgagcgtgggcctgcccgtgagcaaggtggacgtgatcagcctgctggagaggggcgaggccccctggcagcccgagggcggcggcccccccgacccctgctacgactacctgaactggggcggcccaagcagcggcgcccctcctcccagcggcggcagcccagccggctccccaacctctaccgaggagggcacctctgagtccgccacccccgagagcggccctggcacctccaccgagcccagcgagggcagcgcacccggcagccctgccggcagccccacctccacagaggagggaaccagcaccgagcccagcgaaggcagcgccccaggcaccagcaccgagcctagtgagcaggagattaaacggatcaacaagatcagaagaagacttgtgaaagacagcaacaccaagaaggccggcaagacaggccccatgaaaaccctgctggttagagtgatgacacccgatctgagagagcggctggaaaacctgagaaagaagcctgaaaatatcccccagcccatcagcaatacatctagagccaacctgaataagctgctgaccgattacaccgaaatgaagaaggcgatcctgcatgtgtactgggaagagttccagaaggaccctgtgggcctgatgagccgggtggcccagcctgccagcaagaagatcgatcagaacaagctgaaacctgagatggacgagaagggcaacctgaccaccgccggctttgcctgctctcagtgtggccagcccctgttcgtgtacaagctggagcaggtgtctgagaagggcaaggcttacaccaactacttcggacggtgcaatgtggccgagcacgaaaagctgatcctgctggcccagctgaagcccgagaaggatagcgacgaagccgtgacatatagcctgggaaagtttgggcagagggccctggatttctacagcattcatgtgaccaaggagtccacccaccccgtgaagcccctggcccagatcgccggaaacagatacgcctccggacctgtgggaaaggccctgagcgacgcatgtatgggcacaatcgcctccttcctgtctaagtaccaggacatcatcatcgaacaccagaaggtggtgaagggcaaccagaagagactggagagcctgcgggagctggccggcaaggaaaacctggaataccctagcgtgaccctgccacctcagcctcacaccaaggagggcgttgatgcctacaacgaagtgatcgcccgggtgcgaatgtgggtgaacctgaacctgtggcagaagctgaagctaagcagagatgatgccaagcctctgctgagactgaagggattcccttcctttcctctggtcgagagacaggccaacgaagtggactggtgggacatggtgtgtaacgtgaagaagctgatcaacgagaaaaaggaggatggcaaggtgttttggcagaatctggctggctacaagagacaggaagccctgagaccatacctgagcagcgaggaagatcggaagaagggaaagaaattcgctcggtaccagctgggcgacctgctgctgcacctggaaaagaagcacggcgaggactggggaaaggtgtacgacgaggcctgggagcggattgacaagaaagtggaaggcctgagcaagcacatcaagctggaagaggaacggagaagcgaggacgcccagagcaaggccgccctgaccgactggctgcgggctaaggccagcttcgtgatcgagggcctgaaggaggccgacaaggacgagttctgcagatgcgagctgaagctgcagaagtggtacggggacctgcggggaaagcccttcgccatcgaagccgagaacagcatcctggacatcagcggcttcagcaagcagtacaactgtgccttcatctggcagaaggacggcgtgaagaagctgaacctgtacctgatcatcaactacttcaagggcggcaagctgcggttcaagaagatcaaacctgaagccttcgaagccaacagattctacaccgtgatcaacaaaaagagcggcgagatcgtgcccatggaggtgaacttcaacttcgacgaccccaacctgatcatcctgcctctggcctttggcaagagacagggcagagaattcatctggaacgacctgctgtccctggaaaccggcagcctgaagctggccaacggaagagtgatcgagaagacactgtacaacagaagaacccggcaggatgagcctgccctgttcgtggccctgaccttcgagcggcgggaggtcctggactcctccaatatcaaaccaatgaacctgatcggcgtggcaagaggcgaaaacatccccgccgtgatcgccctgaccgaccccgagggctgcccactgagccggtttaaggatagcctgggaaacccaacccacatcctgagaatcggcgagagctataaggagaagcagcggaccatccaggccaagaaggaggtggagcagcggagagccggcggctacagccggaagtacgccagcaaagccaagaatctggcagacgatatggtgagaaacaccgctagagatctgctgtactacgccgtgacccaggatgccatgctgatcttcgccaacctgagccggggcttcggccggcagggcaagcggaccttcatggccgagagacagtacacacggatggaggactggctgaccgccaagctggcctacgagggcctgagcaagacctacctgtccaagacactggcccagtacacctccaagacatgcagcaactgtgggtttaccatcaccagcgccgactacgacagggtgctggagaagctgaagaagacagcaacaggctggatgaccacaattaacggcaaggagctgaaggtggagggccagattacctactacaacagatacaagagacagaacgtagtcaaggacctgtccgtcgagctggatagactgagcgaagaatctgtgaacaacgacatctcctcctggacaaagggcagaagcggagaagctctgagcctcctgaagaaaagattctcccatagacccgtgcaggagaagttcgtgtgcctgaactgcggcttcgagacacacgcagccgagcaagccgccctgaacatcgccagatcctggctgttcctgcggagccaggagtacaagaaataccagacaaacaagacaaccggcaacaccgataagagagccttcgtcgagacctggcagtccttttaccggaagaagcttaaggaggtgtggaaacctgccgtgcggtctggcggatctggcggaggctcctgtgcccgccctggtgaccttcagggacgtggccgtggacttcacccaggaggagtggaggcacctggagcccgcccagagggccctgcacagggacgtgatgctggagaacttccagaacctggtgagcgtgggcctgcccgtgagcaaggtggacgtgatcagcctgctggagaggggcgaggccccctggcagcccgagggcggcggcccccccgacccctgctacgactacctgaactggggatctggctccggcagcggccccaagaaaaagagaaaagtctaagctgccttctgcggggcttgccttctggccatgcccttcttctctcccttgcacctgtacctcttggtctttgaataaagcctgagtaggaaggctagcaaaaaaaaaaaaaaaaaaaaaaaaaaaaaaaaaaaaaaaaaaaaaaaaaaaaaaaaaaaaaaaaaaaaaaaaaaaaaaaa

SEQ ID NO: 16053 - RNA, 9485 nt, synthetic construct
  source 1..9485: mol_type = other RNA
aggaaataagagagaaaagaagagtaagaagaaatataagagccaccatggcccctaagaagaagcgtaaagtgagccggatggaacgcctcgtctacgaggtgcggcagaagtgcagaaacatcgaggacatctgcatctcctgcggatctctgaacgtgaccctggagcacccactgttcatcggcggcatgtgccagaactgtaaaaactgttttctggagtgtgcctatcaatacgacgatgacggctaccagagctactgcaccatctgttgcggcggaagagaggtgctgatgtgtggaaataacaactgctgccggtgcttctgcgtggaatgcgtggacctgctggtgggccccggcgccgcccaggccgctattaaggaagatccttggaactgctacatgtgcggccacaagggcacatacggcctgctgagacggagagaggactggcctagcagactgcagatgttcttcgccaataaccacgaccaggagttcgacccccctaaggtgtaccctcccgtccccgccgagaagagaaagcccatccgggtcctgagcctgttcgatggcatcgccaccggtctgctggtgctgaaggacctgggcatccaggtggataggtacattgcctccgaggtgtgcgaggactccatcaccgtgggaatggtgcgtcatcagggcaagatcatgtacgtgggcgacgtgcggagcgtgacacagaagcatatccaggagtggggccctttcgacctggtgatcggcggcagcccttgcaatgacctgagcatcgtgaacccagcccggaagggcctgtacgagggaaccggcagactgttcttcgagttttacagactgctgcacgacgcccggcctaaggaaggcgacgaccggcccttcttttggctgttcgagaatgtggtggccatgggagtcagcgacaagcgggatattagccggttcctggagagcaaccccgtgatgatcgatgccaaggaagtgagcgccgcccaccgggccagatacttctggggcaatctgcctggcatgaacagacccctggccagcaccgtgaacgacaagctggagctgcaggagtgcctggagcacggccggatcgccaagttcagcaaggtgagaaccatcaccacccgaagcaacagcatcaaacaaggcaaggaccagcactttcctgtgttcatgaacgagaaggaggacatcctgtggtgtaccgagatggagagagtgttcgggttcccagtccactacacagatgtcagcaacatgtctagactggccagacagagactgctgggaagaagctggtccgtccctgtgatcagacacctgttcgcccctctgaaggagtacttcgcctgcgtgagcagcggcaacagcaacgccaacagccggggccccagcttctctagcggcctggtgccactgtccctgagagggagccacatgggccccatggagatctacaaaaccgtgagcgcctggaagcggcagcctgtgcgcgtgctgagcctgtttcggaatatcgataaagtcctgaaaagcctgggattcctggagagcggctctggctccggcggtggcaccctgaagtacgtggaggatgtgacaaacgtggtcagacgggatgtggagaagtggggccccttcgatctggtgtacggcagcacccaacccctgggcagctcttgtgaccggtgccctggctggtacatgtttcagttccaccggatcctgcagtacgccctgccgagacaggagtcccagcggccattcttttggattttcatggacaacttgctgctgaccgaggatgaccaggaaactaccactcggttcctgcagaccgaagccgtgaccctgcaggacgtgagaggccgggactaccagaacgccatgcgggtgtggtccaacatccctggactgaaaagcaagcacgcacctctgacccctaaagaagaggagtacctgcaggcccaggtgcggagcagaagcaagctggacgcccctaaggtggatctgctggtgaagaattgcctcctgcccctgagagagtacttcaagtatttcagccagaatagtctgcccctgggaggcagcggcggcggcgccctggtgacatttgaggacgtcgccgtgcggttcacccaggaggaatgggctctgctggatccttctcagaaaatcctgtaccgggacgtgatgagagagacataccggaatctgacctccgtgggcatcaactgggaatgttgggaccttgaagcctgcttcagaagcctgggaagaaacctgagagtgcaggtggtgaagagaaagtgcgagctgaccaacagcggcccctgcgccgagggcggcccaagcagcggcgcccctcctcccagcggcggcagcccagccggctccccaacctctaccgaggagggcacctctgagtccgccacccccgagagcggccctggcacctccaccgagcccagcgagggcagcgcacccggcagccctgccggcagccccacctccacagaggagggaaccagcaccgagcccagcgaaggcagcgccccaggcaccagcaccgagcctagtgagcaggagattaaacggatcaacaagatcagaagaagacttgtgaaagacagcaacaccaagaaggccggcaagacaggccccatgaaaaccctgctggttagagtgatgacacccgatctgagagagcggctggaaaacctgagaaagaagcctgaaaatatcccccagcccatcagcaatacatctagagccaacctgaataagctgctgaccgattacaccgaaatgaagaaggcgatcctgcatgtgtactgggaagagttccagaaggaccctgtgggcctgatgagccgggtggcccagcctgccagcaagaagatcgatcagaacaagctgaaacctgagatggacgagaagggcaacctgaccaccgccggctttgcctgctctcagtgtggccagcccctgttcgtgtacaagctggagcaggtgtctgagaagggcaaggcttacaccaactacttcggacggtgcaatgtggccgagcacgaaaagctgatcctgctggcccagctgaagcccgagaaggatagcgacgaagccgtgacatatagcctgggaaagtttgggcagagggccctggatttctacagcattcatgtgaccaaggagtccacccaccccgtgaagcccctggcccagatcgccggaaacagatacgcctccggacctgtgggaaaggccctgagcgacgcatgtatgggcacaatcgcctccttcctgtctaagtaccaggacatcatcatcgaacaccagaaggtggtgaagggcaaccagaagagactggagagcctgcgggagctggccggcaaggaaaacctggaataccctagcgtgaccctgccacctcagcctcacaccaaggagggcgttgatgcctacaacgaagtgatcgcccgggtgcgaatgtgggtgaacctgaacctgtggcagaagctgaagctaagcagagatgatgccaagcctctgctgagactgaagggattcccttcctttcctctggtcgagagacaggccaacgaagtggactggtgggacatggtgtgtaacgtgaagaagctgatcaacgagaaaaaggaggatggcaaggtgttttggcagaatctggctggctacaagagacaggaagccctgagaccatacctgagcagcgaggaagatcggaagaagggaaagaaattcgctcggtaccagctgggcgacctgctgctgcacctggaaaagaagcacggcgaggactggggaaaggtgtacgacgaggcctgggagcggattgacaagaaagtggaaggcctgagcaagcacatcaagctggaagaggaacggagaagcgaggacgcccagagcaaggccgccctgaccgactggctgcgggctaaggccagcttcgtgatcgagggcctgaaggaggccgacaaggacgagttctgcagatgcgagctgaagctgcagaagtggtacggggacctgcggggaaagcccttcgccatcgaagccgagaacagcatcctggacatcagcggcttcagcaagcagtacaactgtgccttcatctggcagaaggacggcgtgaagaagctgaacctgtacctgatcatcaactacttcaagggcggcaagctgcggttcaagaagatcaaacctgaagccttcgaagccaacagattctacaccgtgatcaacaaaaagagcggcgagatcgtgcccatggaggtgaacttcaacttcgacgaccccaacctgatcatcctgcctctggcctttggcaagagacagggcagagaattcatctggaacgacctgctgtccctggaaaccggcagcctgaagctggccaacggaagagtgatcgagaagacactgtacaacagaagaacccggcaggatgagcctgccctgttcgtggccctgaccttcgagcggcgggaggtcctggactcctccaatatcaaaccaatgaacctgatcggcgtggcaagaggcgaaaacatccccgccgtgatcgccctgaccgaccccgagggctgcccactgagccggtttaaggatagcctgggaaacccaacccacatcctgagaatcggcgagagctataaggagaagcagcggaccatccaggccaagaaggaggtggagcagcggagagccggcggctacagccggaagtacgccagcaaagccaagaatctggcagacgatatggtgagaaacaccgctagagatctgctgtactacgccgtgacccaggatgccatgctgatcttcgccaacctgagccggggcttcggccggcagggcaagcggaccttcatggccgagagacagtacacacggatggaggactggctgaccgccaagctggcctacgagggcctgagcaagacctacctgtccaagacactggcccagtacacctccaagacatgcagcaactgtgggtttaccatcaccagcgccgactacgacagggtgctggagaagctgaagaagacagcaacaggctggatgaccacaattaacggcaaggagctgaaggtggagggccagattacctactacaacagatacaagagacagaacgtagtcaaggacctgtccgtcgagctggatagactgagcgaagaatctgtgaacaacgacatctcctcctggacaaagggcagaagcggagaagctctgagcctcctgaagaaaagattctcccatagacccgtgcaggagaagttcgtgtgcctgaactgcggcttcgagacacacgcagccgagcaagccgccctgaacatcgccagatcctggctgttcctgcggagccaggagtacaagaaataccagacaaacaagacaaccggcaacaccgataagagagccttcgtcgagacctggcagtccttttaccggaagaagcttaaggaggtgtggaaacctgccgtgcggtctggcggatctggcggaggctccgcccaggagagcctgaccttcgacgacgtggccgtggagttcacctgggaggagtggcagctgctggcccccgcccagaaggacctgtacagggacgtgatgctggagaactacagcaacctggtgagcgtgggctaccaggccagcaagcccgacgccctgagcaagctggtgcagggcgagcccccctggaccatggaggacgagatccactgcaggacccacagcgagatctgggaggtgggcggcccaagcagcggcgcccctcctcccagcggcggcagcccagccggctccccaacctctaccgaggagggcacctctgagtccgccacccccgagagcggccctggcacctccaccgagcccagcgagggcagcgcacccggcagccctgccggcagccccacctccacagaggagggaaccagcaccgagcccagcgaaggcagcgccccaggcaccagcaccgagcctagtgagcaggagattaaacggatcaacaagatcagaagaagacttgtgaaagacagcaacaccaagaaggccggcaagacaggccccatgaaaaccctgctggttagagtgatgacacccgatctgagagagcggctggaaaacctgagaaagaagcctgaaaatatcccccagcccatcagcaatacatctagagccaacctgaataagctgctgaccgattacaccgaaatgaagaaggcgatcctgcatgtgtactgggaagagttccagaaggaccctgtgggcctgatgagccgggtggcccagcctgccagcaagaagatcgatcagaacaagctgaaacctgagatggacgagaagggcaacctgaccaccgccggctttgcctgctctcagtgtggccagcccctgttcgtgtacaagctggagcaggtgtctgagaagggcaaggcttacaccaactacttcggacggtgcaatgtggccgagcacgaaaagctgatcctgctggcccagctgaagcccgagaaggatagcgacgaagccgtgacatatagcctgggaaagtttgggcagagggccctggatttctacagcattcatgtgaccaaggagtccacccaccccgtgaagcccctggcccagatcgccggaaacagatacgcctccggacctgtgggaaaggccctgagcgacgcatgtatgggcacaatcgcctccttcctgtctaagtaccaggacatcatcatcgaacaccagaaggtggtgaagggcaaccagaagagactggagagcctgcgggagctggccggcaaggaaaacctggaataccctagcgtgaccctgccacctcagcctcacaccaaggagggcgttgatgcctacaacgaagtgatcgcccgggtgcgaatgtgggtgaacctgaacctgtggcagaagctgaagctaagcagagatgatgccaagcctctgctgagactgaagggattcccttcctttcctctggtcgagagacaggccaacgaagtggactggtgggacatggtgtgtaacgtgaagaagctgatcaacgagaaaaaggaggatggcaaggtgttttggcagaatctggctggctacaagagacaggaagccctgagaccatacctgagcagcgaggaagatcggaagaagggaaagaaattcgctcggtaccagctgggcgacctgctgctgcacctggaaaagaagcacggcgaggactggggaaaggtgtacgacgaggcctgggagcggattgacaagaaagtggaaggcctgagcaagcacatcaagctggaagaggaacggagaagcgaggacgcccagagcaaggccgccctgaccgactggctgcgggctaaggccagcttcgtgatcgagggcctgaaggaggccgacaaggacgagttctgcagatgcgagctgaagctgcagaagtggtacggggacctgcggggaaagcccttcgccatcgaagccgagaacagcatcctggacatcagcggcttcagcaagcagtacaactgtgccttcatctggcagaaggacggcgtgaagaagctgaacctgtacctgatcatcaactacttcaagggcggcaagctgcggttcaagaagatcaaacctgaagccttcgaagccaacagattctacaccgtgatcaacaaaaagagcggcgagatcgtgcccatggaggtgaacttcaacttcgacgaccccaacctgatcatcctgcctctggcctttggcaagagacagggcagagaattcatctggaacgacctgctgtccctggaaaccggcagcctgaagctggccaacggaagagtgatcgagaagacactgtacaacagaagaacccggcaggatgagcctgccctgttcgtggccctgaccttcgagcggcgggaggtcctggactcctccaatatcaaaccaatgaacctgatcggcgtggcaagaggcgaaaacatccccgccgtgatcgccctgaccgaccccgagggctgcccactgagccggtttaaggatagcctgggaaacccaacccacatcctgagaatcggcgagagctataaggagaagcagcggaccatccaggccaagaaggaggtggagcagcggagagccggcggctacagccggaagtacgccagcaaagccaagaatctggcagacgatatggtgagaaacaccgctagagatctgctgtactacgccgtgacccaggatgccatgctgatcttcgccaacctgagccggggcttcggccggcagggcaagcggaccttcatggccgagagacagtacacacggatggaggactggctgaccgccaagctggcctacgagggcctgagcaagacctacctgtccaagacactggcccagtacacctccaagacatgcagcaactgtgggtttaccatcaccagcgccgactacgacagggtgctggagaagctgaagaagacagcaacaggctggatgaccacaattaacggcaaggagctgaaggtggagggccagattacctactacaacagatacaagagacagaacgtagtcaaggacctgtccgtcgagctggatagactgagcgaagaatctgtgaacaacgacatctcctcctggacaaagggcagaagcggagaagctctgagcctcctgaagaaaagattctcccatagacccgtgcaggagaagttcgtgtgcctgaactgcggcttcgagacacacgcagccgagcaagccgccctgaacatcgccagatcctggctgttcctgcggagccaggagtacaagaaataccagacaaacaagacaaccggcaacaccgataagagagccttcgtcgagacctggcagtccttttaccggaagaagcttaaggaggtgtggaaacctgccgtgcggtctggcggatctggcggaggctcctgcccaggagagcctgaccttcgacgacgtggccgtggagttcacctgggaggagtggcagctgctggcccccgcccagaaggacctgtacagggacgtgatgctggagaactacagcaacctggtgagcgtgggctaccaggccagcaagcccgacgccctgagcaagctggtgcagggcgagcccccctggaccatggaggacgagatccactgcaggacccacagcgagatctgggaggtgggatctggctccggcagcggccccaagaaaaagagaaaagtctaagctgccttctgcggggcttgccttctggccatgcccttcttctctcccttgcacctgtacctcttggtctttgaataaagcctgagtaggaaggctagcaaaaaaaaaaaaaaaaaaaaaaaaaaaaaaaaaaaaaaaaaaaaaaaaaaaaaaaaaaaaaaaaaaaaaaaaaaaaaaaa

SEQ ID NO: 16054 - RNA, 9485 nt, synthetic construct
  source 1..9485: mol_type = other RNA
aggaaataagagagaaaagaagagtaagaagaaatataagagccaccatggcccctaagaagaagcgtaaagtgagccggatggaacgcctcgtctacgaggtgcggcagaagtgcagaaacatcgaggacatctgcatctcctgcggatctctgaacgtgaccctggagcacccactgttcatcggcggcatgtgccagaactgtaaaaactgttttctggagtgtgcctatcaatacgacgatgacggctaccagagctactgcaccatctgttgcggcggaagagaggtgctgatgtgtggaaataacaactgctgccggtgcttctgcgtggaatgcgtggacctgctggtgggccccggcgccgcccaggccgctattaaggaagatccttggaactgctacatgtgcggccacaagggcacatacggcctgctgagacggagagaggactggcctagcagactgcagatgttcttcgccaataaccacgaccaggagttcgacccccctaaggtgtaccctcccgtccccgccgagaagagaaagcccatccgggtcctgagcctgttcgatggcatcgccaccggtctgctggtgctgaaggacctgggcatccaggtggataggtacattgcctccgaggtgtgcgaggactccatcaccgtgggaatggtgcgtcatcagggcaagatcatgtacgtgggcgacgtgcggagcgtgacacagaagcatatccaggagtggggccctttcgacctggtgatcggcggcagcccttgcaatgacctgagcatcgtgaacccagcccggaagggcctgtacgagggaaccggcagactgttcttcgagttttacagactgctgcacgacgcccggcctaaggaaggcgacgaccggcccttcttttggctgttcgagaatgtggtggccatgggagtcagcgacaagcgggatattagccggttcctggagagcaaccccgtgatgatcgatgccaaggaagtgagcgccgcccaccgggccagatacttctggggcaatctgcctggcatgaacagacccctggccagcaccgtgaacgacaagctggagctgcaggagtgcctggagcacggccggatcgccaagttcagcaaggtgagaaccatcaccacccgaagcaacagcatcaaacaaggcaaggaccagcactttcctgtgttcatgaacgagaaggaggacatcctgtggtgtaccgagatggagagagtgttcgggttcccagtccactacacagatgtcagcaacatgtctagactggccagacagagactgctgggaagaagctggtccgtccctgtgatcagacacctgttcgcccctctgaaggagtacttcgcctgcgtgagcagcggcaacagcaacgccaacagccggggccccagcttctctagcggcctggtgccactgtccctgagagggagccacatgggccccatggagatctacaaaaccgtgagcgcctggaagcggcagcctgtgcgcgtgctgagcctgtttcggaatatcgataaagtcctgaaaagcctgggattcctggagagcggctctggctccggcggtggcaccctgaagtacgtggaggatgtgacaaacgtggtcagacgggatgtggagaagtggggccccttcgatctggtgtacggcagcacccaacccctgggcagctcttgtgaccggtgccctggctggtacatgtttcagttccaccggatcctgcagtacgccctgccgagacaggagtcccagcggccattcttttggattttcatggacaacttgctgctgaccgaggatgaccaggaaactaccactcggttcctgcagaccgaagccgtgaccctgcaggacgtgagaggccgggactaccagaacgccatgcgggtgtggtccaacatccctggactgaaaagcaagcacgcacctctgacccctaaagaagaggagtacctgcaggcccaggtgcggagcagaagcaagctggacgcccctaaggtggatctgctggtgaagaattgcctcctgcccctgagagagtacttcaagtatttcagccagaatagtctgcccctgggaggcagcggcggcggcgccctggtgacatttgaggacgtcgccgtgcggttcacccaggaggaatgggctctgctggatccttctcagaaaatcctgtaccgggacgtgatgagagagacataccggaatctgacctccgtgggcatcaactgggaatgttgggaccttgaagcctgcttcagaagcctgggaagaaacctgagagtgcaggtggtgaagagaaagtgcgagctgaccaacagcggcccctgcgccgagggcggcccaagcagcggcgcccctcctcccagcggcggcagcccagccggctccccaacctctaccgaggagggcacctctgagtccgccacccccgagagcggccctggcacctccaccgagcccagcgagggcagcgcacccggcagccctgccggcagccccacctccacagaggagggaaccagcaccgagcccagcgaaggcagcgccccaggcaccagcaccgagcctagtgagcaggagattaaacggatcaacaagatcagaagaagacttgtgaaagacagcaacaccaagaaggccggcaagacaggccccatgaaaaccctgctggttagagtgatgacacccgatctgagagagcggctggaaaacctgagaaagaagcctgaaaatatcccccagcccatcagcaatacatctagagccaacctgaataagctgctgaccgattacaccgaaatgaagaaggcgatcctgcatgtgtactgggaagagttccagaaggaccctgtgggcctgatgagccgggtggcccagcctgccagcaagaagatcgatcagaacaagctgaaacctgagatggacgagaagggcaacctgaccaccgccggctttgcctgctctcagtgtggccagcccctgttcgtgtacaagctggagcaggtgtctgagaagggcaaggcttacaccaactacttcggacggtgcaatgtggccgagcacgaaaagctgatcctgctggcccagctgaagcccgagaaggatagcgacgaagccgtgacatatagcctgggaaagtttgggcagagggccctggatttctacagcattcatgtgaccaaggagtccacccaccccgtgaagcccctggcccagatcgccggaaacagatacgcctccggacctgtgggaaaggccctgagcgacgcatgtatgggcacaatcgcctccttcctgtctaagtaccaggacatcatcatcgaacaccagaaggtggtgaagggcaaccagaagagactggagagcctgcgggagctggccggcaaggaaaacctggaataccctagcgtgaccctgccacctcagcctcacaccaaggagggcgttgatgcctacaacgaagtgatcgcccgggtgcgaatgtgggtgaacctgaacctgtggcagaagctgaagctaagcagagatgatgccaagcctctgctgagactgaagggattcccttcctttcctctggtcgagagacaggccaacgaagtggactggtgggacatggtgtgtaacgtgaagaagctgatcaacgagaaaaaggaggatggcaaggtgttttggcagaatctggctggctacaagagacaggaagccctgagaccatacctgagcagcgaggaagatcggaagaagggaaagaaattcgctcggtaccagctgggcgacctgctgctgcacctggaaaagaagcacggcgaggactggggaaaggtgtacgacgaggcctgggagcggattgacaagaaagtggaaggcctgagcaagcacatcaagctggaagaggaacggagaagcgaggacgcccagagcaaggccgccctgaccgactggctgcgggctaaggccagcttcgtgatcgagggcctgaaggaggccgacaaggacgagttctgcagatgcgagctgaagctgcagaagtggtacggggacctgcggggaaagcccttcgccatcgaagccgagaacagcatcctggacatcagcggcttcagcaagcagtacaactgtgccttcatctggcagaaggacggcgtgaagaagctgaacctgtacctgatcatcaactacttcaagggcggcaagctgcggttcaagaagatcaaacctgaagccttcgaagccaacagattctacaccgtgatcaacaaaaagagcggcgagatcgtgcccatggaggtgaacttcaacttcgacgaccccaacctgatcatcctgcctctggcctttggcaagagacagggcagagaattcatctggaacgacctgctgtccctggaaaccggcagcctgaagctggccaacggaagagtgatcgagaagacactgtacaacagaagaacccggcaggatgagcctgccctgttcgtggccctgaccttcgagcggcgggaggtcctggactcctccaatatcaaaccaatgaacctgatcggcgtggcaagaggcgaaaacatccccgccgtgatcgccctgaccgaccccgagggctgcccactgagccggtttaaggatagcctgggaaacccaacccacatcctgagaatcggcgagagctataaggagaagcagcggaccatccaggccaagaaggaggtggagcagcggagagccggcggctacagccggaagtacgccagcaaagccaagaatctggcagacgatatggtgagaaacaccgctagagatctgctgtactacgccgtgacccaggatgccatgctgatcttcgccaacctgagccggggcttcggccggcagggcaagcggaccttcatggccgagagacagtacacacggatggaggactggctgaccgccaagctggcctacgagggcctgagcaagacctacctgtccaagacactggcccagtacacctccaagacatgcagcaactgtgggtttaccatcaccagcgccgactacgacagggtgctggagaagctgaagaagacagcaacaggctggatgaccacaattaacggcaaggagctgaaggtggagggccagattacctactacaacagatacaagagacagaacgtagtcaaggacctgtccgtcgagctggatagactgagcgaagaatctgtgaacaacgacatctcctcctggacaaagggcagaagcggagaagctctgagcctcctgaagaaaagattctcccatagacccgtgcaggagaagttcgtgtgcctgaactgcggcttcgagacacacgcagccgagcaagccgccctgaacatcgccagatcctggctgttcctgcggagccaggagtacaagaaataccagacaaacaagacaaccggcaacaccgataagagagccttcgtcgagacctggcagtccttttaccggaagaagcttaaggaggtgtggaaacctgccgtgcggtctggcggatctggcggaggctccttccaggagagcgtgaccttcaaggacgtgaccgtgaacttcacccaggaggagtgggagcagctgaaccccgcccagagggagctgtacagggacgtgatgctggagaactacaggaacctgatcagcctgggcctgcccatcagcaagcccgacgtgatcttccagctggagcagggccaggagccctggatgctggacgtgcagggcaccgagaggcaggccgtgcccaggagcaccagcggcggcccaagcagcggcgcccctcctcccagcggcggcagcccagccggctccccaacctctaccgaggagggcacctctgagtccgccacccccgagagcggccctggcacctccaccgagcccagcgagggcagcgcacccggcagccctgccggcagccccacctccacagaggagggaaccagcaccgagcccagcgaaggcagcgccccaggcaccagcaccgagcctagtgagcaggagattaaacggatcaacaagatcagaagaagacttgtgaaagacagcaacaccaagaaggccggcaagacaggccccatgaaaaccctgctggttagagtgatgacacccgatctgagagagcggctggaaaacctgagaaagaagcctgaaaatatcccccagcccatcagcaatacatctagagccaacctgaataagctgctgaccgattacaccgaaatgaagaaggcgatcctgcatgtgtactgggaagagttccagaaggaccctgtgggcctgatgagccgggtggcccagcctgccagcaagaagatcgatcagaacaagctgaaacctgagatggacgagaagggcaacctgaccaccgccggctttgcctgctctcagtgtggccagcccctgttcgtgtacaagctggagcaggtgtctgagaagggcaaggcttacaccaactacttcggacggtgcaatgtggccgagcacgaaaagctgatcctgctggcccagctgaagcccgagaaggatagcgacgaagccgtgacatatagcctgggaaagtttgggcagagggccctggatttctacagcattcatgtgaccaaggagtccacccaccccgtgaagcccctggcccagatcgccggaaacagatacgcctccggacctgtgggaaaggccctgagcgacgcatgtatgggcacaatcgcctccttcctgtctaagtaccaggacatcatcatcgaacaccagaaggtggtgaagggcaaccagaagagactggagagcctgcgggagctggccggcaaggaaaacctggaataccctagcgtgaccctgccacctcagcctcacaccaaggagggcgttgatgcctacaacgaagtgatcgcccgggtgcgaatgtgggtgaacctgaacctgtggcagaagctgaagctaagcagagatgatgccaagcctctgctgagactgaagggattcccttcctttcctctggtcgagagacaggccaacgaagtggactggtgggacatggtgtgtaacgtgaagaagctgatcaacgagaaaaaggaggatggcaaggtgttttggcagaatctggctggctacaagagacaggaagccctgagaccatacctgagcagcgaggaagatcggaagaagggaaagaaattcgctcggtaccagctgggcgacctgctgctgcacctggaaaagaagcacggcgaggactggggaaaggtgtacgacgaggcctgggagcggattgacaagaaagtggaaggcctgagcaagcacatcaagctggaagaggaacggagaagcgaggacgcccagagcaaggccgccctgaccgactggctgcgggctaaggccagcttcgtgatcgagggcctgaaggaggccgacaaggacgagttctgcagatgcgagctgaagctgcagaagtggtacggggacctgcggggaaagcccttcgccatcgaagccgagaacagcatcctggacatcagcggcttcagcaagcagtacaactgtgccttcatctggcagaaggacggcgtgaagaagctgaacctgtacctgatcatcaactacttcaagggcggcaagctgcggttcaagaagatcaaacctgaagccttcgaagccaacagattctacaccgtgatcaacaaaaagagcggcgagatcgtgcccatggaggtgaacttcaacttcgacgaccccaacctgatcatcctgcctctggcctttggcaagagacagggcagagaattcatctggaacgacctgctgtccctggaaaccggcagcctgaagctggccaacggaagagtgatcgagaagacactgtacaacagaagaacccggcaggatgagcctgccctgttcgtggccctgaccttcgagcggcgggaggtcctggactcctccaatatcaaaccaatgaacctgatcggcgtggcaagaggcgaaaacatccccgccgtgatcgccctgaccgaccccgagggctgcccactgagccggtttaaggatagcctgggaaacccaacccacatcctgagaatcggcgagagctataaggagaagcagcggaccatccaggccaagaaggaggtggagcagcggagagccggcggctacagccggaagtacgccagcaaagccaagaatctggcagacgatatggtgagaaacaccgctagagatctgctgtactacgccgtgacccaggatgccatgctgatcttcgccaacctgagccggggcttcggccggcagggcaagcggaccttcatggccgagagacagtacacacggatggaggactggctgaccgccaagctggcctacgagggcctgagcaagacctacctgtccaagacactggcccagtacacctccaagacatgcagcaactgtgggtttaccatcaccagcgccgactacgacagggtgctggagaagctgaagaagacagcaacaggctggatgaccacaattaacggcaaggagctgaaggtggagggccagattacctactacaacagatacaagagacagaacgtagtcaaggacctgtccgtcgagctggatagactgagcgaagaatctgtgaacaacgacatctcctcctggacaaagggcagaagcggagaagctctgagcctcctgaagaaaagattctcccatagacccgtgcaggagaagttcgtgtgcctgaactgcggcttcgagacacacgcagccgagcaagccgccctgaacatcgccagatcctggctgttcctgcggagccaggagtacaagaaataccagacaaacaagacaaccggcaacaccgataagagagccttcgtcgagacctggcagtccttttaccggaagaagcttaaggaggtgtggaaacctgccgtgcggtctggcggatctggcggaggctcctttccaggagagcgtgaccttcaaggacgtgaccgtgaacttcacccaggaggagtgggagcagctgaaccccgcccagagggagctgtacagggacgtgatgctggagaactacaggaacctgatcagcctgggcctgcccatcagcaagcccgacgtgatcttccagctggagcagggccaggagccctggatgctggacgtgcagggcaccgagaggcaggccgtgcccaggagcaccagcggatctggctccggcagcggccccaagaaaaagagaaaagtctaagctgccttctgcggggcttgccttctggccatgcccttcttctctcccttgcacctgtacctcttggtctttgaataaagcctgagtaggaaggctagcaaaaaaaaaaaaaaaaaaaaaaaaaaaaaaaaaaaaaaaaaaaaaaaaaaaaaaaaaaaaaaaaaaaaaaaaaaaaaaaa

SEQ ID NO: 16055 - RNA, 9485 nt, synthetic construct
  source 1..9485: mol_type = other RNA
aggaaataagagagaaaagaagagtaagaagaaatataagagccaccatggcccctaagaagaagcgtaaagtgagccggatggaacgcctcgtctacgaggtgcggcagaagtgcagaaacatcgaggacatctgcatctcctgcggatctctgaacgtgaccctggagcacccactgttcatcggcggcatgtgccagaactgtaaaaactgttttctggagtgtgcctatcaatacgacgatgacggctaccagagctactgcaccatctgttgcggcggaagagaggtgctgatgtgtggaaataacaactgctgccggtgcttctgcgtggaatgcgtggacctgctggtgggccccggcgccgcccaggccgctattaaggaagatccttggaactgctacatgtgcggccacaagggcacatacggcctgctgagacggagagaggactggcctagcagactgcagatgttcttcgccaataaccacgaccaggagttcgacccccctaaggtgtaccctcccgtccccgccgagaagagaaagcccatccgggtcctgagcctgttcgatggcatcgccaccggtctgctggtgctgaaggacctgggcatccaggtggataggtacattgcctccgaggtgtgcgaggactccatcaccgtgggaatggtgcgtcatcagggcaagatcatgtacgtgggcgacgtgcggagcgtgacacagaagcatatccaggagtggggccctttcgacctggtgatcggcggcagcccttgcaatgacctgagcatcgtgaacccagcccggaagggcctgtacgagggaaccggcagactgttcttcgagttttacagactgctgcacgacgcccggcctaaggaaggcgacgaccggcccttcttttggctgttcgagaatgtggtggccatgggagtcagcgacaagcgggatattagccggttcctggagagcaaccccgtgatgatcgatgccaaggaagtgagcgccgcccaccgggccagatacttctggggcaatctgcctggcatgaacagacccctggccagcaccgtgaacgacaagctggagctgcaggagtgcctggagcacggccggatcgccaagttcagcaaggtgagaaccatcaccacccgaagcaacagcatcaaacaaggcaaggaccagcactttcctgtgttcatgaacgagaaggaggacatcctgtggtgtaccgagatggagagagtgttcgggttcccagtccactacacagatgtcagcaacatgtctagactggccagacagagactgctgggaagaagctggtccgtccctgtgatcagacacctgttcgcccctctgaaggagtacttcgcctgcgtgagcagcggcaacagcaacgccaacagccggggccccagcttctctagcggcctggtgccactgtccctgagagggagccacatgggccccatggagatctacaaaaccgtgagcgcctggaagcggcagcctgtgcgcgtgctgagcctgtttcggaatatcgataaagtcctgaaaagcctgggattcctggagagcggctctggctccggcggtggcaccctgaagtacgtggaggatgtgacaaacgtggtcagacgggatgtggagaagtggggccccttcgatctggtgtacggcagcacccaacccctgggcagctcttgtgaccggtgccctggctggtacatgtttcagttccaccggatcctgcagtacgccctgccgagacaggagtcccagcggccattcttttggattttcatggacaacttgctgctgaccgaggatgaccaggaaactaccactcggttcctgcagaccgaagccgtgaccctgcaggacgtgagaggccgggactaccagaacgccatgcgggtgtggtccaacatccctggactgaaaagcaagcacgcacctctgacccctaaagaagaggagtacctgcaggcccaggtgcggagcagaagcaagctggacgcccctaaggtggatctgctggtgaagaattgcctcctgcccctgagagagtacttcaagtatttcagccagaatagtctgcccctgggaggcagcggcggcggcgccctggtgacatttgaggacgtcgccgtgcggttcacccaggaggaatgggctctgctggatccttctcagaaaatcctgtaccgggacgtgatgagagagacataccggaatctgacctccgtgggcatcaactgggaatgttgggaccttgaagcctgcttcagaagcctgggaagaaacctgagagtgcaggtggtgaagagaaagtgcgagctgaccaacagcggcccctgcgccgagggcggcccaagcagcggcgcccctcctcccagcggcggcagcccagccggctccccaacctctaccgaggagggcacctctgagtccgccacccccgagagcggccctggcacctccaccgagcccagcgagggcagcgcacccggcagccctgccggcagccccacctccacagaggagggaaccagcaccgagcccagcgaaggcagcgccccaggcaccagcaccgagcctagtgagcaggagattaaacggatcaacaagatcagaagaagacttgtgaaagacagcaacaccaagaaggccggcaagacaggccccatgaaaaccctgctggttagagtgatgacacccgatctgagagagcggctggaaaacctgagaaagaagcctgaaaatatcccccagcccatcagcaatacatctagagccaacctgaataagctgctgaccgattacaccgaaatgaagaaggcgatcctgcatgtgtactgggaagagttccagaaggaccctgtgggcctgatgagccgggtggcccagcctgccagcaagaagatcgatcagaacaagctgaaacctgagatggacgagaagggcaacctgaccaccgccggctttgcctgctctcagtgtggccagcccctgttcgtgtacaagctggagcaggtgtctgagaagggcaaggcttacaccaactacttcggacggtgcaatgtggccgagcacgaaaagctgatcctgctggcccagctgaagcccgagaaggatagcgacgaagccgtgacatatagcctgggaaagtttgggcagagggccctggatttctacagcattcatgtgaccaaggagtccacccaccccgtgaagcccctggcccagatcgccggaaacagatacgcctccggacctgtgggaaaggccctgagcgacgcatgtatgggcacaatcgcctccttcctgtctaagtaccaggacatcatcatcgaacaccagaaggtggtgaagggcaaccagaagagactggagagcctgcgggagctggccggcaaggaaaacctggaataccctagcgtgaccctgccacctcagcctcacaccaaggagggcgttgatgcctacaacgaagtgatcgcccgggtgcgaatgtgggtgaacctgaacctgtggcagaagctgaagctaagcagagatgatgccaagcctctgctgagactgaagggattcccttcctttcctctggtcgagagacaggccaacgaagtggactggtgggacatggtgtgtaacgtgaagaagctgatcaacgagaaaaaggaggatggcaaggtgttttggcagaatctggctggctacaagagacaggaagccctgagaccatacctgagcagcgaggaagatcggaagaagggaaagaaattcgctcggtaccagctgggcgacctgctgctgcacctggaaaagaagcacggcgaggactggggaaaggtgtacgacgaggcctgggagcggattgacaagaaagtggaaggcctgagcaagcacatcaagctggaagaggaacggagaagcgaggacgcccagagcaaggccgccctgaccgactggctgcgggctaaggccagcttcgtgatcgagggcctgaaggaggccgacaaggacgagttctgcagatgcgagctgaagctgcagaagtggtacggggacctgcggggaaagcccttcgccatcgaagccgagaacagcatcctggacatcagcggcttcagcaagcagtacaactgtgccttcatctggcagaaggacggcgtgaagaagctgaacctgtacctgatcatcaactacttcaagggcggcaagctgcggttcaagaagatcaaacctgaagccttcgaagccaacagattctacaccgtgatcaacaaaaagagcggcgagatcgtgcccatggaggtgaacttcaacttcgacgaccccaacctgatcatcctgcctctggcctttggcaagagacagggcagagaattcatctggaacgacctgctgtccctggaaaccggcagcctgaagctggccaacggaagagtgatcgagaagacactgtacaacagaagaacccggcaggatgagcctgccctgttcgtggccctgaccttcgagcggcgggaggtcctggactcctccaatatcaaaccaatgaacctgatcggcgtggcaagaggcgaaaacatccccgccgtgatcgccctgaccgaccccgagggctgcccactgagccggtttaaggatagcctgggaaacccaacccacatcctgagaatcggcgagagctataaggagaagcagcggaccatccaggccaagaaggaggtggagcagcggagagccggcggctacagccggaagtacgccagcaaagccaagaatctggcagacgatatggtgagaaacaccgctagagatctgctgtactacgccgtgacccaggatgccatgctgatcttcgccaacctgagccggggcttcggccggcagggcaagcggaccttcatggccgagagacagtacacacggatggaggactggctgaccgccaagctggcctacgagggcctgagcaagacctacctgtccaagacactggcccagtacacctccaagacatgcagcaactgtgggtttaccatcaccagcgccgactacgacagggtgctggagaagctgaagaagacagcaacaggctggatgaccacaattaacggcaaggagctgaaggtggagggccagattacctactacaacagatacaagagacagaacgtagtcaaggacctgtccgtcgagctggatagactgagcgaagaatctgtgaacaacgacatctcctcctggacaaagggcagaagcggagaagctctgagcctcctgaagaaaagattctcccatagacccgtgcaggagaagttcgtgtgcctgaactgcggcttcgagacacacgcagccgagcaagccgccctgaacatcgccagatcctggctgttcctgcggagccaggagtacaagaaataccagacaaacaagacaaccggcaacaccgataagagagccttcgtcgagacctggcagtccttttaccggaagaagcttaaggaggtgtggaaacctgccgtgcggtctggcggatctggcggaggctccgtggccttcgaggacgtggccgtgtacttcaccgccgaggagtgggacctgctgggccccaaccagaagagcctgtacagcgaggtgatgatggagaactacgagaacgtgagctacctggccgacaactggaagaagaccatcgccttcgcccacagccagaaggacttcatccacaagctgcaccagaggacccacaaggaggacgagcaccacaccagggccgagccctgcgagagcaccggcggcccaagcagcggcgcccctcctcccagcggcggcagcccagccggctccccaacctctaccgaggagggcacctctgagtccgccacccccgagagcggccctggcacctccaccgagcccagcgagggcagcgcacccggcagccctgccggcagccccacctccacagaggagggaaccagcaccgagcccagcgaaggcagcgccccaggcaccagcaccgagcctagtgagcaggagattaaacggatcaacaagatcagaagaagacttgtgaaagacagcaacaccaagaaggccggcaagacaggccccatgaaaaccctgctggttagagtgatgacacccgatctgagagagcggctggaaaacctgagaaagaagcctgaaaatatcccccagcccatcagcaatacatctagagccaacctgaataagctgctgaccgattacaccgaaatgaagaaggcgatcctgcatgtgtactgggaagagttccagaaggaccctgtgggcctgatgagccgggtggcccagcctgccagcaagaagatcgatcagaacaagctgaaacctgagatggacgagaagggcaacctgaccaccgccggctttgcctgctctcagtgtggccagcccctgttcgtgtacaagctggagcaggtgtctgagaagggcaaggcttacaccaactacttcggacggtgcaatgtggccgagcacgaaaagctgatcctgctggcccagctgaagcccgagaaggatagcgacgaagccgtgacatatagcctgggaaagtttgggcagagggccctggatttctacagcattcatgtgaccaaggagtccacccaccccgtgaagcccctggcccagatcgccggaaacagatacgcctccggacctgtgggaaaggccctgagcgacgcatgtatgggcacaatcgcctccttcctgtctaagtaccaggacatcatcatcgaacaccagaaggtggtgaagggcaaccagaagagactggagagcctgcgggagctggccggcaaggaaaacctggaataccctagcgtgaccctgccacctcagcctcacaccaaggagggcgttgatgcctacaacgaagtgatcgcccgggtgcgaatgtgggtgaacctgaacctgtggcagaagctgaagctaagcagagatgatgccaagcctctgctgagactgaagggattcccttcctttcctctggtcgagagacaggccaacgaagtggactggtgggacatggtgtgtaacgtgaagaagctgatcaacgagaaaaaggaggatggcaaggtgttttggcagaatctggctggctacaagagacaggaagccctgagaccatacctgagcagcgaggaagatcggaagaagggaaagaaattcgctcggtaccagctgggcgacctgctgctgcacctggaaaagaagcacggcgaggactggggaaaggtgtacgacgaggcctgggagcggattgacaagaaagtggaaggcctgagcaagcacatcaagctggaagaggaacggagaagcgaggacgcccagagcaaggccgccctgaccgactggctgcgggctaaggccagcttcgtgatcgagggcctgaaggaggccgacaaggacgagttctgcagatgcgagctgaagctgcagaagtggtacggggacctgcggggaaagcccttcgccatcgaagccgagaacagcatcctggacatcagcggcttcagcaagcagtacaactgtgccttcatctggcagaaggacggcgtgaagaagctgaacctgtacctgatcatcaactacttcaagggcggcaagctgcggttcaagaagatcaaacctgaagccttcgaagccaacagattctacaccgtgatcaacaaaaagagcggcgagatcgtgcccatggaggtgaacttcaacttcgacgaccccaacctgatcatcctgcctctggcctttggcaagagacagggcagagaattcatctggaacgacctgctgtccctggaaaccggcagcctgaagctggccaacggaagagtgatcgagaagacactgtacaacagaagaacccggcaggatgagcctgccctgttcgtggccctgaccttcgagcggcgggaggtcctggactcctccaatatcaaaccaatgaacctgatcggcgtggcaagaggcgaaaacatccccgccgtgatcgccctgaccgaccccgagggctgcccactgagccggtttaaggatagcctgggaaacccaacccacatcctgagaatcggcgagagctataaggagaagcagcggaccatccaggccaagaaggaggtggagcagcggagagccggcggctacagccggaagtacgccagcaaagccaagaatctggcagacgatatggtgagaaacaccgctagagatctgctgtactacgccgtgacccaggatgccatgctgatcttcgccaacctgagccggggcttcggccggcagggcaagcggaccttcatggccgagagacagtacacacggatggaggactggctgaccgccaagctggcctacgagggcctgagcaagacctacctgtccaagacactggcccagtacacctccaagacatgcagcaactgtgggtttaccatcaccagcgccgactacgacagggtgctggagaagctgaagaagacagcaacaggctggatgaccacaattaacggcaaggagctgaaggtggagggccagattacctactacaacagatacaagagacagaacgtagtcaaggacctgtccgtcgagctggatagactgagcgaagaatctgtgaacaacgacatctcctcctggacaaagggcagaagcggagaagctctgagcctcctgaagaaaagattctcccatagacccgtgcaggagaagttcgtgtgcctgaactgcggcttcgagacacacgcagccgagcaagccgccctgaacatcgccagatcctggctgttcctgcggagccaggagtacaagaaataccagacaaacaagacaaccggcaacaccgataagagagccttcgtcgagacctggcagtccttttaccggaagaagcttaaggaggtgtggaaacctgccgtgcggtctggcggatctggcggaggctcctgtggccttcgaggacgtggccgtgtacttcaccgccgaggagtgggacctgctgggccccaaccagaagagcctgtacagcgaggtgatgatggagaactacgagaacgtgagctacctggccgacaactggaagaagaccatcgccttcgcccacagccagaaggacttcatccacaagctgcaccagaggacccacaaggaggacgagcaccacaccagggccgagccctgcgagagcaccggatctggctccggcagcggccccaagaaaaagagaaaagtctaagctgccttctgcggggcttgccttctggccatgcccttcttctctcccttgcacctgtacctcttggtctttgaataaagcctgagtaggaaggctagcaaaaaaaaaaaaaaaaaaaaaaaaaaaaaaaaaaaaaaaaaaaaaaaaaaaaaaaaaaaaaaaaaaaaaaaaaaaaaaaa

SEQ ID NO: 16056 - RNA, 9485 nt, synthetic construct
  source 1..9485: mol_type = other RNA
aggaaataagagagaaaagaagagtaagaagaaatataagagccaccatggcccctaagaagaagcgtaaagtgagccggatggaacgcctcgtctacgaggtgcggcagaagtgcagaaacatcgaggacatctgcatctcctgcggatctctgaacgtgaccctggagcacccactgttcatcggcggcatgtgccagaactgtaaaaactgttttctggagtgtgcctatcaatacgacgatgacggctaccagagctactgcaccatctgttgcggcggaagagaggtgctgatgtgtggaaataacaactgctgccggtgcttctgcgtggaatgcgtggacctgctggtgggccccggcgccgcccaggccgctattaaggaagatccttggaactgctacatgtgcggccacaagggcacatacggcctgctgagacggagagaggactggcctagcagactgcagatgttcttcgccaataaccacgaccaggagttcgacccccctaaggtgtaccctcccgtccccgccgagaagagaaagcccatccgggtcctgagcctgttcgatggcatcgccaccggtctgctggtgctgaaggacctgggcatccaggtggataggtacattgcctccgaggtgtgcgaggactccatcaccgtgggaatggtgcgtcatcagggcaagatcatgtacgtgggcgacgtgcggagcgtgacacagaagcatatccaggagtggggccctttcgacctggtgatcggcggcagcccttgcaatgacctgagcatcgtgaacccagcccggaagggcctgtacgagggaaccggcagactgttcttcgagttttacagactgctgcacgacgcccggcctaaggaaggcgacgaccggcccttcttttggctgttcgagaatgtggtggccatgggagtcagcgacaagcgggatattagccggttcctggagagcaaccccgtgatgatcgatgccaaggaagtgagcgccgcccaccgggccagatacttctggggcaatctgcctggcatgaacagacccctggccagcaccgtgaacgacaagctggagctgcaggagtgcctggagcacggccggatcgccaagttcagcaaggtgagaaccatcaccacccgaagcaacagcatcaaacaaggcaaggaccagcactttcctgtgttcatgaacgagaaggaggacatcctgtggtgtaccgagatggagagagtgttcgggttcccagtccactacacagatgtcagcaacatgtctagactggccagacagagactgctgggaagaagctggtccgtccctgtgatcagacacctgttcgcccctctgaaggagtacttcgcctgcgtgagcagcggcaacagcaacgccaacagccggggccccagcttctctagcggcctggtgccactgtccctgagagggagccacatgggccccatggagatctacaaaaccgtgagcgcctggaagcggcagcctgtgcgcgtgctgagcctgtttcggaatatcgataaagtcctgaaaagcctgggattcctggagagcggctctggctccggcggtggcaccctgaagtacgtggaggatgtgacaaacgtggtcagacgggatgtggagaagtggggccccttcgatctggtgtacggcagcacccaacccctgggcagctcttgtgaccggtgccctggctggtacatgtttcagttccaccggatcctgcagtacgccctgccgagacaggagtcccagcggccattcttttggattttcatggacaacttgctgctgaccgaggatgaccaggaaactaccactcggttcctgcagaccgaagccgtgaccctgcaggacgtgagaggccgggactaccagaacgccatgcgggtgtggtccaacatccctggactgaaaagcaagcacgcacctctgacccctaaagaagaggagtacctgcaggcccaggtgcggagcagaagcaagctggacgcccctaaggtggatctgctggtgaagaattgcctcctgcccctgagagagtacttcaagtatttcagccagaatagtctgcccctgggaggcagcggcggcggcgccctggtgacatttgaggacgtcgccgtgcggttcacccaggaggaatgggctctgctggatccttctcagaaaatcctgtaccgggacgtgatgagagagacataccggaatctgacctccgtgggcatcaactgggaatgttgggaccttgaagcctgcttcagaagcctgggaagaaacctgagagtgcaggtggtgaagagaaagtgcgagctgaccaacagcggcccctgcgccgagggcggcccaagcagcggcgcccctcctcccagcggcggcagcccagccggctccccaacctctaccgaggagggcacctctgagtccgccacccccgagagcggccctggcacctccaccgagcccagcgagggcagcgcacccggcagccctgccggcagccccacctccacagaggagggaaccagcaccgagcccagcgaaggcagcgccccaggcaccagcaccgagcctagtgagcaggagattaaacggatcaacaagatcagaagaagacttgtgaaagacagcaacaccaagaaggccggcaagacaggccccatgaaaaccctgctggttagagtgatgacacccgatctgagagagcggctggaaaacctgagaaagaagcctgaaaatatcccccagcccatcagcaatacatctagagccaacctgaataagctgctgaccgattacaccgaaatgaagaaggcgatcctgcatgtgtactgggaagagttccagaaggaccctgtgggcctgatgagccgggtggcccagcctgccagcaagaagatcgatcagaacaagctgaaacctgagatggacgagaagggcaacctgaccaccgccggctttgcctgctctcagtgtggccagcccctgttcgtgtacaagctggagcaggtgtctgagaagggcaaggcttacaccaactacttcggacggtgcaatgtggccgagcacgaaaagctgatcctgctggcccagctgaagcccgagaaggatagcgacgaagccgtgacatatagcctgggaaagtttgggcagagggccctggatttctacagcattcatgtgaccaaggagtccacccaccccgtgaagcccctggcccagatcgccggaaacagatacgcctccggacctgtgggaaaggccctgagcgacgcatgtatgggcacaatcgcctccttcctgtctaagtaccaggacatcatcatcgaacaccagaaggtggtgaagggcaaccagaagagactggagagcctgcgggagctggccggcaaggaaaacctggaataccctagcgtgaccctgccacctcagcctcacaccaaggagggcgttgatgcctacaacgaagtgatcgcccgggtgcgaatgtgggtgaacctgaacctgtggcagaagctgaagctaagcagagatgatgccaagcctctgctgagactgaagggattcccttcctttcctctggtcgagagacaggccaacgaagtggactggtgggacatggtgtgtaacgtgaagaagctgatcaacgagaaaaaggaggatggcaaggtgttttggcagaatctggctggctacaagagacaggaagccctgagaccatacctgagcagcgaggaagatcggaagaagggaaagaaattcgctcggtaccagctgggcgacctgctgctgcacctggaaaagaagcacggcgaggactggggaaaggtgtacgacgaggcctgggagcggattgacaagaaagtggaaggcctgagcaagcacatcaagctggaagaggaacggagaagcgaggacgcccagagcaaggccgccctgaccgactggctgcgggctaaggccagcttcgtgatcgagggcctgaaggaggccgacaaggacgagttctgcagatgcgagctgaagctgcagaagtggtacggggacctgcggggaaagcccttcgccatcgaagccgagaacagcatcctggacatcagcggcttcagcaagcagtacaactgtgccttcatctggcagaaggacggcgtgaagaagctgaacctgtacctgatcatcaactacttcaagggcggcaagctgcggttcaagaagatcaaacctgaagccttcgaagccaacagattctacaccgtgatcaacaaaaagagcggcgagatcgtgcccatggaggtgaacttcaacttcgacgaccccaacctgatcatcctgcctctggcctttggcaagagacagggcagagaattcatctggaacgacctgctgtccctggaaaccggcagcctgaagctggccaacggaagagtgatcgagaagacactgtacaacagaagaacccggcaggatgagcctgccctgttcgtggccctgaccttcgagcggcgggaggtcctggactcctccaatatcaaaccaatgaacctgatcggcgtggcaagaggcgaaaacatccccgccgtgatcgccctgaccgaccccgagggctgcccactgagccggtttaaggatagcctgggaaacccaacccacatcctgagaatcggcgagagctataaggagaagcagcggaccatccaggccaagaaggaggtggagcagcggagagccggcggctacagccggaagtacgccagcaaagccaagaatctggcagacgatatggtgagaaacaccgctagagatctgctgtactacgccgtgacccaggatgccatgctgatcttcgccaacctgagccggggcttcggccggcagggcaagcggaccttcatggccgagagacagtacacacggatggaggactggctgaccgccaagctggcctacgagggcctgagcaagacctacctgtccaagacactggcccagtacacctccaagacatgcagcaactgtgggtttaccatcaccagcgccgactacgacagggtgctggagaagctgaagaagacagcaacaggctggatgaccacaattaacggcaaggagctgaaggtggagggccagattacctactacaacagatacaagagacagaacgtagtcaaggacctgtccgtcgagctggatagactgagcgaagaatctgtgaacaacgacatctcctcctggacaaagggcagaagcggagaagctctgagcctcctgaagaaaagattctcccatagacccgtgcaggagaagttcgtgtgcctgaactgcggcttcgagacacacgcagccgagcaagccgccctgaacatcgccagatcctggctgttcctgcggagccaggagtacaagaaataccagacaaacaagacaaccggcaacaccgataagagagccttcgtcgagacctggcagtccttttaccggaagaagcttaaggaggtgtggaaacctgccgtgcggtctggcggatctggcggaggctcccagcagaggcccgtgagcttcaaggacgtggtggtgggcttcacccaggaggagtggaggaggctgaaccccgcccagagggccctgtacagggacgtgatgctggagacctacagcaacctggtgagcgtgggctacgagggcaccaagcccgacgtgatcctgaggctggagcaggaggaggccccctggatctgcgaggccgtgtgccccggctgccactgccaggaggacttcctgagcggcggcccaagcagcggcgcccctcctcccagcggcggcagcccagccggctccccaacctctaccgaggagggcacctctgagtccgccacccccgagagcggccctggcacctccaccgagcccagcgagggcagcgcacccggcagccctgccggcagccccacctccacagaggagggaaccagcaccgagcccagcgaaggcagcgccccaggcaccagcaccgagcctagtgagcaggagattaaacggatcaacaagatcagaagaagacttgtgaaagacagcaacaccaagaaggccggcaagacaggccccatgaaaaccctgctggttagagtgatgacacccgatctgagagagcggctggaaaacctgagaaagaagcctgaaaatatcccccagcccatcagcaatacatctagagccaacctgaataagctgctgaccgattacaccgaaatgaagaaggcgatcctgcatgtgtactgggaagagttccagaaggaccctgtgggcctgatgagccgggtggcccagcctgccagcaagaagatcgatcagaacaagctgaaacctgagatggacgagaagggcaacctgaccaccgccggctttgcctgctctcagtgtggccagcccctgttcgtgtacaagctggagcaggtgtctgagaagggcaaggcttacaccaactacttcggacggtgcaatgtggccgagcacgaaaagctgatcctgctggcccagctgaagcccgagaaggatagcgacgaagccgtgacatatagcctgggaaagtttgggcagagggccctggatttctacagcattcatgtgaccaaggagtccacccaccccgtgaagcccctggcccagatcgccggaaacagatacgcctccggacctgtgggaaaggccctgagcgacgcatgtatgggcacaatcgcctccttcctgtctaagtaccaggacatcatcatcgaacaccagaaggtggtgaagggcaaccagaagagactggagagcctgcgggagctggccggcaaggaaaacctggaataccctagcgtgaccctgccacctcagcctcacaccaaggagggcgttgatgcctacaacgaagtgatcgcccgggtgcgaatgtgggtgaacctgaacctgtggcagaagctgaagctaagcagagatgatgccaagcctctgctgagactgaagggattcccttcctttcctctggtcgagagacaggccaacgaagtggactggtgggacatggtgtgtaacgtgaagaagctgatcaacgagaaaaaggaggatggcaaggtgttttggcagaatctggctggctacaagagacaggaagccctgagaccatacctgagcagcgaggaagatcggaagaagggaaagaaattcgctcggtaccagctgggcgacctgctgctgcacctggaaaagaagcacggcgaggactggggaaaggtgtacgacgaggcctgggagcggattgacaagaaagtggaaggcctgagcaagcacatcaagctggaagaggaacggagaagcgaggacgcccagagcaaggccgccctgaccgactggctgcgggctaaggccagcttcgtgatcgagggcctgaaggaggccgacaaggacgagttctgcagatgcgagctgaagctgcagaagtggtacggggacctgcggggaaagcccttcgccatcgaagccgagaacagcatcctggacatcagcggcttcagcaagcagtacaactgtgccttcatctggcagaaggacggcgtgaagaagctgaacctgtacctgatcatcaactacttcaagggcggcaagctgcggttcaagaagatcaaacctgaagccttcgaagccaacagattctacaccgtgatcaacaaaaagagcggcgagatcgtgcccatggaggtgaacttcaacttcgacgaccccaacctgatcatcctgcctctggcctttggcaagagacagggcagagaattcatctggaacgacctgctgtccctggaaaccggcagcctgaagctggccaacggaagagtgatcgagaagacactgtacaacagaagaacccggcaggatgagcctgccctgttcgtggccctgaccttcgagcggcgggaggtcctggactcctccaatatcaaaccaatgaacctgatcggcgtggcaagaggcgaaaacatccccgccgtgatcgccctgaccgaccccgagggctgcccactgagccggtttaaggatagcctgggaaacccaacccacatcctgagaatcggcgagagctataaggagaagcagcggaccatccaggccaagaaggaggtggagcagcggagagccggcggctacagccggaagtacgccagcaaagccaagaatctggcagacgatatggtgagaaacaccgctagagatctgctgtactacgccgtgacccaggatgccatgctgatcttcgccaacctgagccggggcttcggccggcagggcaagcggaccttcatggccgagagacagtacacacggatggaggactggctgaccgccaagctggcctacgagggcctgagcaagacctacctgtccaagacactggcccagtacacctccaagacatgcagcaactgtgggtttaccatcaccagcgccgactacgacagggtgctggagaagctgaagaagacagcaacaggctggatgaccacaattaacggcaaggagctgaaggtggagggccagattacctactacaacagatacaagagacagaacgtagtcaaggacctgtccgtcgagctggatagactgagcgaagaatctgtgaacaacgacatctcctcctggacaaagggcagaagcggagaagctctgagcctcctgaagaaaagattctcccatagacccgtgcaggagaagttcgtgtgcctgaactgcggcttcgagacacacgcagccgagcaagccgccctgaacatcgccagatcctggctgttcctgcggagccaggagtacaagaaataccagacaaacaagacaaccggcaacaccgataagagagccttcgtcgagacctggcagtccttttaccggaagaagcttaaggaggtgtggaaacctgccgtgcggtctggcggatctggcggaggctcctcagcagaggcccgtgagcttcaaggacgtggtggtgggcttcacccaggaggagtggaggaggctgaaccccgcccagagggccctgtacagggacgtgatgctggagacctacagcaacctggtgagcgtgggctacgagggcaccaagcccgacgtgatcctgaggctggagcaggaggaggccccctggatctgcgaggccgtgtgccccggctgccactgccaggaggacttcctgagcggatctggctccggcagcggccccaagaaaaagagaaaagtctaagctgccttctgcggggcttgccttctggccatgcccttcttctctcccttgcacctgtacctcttggtctttgaataaagcctgagtaggaaggctagcaaaaaaaaaaaaaaaaaaaaaaaaaaaaaaaaaaaaaaaaaaaaaaaaaaaaaaaaaaaaaaaaaaaaaaaaaaaaaaaa

SEQ ID NO: 16057 - RNA, 9485 nt, synthetic construct
  source 1..9485: mol_type = other RNA
aggaaataagagagaaaagaagagtaagaagaaatataagagccaccatggcccctaagaagaagcgtaaagtgagccggatggaacgcctcgtctacgaggtgcggcagaagtgcagaaacatcgaggacatctgcatctcctgcggatctctgaacgtgaccctggagcacccactgttcatcggcggcatgtgccagaactgtaaaaactgttttctggagtgtgcctatcaatacgacgatgacggctaccagagctactgcaccatctgttgcggcggaagagaggtgctgatgtgtggaaataacaactgctgccggtgcttctgcgtggaatgcgtggacctgctggtgggccccggcgccgcccaggccgctattaaggaagatccttggaactgctacatgtgcggccacaagggcacatacggcctgctgagacggagagaggactggcctagcagactgcagatgttcttcgccaataaccacgaccaggagttcgacccccctaaggtgtaccctcccgtccccgccgagaagagaaagcccatccgggtcctgagcctgttcgatggcatcgccaccggtctgctggtgctgaaggacctgggcatccaggtggataggtacattgcctccgaggtgtgcgaggactccatcaccgtgggaatggtgcgtcatcagggcaagatcatgtacgtgggcgacgtgcggagcgtgacacagaagcatatccaggagtggggccctttcgacctggtgatcggcggcagcccttgcaatgacctgagcatcgtgaacccagcccggaagggcctgtacgagggaaccggcagactgttcttcgagttttacagactgctgcacgacgcccggcctaaggaaggcgacgaccggcccttcttttggctgttcgagaatgtggtggccatgggagtcagcgacaagcgggatattagccggttcctggagagcaaccccgtgatgatcgatgccaaggaagtgagcgccgcccaccgggccagatacttctggggcaatctgcctggcatgaacagacccctggccagcaccgtgaacgacaagctggagctgcaggagtgcctggagcacggccggatcgccaagttcagcaaggtgagaaccatcaccacccgaagcaacagcatcaaacaaggcaaggaccagcactttcctgtgttcatgaacgagaaggaggacatcctgtggtgtaccgagatggagagagtgttcgggttcccagtccactacacagatgtcagcaacatgtctagactggccagacagagactgctgggaagaagctggtccgtccctgtgatcagacacctgttcgcccctctgaaggagtacttcgcctgcgtgagcagcggcaacagcaacgccaacagccggggccccagcttctctagcggcctggtgccactgtccctgagagggagccacatgggccccatggagatctacaaaaccgtgagcgcctggaagcggcagcctgtgcgcgtgctgagcctgtttcggaatatcgataaagtcctgaaaagcctgggattcctggagagcggctctggctccggcggtggcaccctgaagtacgtggaggatgtgacaaacgtggtcagacgggatgtggagaagtggggccccttcgatctggtgtacggcagcacccaacccctgggcagctcttgtgaccggtgccctggctggtacatgtttcagttccaccggatcctgcagtacgccctgccgagacaggagtcccagcggccattcttttggattttcatggacaacttgctgctgaccgaggatgaccaggaaactaccactcggttcctgcagaccgaagccgtgaccctgcaggacgtgagaggccgggactaccagaacgccatgcgggtgtggtccaacatccctggactgaaaagcaagcacgcacctctgacccctaaagaagaggagtacctgcaggcccaggtgcggagcagaagcaagctggacgcccctaaggtggatctgctggtgaagaattgcctcctgcccctgagagagtacttcaagtatttcagccagaatagtctgcccctgggaggcagcggcggcggcgccctggtgacatttgaggacgtcgccgtgcggttcacccaggaggaatgggctctgctggatccttctcagaaaatcctgtaccgggacgtgatgagagagacataccggaatctgacctccgtgggcatcaactgggaatgttgggaccttgaagcctgcttcagaagcctgggaagaaacctgagagtgcaggtggtgaagagaaagtgcgagctgaccaacagcggcccctgcgccgagggcggcccaagcagcggcgcccctcctcccagcggcggcagcccagccggctccccaacctctaccgaggagggcacctctgagtccgccacccccgagagcggccctggcacctccaccgagcccagcgagggcagcgcacccggcagccctgccggcagccccacctccacagaggagggaaccagcaccgagcccagcgaaggcagcgccccaggcaccagcaccgagcctagtgagcaggagattaaacggatcaacaagatcagaagaagacttgtgaaagacagcaacaccaagaaggccggcaagacaggccccatgaaaaccctgctggttagagtgatgacacccgatctgagagagcggctggaaaacctgagaaagaagcctgaaaatatcccccagcccatcagcaatacatctagagccaacctgaataagctgctgaccgattacaccgaaatgaagaaggcgatcctgcatgtgtactgggaagagttccagaaggaccctgtgggcctgatgagccgggtggcccagcctgccagcaagaagatcgatcagaacaagctgaaacctgagatggacgagaagggcaacctgaccaccgccggctttgcctgctctcagtgtggccagcccctgttcgtgtacaagctggagcaggtgtctgagaagggcaaggcttacaccaactacttcggacggtgcaatgtggccgagcacgaaaagctgatcctgctggcccagctgaagcccgagaaggatagcgacgaagccgtgacatatagcctgggaaagtttgggcagagggccctggatttctacagcattcatgtgaccaaggagtccacccaccccgtgaagcccctggcccagatcgccggaaacagatacgcctccggacctgtgggaaaggccctgagcgacgcatgtatgggcacaatcgcctccttcctgtctaagtaccaggacatcatcatcgaacaccagaaggtggtgaagggcaaccagaagagactggagagcctgcgggagctggccggcaaggaaaacctggaataccctagcgtgaccctgccacctcagcctcacaccaaggagggcgttgatgcctacaacgaagtgatcgcccgggtgcgaatgtgggtgaacctgaacctgtggcagaagctgaagctaagcagagatgatgccaagcctctgctgagactgaagggattcccttcctttcctctggtcgagagacaggccaacgaagtggactggtgggacatggtgtgtaacgtgaagaagctgatcaacgagaaaaaggaggatggcaaggtgttttggcagaatctggctggctacaagagacaggaagccctgagaccatacctgagcagcgaggaagatcggaagaagggaaagaaattcgctcggtaccagctgggcgacctgctgctgcacctggaaaagaagcacggcgaggactggggaaaggtgtacgacgaggcctgggagcggattgacaagaaagtggaaggcctgagcaagcacatcaagctggaagaggaacggagaagcgaggacgcccagagcaaggccgccctgaccgactggctgcgggctaaggccagcttcgtgatcgagggcctgaaggaggccgacaaggacgagttctgcagatgcgagctgaagctgcagaagtggtacggggacctgcggggaaagcccttcgccatcgaagccgagaacagcatcctggacatcagcggcttcagcaagcagtacaactgtgccttcatctggcagaaggacggcgtgaagaagctgaacctgtacctgatcatcaactacttcaagggcggcaagctgcggttcaagaagatcaaacctgaagccttcgaagccaacagattctacaccgtgatcaacaaaaagagcggcgagatcgtgcccatggaggtgaacttcaacttcgacgaccccaacctgatcatcctgcctctggcctttggcaagagacagggcagagaattcatctggaacgacctgctgtccctggaaaccggcagcctgaagctggccaacggaagagtgatcgagaagacactgtacaacagaagaacccggcaggatgagcctgccctgttcgtggccctgaccttcgagcggcgggaggtcctggactcctccaatatcaaaccaatgaacctgatcggcgtggcaagaggcgaaaacatccccgccgtgatcgccctgaccgaccccgagggctgcccactgagccggtttaaggatagcctgggaaacccaacccacatcctgagaatcggcgagagctataaggagaagcagcggaccatccaggccaagaaggaggtggagcagcggagagccggcggctacagccggaagtacgccagcaaagccaagaatctggcagacgatatggtgagaaacaccgctagagatctgctgtactacgccgtgacccaggatgccatgctgatcttcgccaacctgagccggggcttcggccggcagggcaagcggaccttcatggccgagagacagtacacacggatggaggactggctgaccgccaagctggcctacgagggcctgagcaagacctacctgtccaagacactggcccagtacacctccaagacatgcagcaactgtgggtttaccatcaccagcgccgactacgacagggtgctggagaagctgaagaagacagcaacaggctggatgaccacaattaacggcaaggagctgaaggtggagggccagattacctactacaacagatacaagagacagaacgtagtcaaggacctgtccgtcgagctggatagactgagcgaagaatctgtgaacaacgacatctcctcctggacaaagggcagaagcggagaagctctgagcctcctgaagaaaagattctcccatagacccgtgcaggagaagttcgtgtgcctgaactgcggcttcgagacacacgcagccgagcaagccgccctgaacatcgccagatcctggctgttcctgcggagccaggagtacaagaaataccagacaaacaagacaaccggcaacaccgataagagagccttcgtcgagacctggcagtccttttaccggaagaagcttaaggaggtgtggaaacctgccgtgcggtctggcggatctggcggaggctccatggccttcagggacgtggccgtggacttcacccaggacgagtgggtgctgctgagccccgcccagaggagcctgtacagggaggtgatgctggagaactacagcaacctggtgagcctgggcatccccttcagcaagcccaagctgatcacccagctggagcagggcaaggagagctggagggaggagaggaagtgcagccccgtgagctgcctgggcgagtggggccactgggtggtgcagggcggcccaagcagcggcgcccctcctcccagcggcggcagcccagccggctccccaacctctaccgaggagggcacctctgagtccgccacccccgagagcggccctggcacctccaccgagcccagcgagggcagcgcacccggcagccctgccggcagccccacctccacagaggagggaaccagcaccgagcccagcgaaggcagcgccccaggcaccagcaccgagcctagtgagcaggagattaaacggatcaacaagatcagaagaagacttgtgaaagacagcaacaccaagaaggccggcaagacaggccccatgaaaaccctgctggttagagtgatgacacccgatctgagagagcggctggaaaacctgagaaagaagcctgaaaatatcccccagcccatcagcaatacatctagagccaacctgaataagctgctgaccgattacaccgaaatgaagaaggcgatcctgcatgtgtactgggaagagttccagaaggaccctgtgggcctgatgagccgggtggcccagcctgccagcaagaagatcgatcagaacaagctgaaacctgagatggacgagaagggcaacctgaccaccgccggctttgcctgctctcagtgtggccagcccctgttcgtgtacaagctggagcaggtgtctgagaagggcaaggcttacaccaactacttcggacggtgcaatgtggccgagcacgaaaagctgatcctgctggcccagctgaagcccgagaaggatagcgacgaagccgtgacatatagcctgggaaagtttgggcagagggccctggatttctacagcattcatgtgaccaaggagtccacccaccccgtgaagcccctggcccagatcgccggaaacagatacgcctccggacctgtgggaaaggccctgagcgacgcatgtatgggcacaatcgcctccttcctgtctaagtaccaggacatcatcatcgaacaccagaaggtggtgaagggcaaccagaagagactggagagcctgcgggagctggccggcaaggaaaacctggaataccctagcgtgaccctgccacctcagcctcacaccaaggagggcgttgatgcctacaacgaagtgatcgcccgggtgcgaatgtgggtgaacctgaacctgtggcagaagctgaagctaagcagagatgatgccaagcctctgctgagactgaagggattcccttcctttcctctggtcgagagacaggccaacgaagtggactggtgggacatggtgtgtaacgtgaagaagctgatcaacgagaaaaaggaggatggcaaggtgttttggcagaatctggctggctacaagagacaggaagccctgagaccatacctgagcagcgaggaagatcggaagaagggaaagaaattcgctcggtaccagctgggcgacctgctgctgcacctggaaaagaagcacggcgaggactggggaaaggtgtacgacgaggcctgggagcggattgacaagaaagtggaaggcctgagcaagcacatcaagctggaagaggaacggagaagcgaggacgcccagagcaaggccgccctgaccgactggctgcgggctaaggccagcttcgtgatcgagggcctgaaggaggccgacaaggacgagttctgcagatgcgagctgaagctgcagaagtggtacggggacctgcggggaaagcccttcgccatcgaagccgagaacagcatcctggacatcagcggcttcagcaagcagtacaactgtgccttcatctggcagaaggacggcgtgaagaagctgaacctgtacctgatcatcaactacttcaagggcggcaagctgcggttcaagaagatcaaacctgaagccttcgaagccaacagattctacaccgtgatcaacaaaaagagcggcgagatcgtgcccatggaggtgaacttcaacttcgacgaccccaacctgatcatcctgcctctggcctttggcaagagacagggcagagaattcatctggaacgacctgctgtccctggaaaccggcagcctgaagctggccaacggaagagtgatcgagaagacactgtacaacagaagaacccggcaggatgagcctgccctgttcgtggccctgaccttcgagcggcgggaggtcctggactcctccaatatcaaaccaatgaacctgatcggcgtggcaagaggcgaaaacatccccgccgtgatcgccctgaccgaccccgagggctgcccactgagccggtttaaggatagcctgggaaacccaacccacatcctgagaatcggcgagagctataaggagaagcagcggaccatccaggccaagaaggaggtggagcagcggagagccggcggctacagccggaagtacgccagcaaagccaagaatctggcagacgatatggtgagaaacaccgctagagatctgctgtactacgccgtgacccaggatgccatgctgatcttcgccaacctgagccggggcttcggccggcagggcaagcggaccttcatggccgagagacagtacacacggatggaggactggctgaccgccaagctggcctacgagggcctgagcaagacctacctgtccaagacactggcccagtacacctccaagacatgcagcaactgtgggtttaccatcaccagcgccgactacgacagggtgctggagaagctgaagaagacagcaacaggctggatgaccacaattaacggcaaggagctgaaggtggagggccagattacctactacaacagatacaagagacagaacgtagtcaaggacctgtccgtcgagctggatagactgagcgaagaatctgtgaacaacgacatctcctcctggacaaagggcagaagcggagaagctctgagcctcctgaagaaaagattctcccatagacccgtgcaggagaagttcgtgtgcctgaactgcggcttcgagacacacgcagccgagcaagccgccctgaacatcgccagatcctggctgttcctgcggagccaggagtacaagaaataccagacaaacaagacaaccggcaacaccgataagagagccttcgtcgagacctggcagtccttttaccggaagaagcttaaggaggtgtggaaacctgccgtgcggtctggcggatctggcggaggctcctatggccttcagggacgtggccgtggacttcacccaggacgagtgggtgctgctgagccccgcccagaggagcctgtacagggaggtgatgctggagaactacagcaacctggtgagcctgggcatccccttcagcaagcccaagctgatcacccagctggagcagggcaaggagagctggagggaggagaggaagtgcagccccgtgagctgcctgggcgagtggggccactgggtggtgcagggatctggctccggcagcggccccaagaaaaagagaaaagtctaagctgccttctgcggggcttgccttctggccatgcccttcttctctcccttgcacctgtacctcttggtctttgaataaagcctgagtaggaaggctagcaaaaaaaaaaaaaaaaaaaaaaaaaaaaaaaaaaaaaaaaaaaaaaaaaaaaaaaaaaaaaaaaaaaaaaaaaaaaaaaa

SEQ ID NO: 16058 - RNA, 9485 nt, synthetic construct
  source 1..9485: mol_type = other RNA
aggaaataagagagaaaagaagagtaagaagaaatataagagccaccatggcccctaagaagaagcgtaaagtgagccggatggaacgcctcgtctacgaggtgcggcagaagtgcagaaacatcgaggacatctgcatctcctgcggatctctgaacgtgaccctggagcacccactgttcatcggcggcatgtgccagaactgtaaaaactgttttctggagtgtgcctatcaatacgacgatgacggctaccagagctactgcaccatctgttgcggcggaagagaggtgctgatgtgtggaaataacaactgctgccggtgcttctgcgtggaatgcgtggacctgctggtgggccccggcgccgcccaggccgctattaaggaagatccttggaactgctacatgtgcggccacaagggcacatacggcctgctgagacggagagaggactggcctagcagactgcagatgttcttcgccaataaccacgaccaggagttcgacccccctaaggtgtaccctcccgtccccgccgagaagagaaagcccatccgggtcctgagcctgttcgatggcatcgccaccggtctgctggtgctgaaggacctgggcatccaggtggataggtacattgcctccgaggtgtgcgaggactccatcaccgtgggaatggtgcgtcatcagggcaagatcatgtacgtgggcgacgtgcggagcgtgacacagaagcatatccaggagtggggccctttcgacctggtgatcggcggcagcccttgcaatgacctgagcatcgtgaacccagcccggaagggcctgtacgagggaaccggcagactgttcttcgagttttacagactgctgcacgacgcccggcctaaggaaggcgacgaccggcccttcttttggctgttcgagaatgtggtggccatgggagtcagcgacaagcgggatattagccggttcctggagagcaaccccgtgatgatcgatgccaaggaagtgagcgccgcccaccgggccagatacttctggggcaatctgcctggcatgaacagacccctggccagcaccgtgaacgacaagctggagctgcaggagtgcctggagcacggccggatcgccaagttcagcaaggtgagaaccatcaccacccgaagcaacagcatcaaacaaggcaaggaccagcactttcctgtgttcatgaacgagaaggaggacatcctgtggtgtaccgagatggagagagtgttcgggttcccagtccactacacagatgtcagcaacatgtctagactggccagacagagactgctgggaagaagctggtccgtccctgtgatcagacacctgttcgcccctctgaaggagtacttcgcctgcgtgagcagcggcaacagcaacgccaacagccggggccccagcttctctagcggcctggtgccactgtccctgagagggagccacatgggccccatggagatctacaaaaccgtgagcgcctggaagcggcagcctgtgcgcgtgctgagcctgtttcggaatatcgataaagtcctgaaaagcctgggattcctggagagcggctctggctccggcggtggcaccctgaagtacgtggaggatgtgacaaacgtggtcagacgggatgtggagaagtggggccccttcgatctggtgtacggcagcacccaacccctgggcagctcttgtgaccggtgccctggctggtacatgtttcagttccaccggatcctgcagtacgccctgccgagacaggagtcccagcggccattcttttggattttcatggacaacttgctgctgaccgaggatgaccaggaaactaccactcggttcctgcagaccgaagccgtgaccctgcaggacgtgagaggccgggactaccagaacgccatgcgggtgtggtccaacatccctggactgaaaagcaagcacgcacctctgacccctaaagaagaggagtacctgcaggcccaggtgcggagcagaagcaagctggacgcccctaaggtggatctgctggtgaagaattgcctcctgcccctgagagagtacttcaagtatttcagccagaatagtctgcccctgggaggcagcggcggcggcgccctggtgacatttgaggacgtcgccgtgcggttcacccaggaggaatgggctctgctggatccttctcagaaaatcctgtaccgggacgtgatgagagagacataccggaatctgacctccgtgggcatcaactgggaatgttgggaccttgaagcctgcttcagaagcctgggaagaaacctgagagtgcaggtggtgaagagaaagtgcgagctgaccaacagcggcccctgcgccgagggcggcccaagcagcggcgcccctcctcccagcggcggcagcccagccggctccccaacctctaccgaggagggcacctctgagtccgccacccccgagagcggccctggcacctccaccgagcccagcgagggcagcgcacccggcagccctgccggcagccccacctccacagaggagggaaccagcaccgagcccagcgaaggcagcgccccaggcaccagcaccgagcctagtgagcaggagattaaacggatcaacaagatcagaagaagacttgtgaaagacagcaacaccaagaaggccggcaagacaggccccatgaaaaccctgctggttagagtgatgacacccgatctgagagagcggctggaaaacctgagaaagaagcctgaaaatatcccccagcccatcagcaatacatctagagccaacctgaataagctgctgaccgattacaccgaaatgaagaaggcgatcctgcatgtgtactgggaagagttccagaaggaccctgtgggcctgatgagccgggtggcccagcctgccagcaagaagatcgatcagaacaagctgaaacctgagatggacgagaagggcaacctgaccaccgccggctttgcctgctctcagtgtggccagcccctgttcgtgtacaagctggagcaggtgtctgagaagggcaaggcttacaccaactacttcggacggtgcaatgtggccgagcacgaaaagctgatcctgctggcccagctgaagcccgagaaggatagcgacgaagccgtgacatatagcctgggaaagtttgggcagagggccctggatttctacagcattcatgtgaccaaggagtccacccaccccgtgaagcccctggcccagatcgccggaaacagatacgcctccggacctgtgggaaaggccctgagcgacgcatgtatgggcacaatcgcctccttcctgtctaagtaccaggacatcatcatcgaacaccagaaggtggtgaagggcaaccagaagagactggagagcctgcgggagctggccggcaaggaaaacctggaataccctagcgtgaccctgccacctcagcctcacaccaaggagggcgttgatgcctacaacgaagtgatcgcccgggtgcgaatgtgggtgaacctgaacctgtggcagaagctgaagctaagcagagatgatgccaagcctctgctgagactgaagggattcccttcctttcctctggtcgagagacaggccaacgaagtggactggtgggacatggtgtgtaacgtgaagaagctgatcaacgagaaaaaggaggatggcaaggtgttttggcagaatctggctggctacaagagacaggaagccctgagaccatacctgagcagcgaggaagatcggaagaagggaaagaaattcgctcggtaccagctgggcgacctgctgctgcacctggaaaagaagcacggcgaggactggggaaaggtgtacgacgaggcctgggagcggattgacaagaaagtggaaggcctgagcaagcacatcaagctggaagaggaacggagaagcgaggacgcccagagcaaggccgccctgaccgactggctgcgggctaaggccagcttcgtgatcgagggcctgaaggaggccgacaaggacgagttctgcagatgcgagctgaagctgcagaagtggtacggggacctgcggggaaagcccttcgccatcgaagccgagaacagcatcctggacatcagcggcttcagcaagcagtacaactgtgccttcatctggcagaaggacggcgtgaagaagctgaacctgtacctgatcatcaactacttcaagggcggcaagctgcggttcaagaagatcaaacctgaagccttcgaagccaacagattctacaccgtgatcaacaaaaagagcggcgagatcgtgcccatggaggtgaacttcaacttcgacgaccccaacctgatcatcctgcctctggcctttggcaagagacagggcagagaattcatctggaacgacctgctgtccctggaaaccggcagcctgaagctggccaacggaagagtgatcgagaagacactgtacaacagaagaacccggcaggatgagcctgccctgttcgtggccctgaccttcgagcggcgggaggtcctggactcctccaatatcaaaccaatgaacctgatcggcgtggcaagaggcgaaaacatccccgccgtgatcgccctgaccgaccccgagggctgcccactgagccggtttaaggatagcctgggaaacccaacccacatcctgagaatcggcgagagctataaggagaagcagcggaccatccaggccaagaaggaggtggagcagcggagagccggcggctacagccggaagtacgccagcaaagccaagaatctggcagacgatatggtgagaaacaccgctagagatctgctgtactacgccgtgacccaggatgccatgctgatcttcgccaacctgagccggggcttcggccggcagggcaagcggaccttcatggccgagagacagtacacacggatggaggactggctgaccgccaagctggcctacgagggcctgagcaagacctacctgtccaagacactggcccagtacacctccaagacatgcagcaactgtgggtttaccatcaccagcgccgactacgacagggtgctggagaagctgaagaagacagcaacaggctggatgaccacaattaacggcaaggagctgaaggtggagggccagattacctactacaacagatacaagagacagaacgtagtcaaggacctgtccgtcgagctggatagactgagcgaagaatctgtgaacaacgacatctcctcctggacaaagggcagaagcggagaagctctgagcctcctgaagaaaagattctcccatagacccgtgcaggagaagttcgtgtgcctgaactgcggcttcgagacacacgcagccgagcaagccgccctgaacatcgccagatcctggctgttcctgcggagccaggagtacaagaaataccagacaaacaagacaaccggcaacaccgataagagagccttcgtcgagacctggcagtccttttaccggaagaagcttaaggaggtgtggaaacctgccgtgcggtctggcggatctggcggaggctccgccgcccaggagctggtgaccttccaggacgtgttcgtggacttcagccaggaggagctgaacagcctgagcgccgcccagaggaggctgcacagggaggtgaccctggagaactacaggagcctggtgagcctgggctacaggttccccaagcccgacatcatcgcccagctggaggaggaggagagcagggccatggaggaggacggcgacaccaagaccggccccgactgggagaccggcggcggcccaagcagcggcgcccctcctcccagcggcggcagcccagccggctccccaacctctaccgaggagggcacctctgagtccgccacccccgagagcggccctggcacctccaccgagcccagcgagggcagcgcacccggcagccctgccggcagccccacctccacagaggagggaaccagcaccgagcccagcgaaggcagcgccccaggcaccagcaccgagcctagtgagcaggagattaaacggatcaacaagatcagaagaagacttgtgaaagacagcaacaccaagaaggccggcaagacaggccccatgaaaaccctgctggttagagtgatgacacccgatctgagagagcggctggaaaacctgagaaagaagcctgaaaatatcccccagcccatcagcaatacatctagagccaacctgaataagctgctgaccgattacaccgaaatgaagaaggcgatcctgcatgtgtactgggaagagttccagaaggaccctgtgggcctgatgagccgggtggcccagcctgccagcaagaagatcgatcagaacaagctgaaacctgagatggacgagaagggcaacctgaccaccgccggctttgcctgctctcagtgtggccagcccctgttcgtgtacaagctggagcaggtgtctgagaagggcaaggcttacaccaactacttcggacggtgcaatgtggccgagcacgaaaagctgatcctgctggcccagctgaagcccgagaaggatagcgacgaagccgtgacatatagcctgggaaagtttgggcagagggccctggatttctacagcattcatgtgaccaaggagtccacccaccccgtgaagcccctggcccagatcgccggaaacagatacgcctccggacctgtgggaaaggccctgagcgacgcatgtatgggcacaatcgcctccttcctgtctaagtaccaggacatcatcatcgaacaccagaaggtggtgaagggcaaccagaagagactggagagcctgcgggagctggccggcaaggaaaacctggaataccctagcgtgaccctgccacctcagcctcacaccaaggagggcgttgatgcctacaacgaagtgatcgcccgggtgcgaatgtgggtgaacctgaacctgtggcagaagctgaagctaagcagagatgatgccaagcctctgctgagactgaagggattcccttcctttcctctggtcgagagacaggccaacgaagtggactggtgggacatggtgtgtaacgtgaagaagctgatcaacgagaaaaaggaggatggcaaggtgttttggcagaatctggctggctacaagagacaggaagccctgagaccatacctgagcagcgaggaagatcggaagaagggaaagaaattcgctcggtaccagctgggcgacctgctgctgcacctggaaaagaagcacggcgaggactggggaaaggtgtacgacgaggcctgggagcggattgacaagaaagtggaaggcctgagcaagcacatcaagctggaagaggaacggagaagcgaggacgcccagagcaaggccgccctgaccgactggctgcgggctaaggccagcttcgtgatcgagggcctgaaggaggccgacaaggacgagttctgcagatgcgagctgaagctgcagaagtggtacggggacctgcggggaaagcccttcgccatcgaagccgagaacagcatcctggacatcagcggcttcagcaagcagtacaactgtgccttcatctggcagaaggacggcgtgaagaagctgaacctgtacctgatcatcaactacttcaagggcggcaagctgcggttcaagaagatcaaacctgaagccttcgaagccaacagattctacaccgtgatcaacaaaaagagcggcgagatcgtgcccatggaggtgaacttcaacttcgacgaccccaacctgatcatcctgcctctggcctttggcaagagacagggcagagaattcatctggaacgacctgctgtccctggaaaccggcagcctgaagctggccaacggaagagtgatcgagaagacactgtacaacagaagaacccggcaggatgagcctgccctgttcgtggccctgaccttcgagcggcgggaggtcctggactcctccaatatcaaaccaatgaacctgatcggcgtggcaagaggcgaaaacatccccgccgtgatcgccctgaccgaccccgagggctgcccactgagccggtttaaggatagcctgggaaacccaacccacatcctgagaatcggcgagagctataaggagaagcagcggaccatccaggccaagaaggaggtggagcagcggagagccggcggctacagccggaagtacgccagcaaagccaagaatctggcagacgatatggtgagaaacaccgctagagatctgctgtactacgccgtgacccaggatgccatgctgatcttcgccaacctgagccggggcttcggccggcagggcaagcggaccttcatggccgagagacagtacacacggatggaggactggctgaccgccaagctggcctacgagggcctgagcaagacctacctgtccaagacactggcccagtacacctccaagacatgcagcaactgtgggtttaccatcaccagcgccgactacgacagggtgctggagaagctgaagaagacagcaacaggctggatgaccacaattaacggcaaggagctgaaggtggagggccagattacctactacaacagatacaagagacagaacgtagtcaaggacctgtccgtcgagctggatagactgagcgaagaatctgtgaacaacgacatctcctcctggacaaagggcagaagcggagaagctctgagcctcctgaagaaaagattctcccatagacccgtgcaggagaagttcgtgtgcctgaactgcggcttcgagacacacgcagccgagcaagccgccctgaacatcgccagatcctggctgttcctgcggagccaggagtacaagaaataccagacaaacaagacaaccggcaacaccgataagagagccttcgtcgagacctggcagtccttttaccggaagaagcttaaggaggtgtggaaacctgccgtgcggtctggcggatctggcggaggctcctgccgcccaggagctggtgaccttccaggacgtgttcgtggacttcagccaggaggagctgaacagcctgagcgccgcccagaggaggctgcacagggaggtgaccctggagaactacaggagcctggtgagcctgggctacaggttccccaagcccgacatcatcgcccagctggaggaggaggagagcagggccatggaggaggacggcgacaccaagaccggccccgactgggagaccggcggatctggctccggcagcggccccaagaaaaagagaaaagtctaagctgccttctgcggggcttgccttctggccatgcccttcttctctcccttgcacctgtacctcttggtctttgaataaagcctgagtaggaaggctagcaaaaaaaaaaaaaaaaaaaaaaaaaaaaaaaaaaaaaaaaaaaaaaaaaaaaaaaaaaaaaaaaaaaaaaaaaaaaaaaa

SEQ ID NO: 16059 - RNA, 9485 nt, synthetic construct
  source 1..9485: mol_type = other RNA
aggaaataagagagaaaagaagagtaagaagaaatataagagccaccatggcccctaagaagaagcgtaaagtgagccggatggaacgcctcgtctacgaggtgcggcagaagtgcagaaacatcgaggacatctgcatctcctgcggatctctgaacgtgaccctggagcacccactgttcatcggcggcatgtgccagaactgtaaaaactgttttctggagtgtgcctatcaatacgacgatgacggctaccagagctactgcaccatctgttgcggcggaagagaggtgctgatgtgtggaaataacaactgctgccggtgcttctgcgtggaatgcgtggacctgctggtgggccccggcgccgcccaggccgctattaaggaagatccttggaactgctacatgtgcggccacaagggcacatacggcctgctgagacggagagaggactggcctagcagactgcagatgttcttcgccaataaccacgaccaggagttcgacccccctaaggtgtaccctcccgtccccgccgagaagagaaagcccatccgggtcctgagcctgttcgatggcatcgccaccggtctgctggtgctgaaggacctgggcatccaggtggataggtacattgcctccgaggtgtgcgaggactccatcaccgtgggaatggtgcgtcatcagggcaagatcatgtacgtgggcgacgtgcggagcgtgacacagaagcatatccaggagtggggccctttcgacctggtgatcggcggcagcccttgcaatgacctgagcatcgtgaacccagcccggaagggcctgtacgagggaaccggcagactgttcttcgagttttacagactgctgcacgacgcccggcctaaggaaggcgacgaccggcccttcttttggctgttcgagaatgtggtggccatgggagtcagcgacaagcgggatattagccggttcctggagagcaaccccgtgatgatcgatgccaaggaagtgagcgccgcccaccgggccagatacttctggggcaatctgcctggcatgaacagacccctggccagcaccgtgaacgacaagctggagctgcaggagtgcctggagcacggccggatcgccaagttcagcaaggtgagaaccatcaccacccgaagcaacagcatcaaacaaggcaaggaccagcactttcctgtgttcatgaacgagaaggaggacatcctgtggtgtaccgagatggagagagtgttcgggttcccagtccactacacagatgtcagcaacatgtctagactggccagacagagactgctgggaagaagctggtccgtccctgtgatcagacacctgttcgcccctctgaaggagtacttcgcctgcgtgagcagcggcaacagcaacgccaacagccggggccccagcttctctagcggcctggtgccactgtccctgagagggagccacatgggccccatggagatctacaaaaccgtgagcgcctggaagcggcagcctgtgcgcgtgctgagcctgtttcggaatatcgataaagtcctgaaaagcctgggattcctggagagcggctctggctccggcggtggcaccctgaagtacgtggaggatgtgacaaacgtggtcagacgggatgtggagaagtggggccccttcgatctggtgtacggcagcacccaacccctgggcagctcttgtgaccggtgccctggctggtacatgtttcagttccaccggatcctgcagtacgccctgccgagacaggagtcccagcggccattcttttggattttcatggacaacttgctgctgaccgaggatgaccaggaaactaccactcggttcctgcagaccgaagccgtgaccctgcaggacgtgagaggccgggactaccagaacgccatgcgggtgtggtccaacatccctggactgaaaagcaagcacgcacctctgacccctaaagaagaggagtacctgcaggcccaggtgcggagcagaagcaagctggacgcccctaaggtggatctgctggtgaagaattgcctcctgcccctgagagagtacttcaagtatttcagccagaatagtctgcccctgggaggcagcggcggcggcgccctggtgacatttgaggacgtcgccgtgcggttcacccaggaggaatgggctctgctggatccttctcagaaaatcctgtaccgggacgtgatgagagagacataccggaatctgacctccgtgggcatcaactgggaatgttgggaccttgaagcctgcttcagaagcctgggaagaaacctgagagtgcaggtggtgaagagaaagtgcgagctgaccaacagcggcccctgcgccgagggcggcccaagcagcggcgcccctcctcccagcggcggcagcccagccggctccccaacctctaccgaggagggcacctctgagtccgccacccccgagagcggccctggcacctccaccgagcccagcgagggcagcgcacccggcagccctgccggcagccccacctccacagaggagggaaccagcaccgagcccagcgaaggcagcgccccaggcaccagcaccgagcctagtgagcaggagattaaacggatcaacaagatcagaagaagacttgtgaaagacagcaacaccaagaaggccggcaagacaggccccatgaaaaccctgctggttagagtgatgacacccgatctgagagagcggctggaaaacctgagaaagaagcctgaaaatatcccccagcccatcagcaatacatctagagccaacctgaataagctgctgaccgattacaccgaaatgaagaaggcgatcctgcatgtgtactgggaagagttccagaaggaccctgtgggcctgatgagccgggtggcccagcctgccagcaagaagatcgatcagaacaagctgaaacctgagatggacgagaagggcaacctgaccaccgccggctttgcctgctctcagtgtggccagcccctgttcgtgtacaagctggagcaggtgtctgagaagggcaaggcttacaccaactacttcggacggtgcaatgtggccgagcacgaaaagctgatcctgctggcccagctgaagcccgagaaggatagcgacgaagccgtgacatatagcctgggaaagtttgggcagagggccctggatttctacagcattcatgtgaccaaggagtccacccaccccgtgaagcccctggcccagatcgccggaaacagatacgcctccggacctgtgggaaaggccctgagcgacgcatgtatgggcacaatcgcctccttcctgtctaagtaccaggacatcatcatcgaacaccagaaggtggtgaagggcaaccagaagagactggagagcctgcgggagctggccggcaaggaaaacctggaataccctagcgtgaccctgccacctcagcctcacaccaaggagggcgttgatgcctacaacgaagtgatcgcccgggtgcgaatgtgggtgaacctgaacctgtggcagaagctgaagctaagcagagatgatgccaagcctctgctgagactgaagggattcccttcctttcctctggtcgagagacaggccaacgaagtggactggtgggacatggtgtgtaacgtgaagaagctgatcaacgagaaaaaggaggatggcaaggtgttttggcagaatctggctggctacaagagacaggaagccctgagaccatacctgagcagcgaggaagatcggaagaagggaaagaaattcgctcggtaccagctgggcgacctgctgctgcacctggaaaagaagcacggcgaggactggggaaaggtgtacgacgaggcctgggagcggattgacaagaaagtggaaggcctgagcaagcacatcaagctggaagaggaacggagaagcgaggacgcccagagcaaggccgccctgaccgactggctgcgggctaaggccagcttcgtgatcgagggcctgaaggaggccgacaaggacgagttctgcagatgcgagctgaagctgcagaagtggtacggggacctgcggggaaagcccttcgccatcgaagccgagaacagcatcctggacatcagcggcttcagcaagcagtacaactgtgccttcatctggcagaaggacggcgtgaagaagctgaacctgtacctgatcatcaactacttcaagggcggcaagctgcggttcaagaagatcaaacctgaagccttcgaagccaacagattctacaccgtgatcaacaaaaagagcggcgagatcgtgcccatggaggtgaacttcaacttcgacgaccccaacctgatcatcctgcctctggcctttggcaagagacagggcagagaattcatctggaacgacctgctgtccctggaaaccggcagcctgaagctggccaacggaagagtgatcgagaagacactgtacaacagaagaacccggcaggatgagcctgccctgttcgtggccctgaccttcgagcggcgggaggtcctggactcctccaatatcaaaccaatgaacctgatcggcgtggcaagaggcgaaaacatccccgccgtgatcgccctgaccgaccccgagggctgcccactgagccggtttaaggatagcctgggaaacccaacccacatcctgagaatcggcgagagctataaggagaagcagcggaccatccaggccaagaaggaggtggagcagcggagagccggcggctacagccggaagtacgccagcaaagccaagaatctggcagacgatatggtgagaaacaccgctagagatctgctgtactacgccgtgacccaggatgccatgctgatcttcgccaacctgagccggggcttcggccggcagggcaagcggaccttcatggccgagagacagtacacacggatggaggactggctgaccgccaagctggcctacgagggcctgagcaagacctacctgtccaagacactggcccagtacacctccaagacatgcagcaactgtgggtttaccatcaccagcgccgactacgacagggtgctggagaagctgaagaagacagcaacaggctggatgaccacaattaacggcaaggagctgaaggtggagggccagattacctactacaacagatacaagagacagaacgtagtcaaggacctgtccgtcgagctggatagactgagcgaagaatctgtgaacaacgacatctcctcctggacaaagggcagaagcggagaagctctgagcctcctgaagaaaagattctcccatagacccgtgcaggagaagttcgtgtgcctgaactgcggcttcgagacacacgcagccgagcaagccgccctgaacatcgccagatcctggctgttcctgcggagccaggagtacaagaaataccagacaaacaagacaaccggcaacaccgataagagagccttcgtcgagacctggcagtccttttaccggaagaagcttaaggaggtgtggaaacctgccgtgcggtctggcggatctggcggaggctccggcaagatgagcgtgaccttcgaggacgtggccctgtacttcagccccgaggagtgggccaagctgagcggctgccagaggcagctgtacagggaggtgatgctggagaactaccagatggtggccagcctgggctgggccaccgtgaagcccgagatcatctgcaagatggagagggaggagaccccctgcgtgctggacccccccggcgagcagcagatgcaccagagccccgtgcccgccggcggcccaagcagcggcgcccctcctcccagcggcggcagcccagccggctccccaacctctaccgaggagggcacctctgagtccgccacccccgagagcggccctggcacctccaccgagcccagcgagggcagcgcacccggcagccctgccggcagccccacctccacagaggagggaaccagcaccgagcccagcgaaggcagcgccccaggcaccagcaccgagcctagtgagcaggagattaaacggatcaacaagatcagaagaagacttgtgaaagacagcaacaccaagaaggccggcaagacaggccccatgaaaaccctgctggttagagtgatgacacccgatctgagagagcggctggaaaacctgagaaagaagcctgaaaatatcccccagcccatcagcaatacatctagagccaacctgaataagctgctgaccgattacaccgaaatgaagaaggcgatcctgcatgtgtactgggaagagttccagaaggaccctgtgggcctgatgagccgggtggcccagcctgccagcaagaagatcgatcagaacaagctgaaacctgagatggacgagaagggcaacctgaccaccgccggctttgcctgctctcagtgtggccagcccctgttcgtgtacaagctggagcaggtgtctgagaagggcaaggcttacaccaactacttcggacggtgcaatgtggccgagcacgaaaagctgatcctgctggcccagctgaagcccgagaaggatagcgacgaagccgtgacatatagcctgggaaagtttgggcagagggccctggatttctacagcattcatgtgaccaaggagtccacccaccccgtgaagcccctggcccagatcgccggaaacagatacgcctccggacctgtgggaaaggccctgagcgacgcatgtatgggcacaatcgcctccttcctgtctaagtaccaggacatcatcatcgaacaccagaaggtggtgaagggcaaccagaagagactggagagcctgcgggagctggccggcaaggaaaacctggaataccctagcgtgaccctgccacctcagcctcacaccaaggagggcgttgatgcctacaacgaagtgatcgcccgggtgcgaatgtgggtgaacctgaacctgtggcagaagctgaagctaagcagagatgatgccaagcctctgctgagactgaagggattcccttcctttcctctggtcgagagacaggccaacgaagtggactggtgggacatggtgtgtaacgtgaagaagctgatcaacgagaaaaaggaggatggcaaggtgttttggcagaatctggctggctacaagagacaggaagccctgagaccatacctgagcagcgaggaagatcggaagaagggaaagaaattcgctcggtaccagctgggcgacctgctgctgcacctggaaaagaagcacggcgaggactggggaaaggtgtacgacgaggcctgggagcggattgacaagaaagtggaaggcctgagcaagcacatcaagctggaagaggaacggagaagcgaggacgcccagagcaaggccgccctgaccgactggctgcgggctaaggccagcttcgtgatcgagggcctgaaggaggccgacaaggacgagttctgcagatgcgagctgaagctgcagaagtggtacggggacctgcggggaaagcccttcgccatcgaagccgagaacagcatcctggacatcagcggcttcagcaagcagtacaactgtgccttcatctggcagaaggacggcgtgaagaagctgaacctgtacctgatcatcaactacttcaagggcggcaagctgcggttcaagaagatcaaacctgaagccttcgaagccaacagattctacaccgtgatcaacaaaaagagcggcgagatcgtgcccatggaggtgaacttcaacttcgacgaccccaacctgatcatcctgcctctggcctttggcaagagacagggcagagaattcatctggaacgacctgctgtccctggaaaccggcagcctgaagctggccaacggaagagtgatcgagaagacactgtacaacagaagaacccggcaggatgagcctgccctgttcgtggccctgaccttcgagcggcgggaggtcctggactcctccaatatcaaaccaatgaacctgatcggcgtggcaagaggcgaaaacatccccgccgtgatcgccctgaccgaccccgagggctgcccactgagccggtttaaggatagcctgggaaacccaacccacatcctgagaatcggcgagagctataaggagaagcagcggaccatccaggccaagaaggaggtggagcagcggagagccggcggctacagccggaagtacgccagcaaagccaagaatctggcagacgatatggtgagaaacaccgctagagatctgctgtactacgccgtgacccaggatgccatgctgatcttcgccaacctgagccggggcttcggccggcagggcaagcggaccttcatggccgagagacagtacacacggatggaggactggctgaccgccaagctggcctacgagggcctgagcaagacctacctgtccaagacactggcccagtacacctccaagacatgcagcaactgtgggtttaccatcaccagcgccgactacgacagggtgctggagaagctgaagaagacagcaacaggctggatgaccacaattaacggcaaggagctgaaggtggagggccagattacctactacaacagatacaagagacagaacgtagtcaaggacctgtccgtcgagctggatagactgagcgaagaatctgtgaacaacgacatctcctcctggacaaagggcagaagcggagaagctctgagcctcctgaagaaaagattctcccatagacccgtgcaggagaagttcgtgtgcctgaactgcggcttcgagacacacgcagccgagcaagccgccctgaacatcgccagatcctggctgttcctgcggagccaggagtacaagaaataccagacaaacaagacaaccggcaacaccgataagagagccttcgtcgagacctggcagtccttttaccggaagaagcttaaggaggtgtggaaacctgccgtgcggtctggcggatctggcggaggctcctggcaagatgagcgtgaccttcgaggacgtggccctgtacttcagccccgaggagtgggccaagctgagcggctgccagaggcagctgtacagggaggtgatgctggagaactaccagatggtggccagcctgggctgggccaccgtgaagcccgagatcatctgcaagatggagagggaggagaccccctgcgtgctggacccccccggcgagcagcagatgcaccagagccccgtgcccgccggatctggctccggcagcggccccaagaaaaagagaaaagtctaagctgccttctgcggggcttgccttctggccatgcccttcttctctcccttgcacctgtacctcttggtctttgaataaagcctgagtaggaaggctagcaaaaaaaaaaaaaaaaaaaaaaaaaaaaaaaaaaaaaaaaaaaaaaaaaaaaaaaaaaaaaaaaaaaaaaaaaaaaaaaa

SEQ ID NO: 16060 - RNA, 9485 nt, synthetic construct
  source 1..9485: mol_type = other RNA
aggaaataagagagaaaagaagagtaagaagaaatataagagccaccatggcccctaagaagaagcgtaaagtgagccggatggaacgcctcgtctacgaggtgcggcagaagtgcagaaacatcgaggacatctgcatctcctgcggatctctgaacgtgaccctggagcacccactgttcatcggcggcatgtgccagaactgtaaaaactgttttctggagtgtgcctatcaatacgacgatgacggctaccagagctactgcaccatctgttgcggcggaagagaggtgctgatgtgtggaaataacaactgctgccggtgcttctgcgtggaatgcgtggacctgctggtgggccccggcgccgcccaggccgctattaaggaagatccttggaactgctacatgtgcggccacaagggcacatacggcctgctgagacggagagaggactggcctagcagactgcagatgttcttcgccaataaccacgaccaggagttcgacccccctaaggtgtaccctcccgtccccgccgagaagagaaagcccatccgggtcctgagcctgttcgatggcatcgccaccggtctgctggtgctgaaggacctgggcatccaggtggataggtacattgcctccgaggtgtgcgaggactccatcaccgtgggaatggtgcgtcatcagggcaagatcatgtacgtgggcgacgtgcggagcgtgacacagaagcatatccaggagtggggccctttcgacctggtgatcggcggcagcccttgcaatgacctgagcatcgtgaacccagcccggaagggcctgtacgagggaaccggcagactgttcttcgagttttacagactgctgcacgacgcccggcctaaggaaggcgacgaccggcccttcttttggctgttcgagaatgtggtggccatgggagtcagcgacaagcgggatattagccggttcctggagagcaaccccgtgatgatcgatgccaaggaagtgagcgccgcccaccgggccagatacttctggggcaatctgcctggcatgaacagacccctggccagcaccgtgaacgacaagctggagctgcaggagtgcctggagcacggccggatcgccaagttcagcaaggtgagaaccatcaccacccgaagcaacagcatcaaacaaggcaaggaccagcactttcctgtgttcatgaacgagaaggaggacatcctgtggtgtaccgagatggagagagtgttcgggttcccagtccactacacagatgtcagcaacatgtctagactggccagacagagactgctgggaagaagctggtccgtccctgtgatcagacacctgttcgcccctctgaaggagtacttcgcctgcgtgagcagcggcaacagcaacgccaacagccggggccccagcttctctagcggcctggtgccactgtccctgagagggagccacatgggccccatggagatctacaaaaccgtgagcgcctggaagcggcagcctgtgcgcgtgctgagcctgtttcggaatatcgataaagtcctgaaaagcctgggattcctggagagcggctctggctccggcggtggcaccctgaagtacgtggaggatgtgacaaacgtggtcagacgggatgtggagaagtggggccccttcgatctggtgtacggcagcacccaacccctgggcagctcttgtgaccggtgccctggctggtacatgtttcagttccaccggatcctgcagtacgccctgccgagacaggagtcccagcggccattcttttggattttcatggacaacttgctgctgaccgaggatgaccaggaaactaccactcggttcctgcagaccgaagccgtgaccctgcaggacgtgagaggccgggactaccagaacgccatgcgggtgtggtccaacatccctggactgaaaagcaagcacgcacctctgacccctaaagaagaggagtacctgcaggcccaggtgcggagcagaagcaagctggacgcccctaaggtggatctgctggtgaagaattgcctcctgcccctgagagagtacttcaagtatttcagccagaatagtctgcccctgggaggcagcggcggcggcgccctggtgacatttgaggacgtcgccgtgcggttcacccaggaggaatgggctctgctggatccttctcagaaaatcctgtaccgggacgtgatgagagagacataccggaatctgacctccgtgggcatcaactgggaatgttgggaccttgaagcctgcttcagaagcctgggaagaaacctgagagtgcaggtggtgaagagaaagtgcgagctgaccaacagcggcccctgcgccgagggcggcccaagcagcggcgcccctcctcccagcggcggcagcccagccggctccccaacctctaccgaggagggcacctctgagtccgccacccccgagagcggccctggcacctccaccgagcccagcgagggcagcgcacccggcagccctgccggcagccccacctccacagaggagggaaccagcaccgagcccagcgaaggcagcgccccaggcaccagcaccgagcctagtgagcaggagattaaacggatcaacaagatcagaagaagacttgtgaaagacagcaacaccaagaaggccggcaagacaggccccatgaaaaccctgctggttagagtgatgacacccgatctgagagagcggctggaaaacctgagaaagaagcctgaaaatatcccccagcccatcagcaatacatctagagccaacctgaataagctgctgaccgattacaccgaaatgaagaaggcgatcctgcatgtgtactgggaagagttccagaaggaccctgtgggcctgatgagccgggtggcccagcctgccagcaagaagatcgatcagaacaagctgaaacctgagatggacgagaagggcaacctgaccaccgccggctttgcctgctctcagtgtggccagcccctgttcgtgtacaagctggagcaggtgtctgagaagggcaaggcttacaccaactacttcggacggtgcaatgtggccgagcacgaaaagctgatcctgctggcccagctgaagcccgagaaggatagcgacgaagccgtgacatatagcctgggaaagtttgggcagagggccctggatttctacagcattcatgtgaccaaggagtccacccaccccgtgaagcccctggcccagatcgccggaaacagatacgcctccggacctgtgggaaaggccctgagcgacgcatgtatgggcacaatcgcctccttcctgtctaagtaccaggacatcatcatcgaacaccagaaggtggtgaagggcaaccagaagagactggagagcctgcgggagctggccggcaaggaaaacctggaataccctagcgtgaccctgccacctcagcctcacaccaaggagggcgttgatgcctacaacgaagtgatcgcccgggtgcgaatgtgggtgaacctgaacctgtggcagaagctgaagctaagcagagatgatgccaagcctctgctgagactgaagggattcccttcctttcctctggtcgagagacaggccaacgaagtggactggtgggacatggtgtgtaacgtgaagaagctgatcaacgagaaaaaggaggatggcaaggtgttttggcagaatctggctggctacaagagacaggaagccctgagaccatacctgagcagcgaggaagatcggaagaagggaaagaaattcgctcggtaccagctgggcgacctgctgctgcacctggaaaagaagcacggcgaggactggggaaaggtgtacgacgaggcctgggagcggattgacaagaaagtggaaggcctgagcaagcacatcaagctggaagaggaacggagaagcgaggacgcccagagcaaggccgccctgaccgactggctgcgggctaaggccagcttcgtgatcgagggcctgaaggaggccgacaaggacgagttctgcagatgcgagctgaagctgcagaagtggtacggggacctgcggggaaagcccttcgccatcgaagccgagaacagcatcctggacatcagcggcttcagcaagcagtacaactgtgccttcatctggcagaaggacggcgtgaagaagctgaacctgtacctgatcatcaactacttcaagggcggcaagctgcggttcaagaagatcaaacctgaagccttcgaagccaacagattctacaccgtgatcaacaaaaagagcggcgagatcgtgcccatggaggtgaacttcaacttcgacgaccccaacctgatcatcctgcctctggcctttggcaagagacagggcagagaattcatctggaacgacctgctgtccctggaaaccggcagcctgaagctggccaacggaagagtgatcgagaagacactgtacaacagaagaacccggcaggatgagcctgccctgttcgtggccctgaccttcgagcggcgggaggtcctggactcctccaatatcaaaccaatgaacctgatcggcgtggcaagaggcgaaaacatccccgccgtgatcgccctgaccgaccccgagggctgcccactgagccggtttaaggatagcctgggaaacccaacccacatcctgagaatcggcgagagctataaggagaagcagcggaccatccaggccaagaaggaggtggagcagcggagagccggcggctacagccggaagtacgccagcaaagccaagaatctggcagacgatatggtgagaaacaccgctagagatctgctgtactacgccgtgacccaggatgccatgctgatcttcgccaacctgagccggggcttcggccggcagggcaagcggaccttcatggccgagagacagtacacacggatggaggactggctgaccgccaagctggcctacgagggcctgagcaagacctacctgtccaagacactggcccagtacacctccaagacatgcagcaactgtgggtttaccatcaccagcgccgactacgacagggtgctggagaagctgaagaagacagcaacaggctggatgaccacaattaacggcaaggagctgaaggtggagggccagattacctactacaacagatacaagagacagaacgtagtcaaggacctgtccgtcgagctggatagactgagcgaagaatctgtgaacaacgacatctcctcctggacaaagggcagaagcggagaagctctgagcctcctgaagaaaagattctcccatagacccgtgcaggagaagttcgtgtgcctgaactgcggcttcgagacacacgcagccgagcaagccgccctgaacatcgccagatcctggctgttcctgcggagccaggagtacaagaaataccagacaaacaagacaaccggcaacaccgataagagagccttcgtcgagacctggcagtccttttaccggaagaagcttaaggaggtgtggaaacctgccgtgcggtctggcggatctggcggaggctccagccaggagcccgtgagcttcgccgaggtggccgtgtacttcagcagggaggagtgggccctgctggaccccgcccagagggccctgtacagggacgtgatgctggagacctaccagtgcgtggccagcctggcccccctgcccgcccccaagcccatgctgatcagcctgctggagggcggcgaggagccctggatccccgacgtgaggagccccgaggccgtgcccggcgacctgagccccggcggcccaagcagcggcgcccctcctcccagcggcggcagcccagccggctccccaacctctaccgaggagggcacctctgagtccgccacccccgagagcggccctggcacctccaccgagcccagcgagggcagcgcacccggcagccctgccggcagccccacctccacagaggagggaaccagcaccgagcccagcgaaggcagcgccccaggcaccagcaccgagcctagtgagcaggagattaaacggatcaacaagatcagaagaagacttgtgaaagacagcaacaccaagaaggccggcaagacaggccccatgaaaaccctgctggttagagtgatgacacccgatctgagagagcggctggaaaacctgagaaagaagcctgaaaatatcccccagcccatcagcaatacatctagagccaacctgaataagctgctgaccgattacaccgaaatgaagaaggcgatcctgcatgtgtactgggaagagttccagaaggaccctgtgggcctgatgagccgggtggcccagcctgccagcaagaagatcgatcagaacaagctgaaacctgagatggacgagaagggcaacctgaccaccgccggctttgcctgctctcagtgtggccagcccctgttcgtgtacaagctggagcaggtgtctgagaagggcaaggcttacaccaactacttcggacggtgcaatgtggccgagcacgaaaagctgatcctgctggcccagctgaagcccgagaaggatagcgacgaagccgtgacatatagcctgggaaagtttgggcagagggccctggatttctacagcattcatgtgaccaaggagtccacccaccccgtgaagcccctggcccagatcgccggaaacagatacgcctccggacctgtgggaaaggccctgagcgacgcatgtatgggcacaatcgcctccttcctgtctaagtaccaggacatcatcatcgaacaccagaaggtggtgaagggcaaccagaagagactggagagcctgcgggagctggccggcaaggaaaacctggaataccctagcgtgaccctgccacctcagcctcacaccaaggagggcgttgatgcctacaacgaagtgatcgcccgggtgcgaatgtgggtgaacctgaacctgtggcagaagctgaagctaagcagagatgatgccaagcctctgctgagactgaagggattcccttcctttcctctggtcgagagacaggccaacgaagtggactggtgggacatggtgtgtaacgtgaagaagctgatcaacgagaaaaaggaggatggcaaggtgttttggcagaatctggctggctacaagagacaggaagccctgagaccatacctgagcagcgaggaagatcggaagaagggaaagaaattcgctcggtaccagctgggcgacctgctgctgcacctggaaaagaagcacggcgaggactggggaaaggtgtacgacgaggcctgggagcggattgacaagaaagtggaaggcctgagcaagcacatcaagctggaagaggaacggagaagcgaggacgcccagagcaaggccgccctgaccgactggctgcgggctaaggccagcttcgtgatcgagggcctgaaggaggccgacaaggacgagttctgcagatgcgagctgaagctgcagaagtggtacggggacctgcggggaaagcccttcgccatcgaagccgagaacagcatcctggacatcagcggcttcagcaagcagtacaactgtgccttcatctggcagaaggacggcgtgaagaagctgaacctgtacctgatcatcaactacttcaagggcggcaagctgcggttcaagaagatcaaacctgaagccttcgaagccaacagattctacaccgtgatcaacaaaaagagcggcgagatcgtgcccatggaggtgaacttcaacttcgacgaccccaacctgatcatcctgcctctggcctttggcaagagacagggcagagaattcatctggaacgacctgctgtccctggaaaccggcagcctgaagctggccaacggaagagtgatcgagaagacactgtacaacagaagaacccggcaggatgagcctgccctgttcgtggccctgaccttcgagcggcgggaggtcctggactcctccaatatcaaaccaatgaacctgatcggcgtggcaagaggcgaaaacatccccgccgtgatcgccctgaccgaccccgagggctgcccactgagccggtttaaggatagcctgggaaacccaacccacatcctgagaatcggcgagagctataaggagaagcagcggaccatccaggccaagaaggaggtggagcagcggagagccggcggctacagccggaagtacgccagcaaagccaagaatctggcagacgatatggtgagaaacaccgctagagatctgctgtactacgccgtgacccaggatgccatgctgatcttcgccaacctgagccggggcttcggccggcagggcaagcggaccttcatggccgagagacagtacacacggatggaggactggctgaccgccaagctggcctacgagggcctgagcaagacctacctgtccaagacactggcccagtacacctccaagacatgcagcaactgtgggtttaccatcaccagcgccgactacgacagggtgctggagaagctgaagaagacagcaacaggctggatgaccacaattaacggcaaggagctgaaggtggagggccagattacctactacaacagatacaagagacagaacgtagtcaaggacctgtccgtcgagctggatagactgagcgaagaatctgtgaacaacgacatctcctcctggacaaagggcagaagcggagaagctctgagcctcctgaagaaaagattctcccatagacccgtgcaggagaagttcgtgtgcctgaactgcggcttcgagacacacgcagccgagcaagccgccctgaacatcgccagatcctggctgttcctgcggagccaggagtacaagaaataccagacaaacaagacaaccggcaacaccgataagagagccttcgtcgagacctggcagtccttttaccggaagaagcttaaggaggtgtggaaacctgccgtgcggtctggcggatctggcggaggctcctagccaggagcccgtgagcttcgccgaggtggccgtgtacttcagcagggaggagtgggccctgctggaccccgcccagagggccctgtacagggacgtgatgctggagacctaccagtgcgtggccagcctggcccccctgcccgcccccaagcccatgctgatcagcctgctggagggcggcgaggagccctggatccccgacgtgaggagccccgaggccgtgcccggcgacctgagccccggatctggctccggcagcggccccaagaaaaagagaaaagtctaagctgccttctgcggggcttgccttctggccatgcccttcttctctcccttgcacctgtacctcttggtctttgaataaagcctgagtaggaaggctagcaaaaaaaaaaaaaaaaaaaaaaaaaaaaaaaaaaaaaaaaaaaaaaaaaaaaaaaaaaaaaaaaaaaaaaaaaaaaaaaa

SEQ ID NO: 16061 - RNA, 9485 nt, synthetic construct
  source 1..9485: mol_type = other RNA
aggaaataagagagaaaagaagagtaagaagaaatataagagccaccatggcccctaagaagaagcgtaaagtgagccggatggaacgcctcgtctacgaggtgcggcagaagtgcagaaacatcgaggacatctgcatctcctgcggatctctgaacgtgaccctggagcacccactgttcatcggcggcatgtgccagaactgtaaaaactgttttctggagtgtgcctatcaatacgacgatgacggctaccagagctactgcaccatctgttgcggcggaagagaggtgctgatgtgtggaaataacaactgctgccggtgcttctgcgtggaatgcgtggacctgctggtgggccccggcgccgcccaggccgctattaaggaagatccttggaactgctacatgtgcggccacaagggcacatacggcctgctgagacggagagaggactggcctagcagactgcagatgttcttcgccaataaccacgaccaggagttcgacccccctaaggtgtaccctcccgtccccgccgagaagagaaagcccatccgggtcctgagcctgttcgatggcatcgccaccggtctgctggtgctgaaggacctgggcatccaggtggataggtacattgcctccgaggtgtgcgaggactccatcaccgtgggaatggtgcgtcatcagggcaagatcatgtacgtgggcgacgtgcggagcgtgacacagaagcatatccaggagtggggccctttcgacctggtgatcggcggcagcccttgcaatgacctgagcatcgtgaacccagcccggaagggcctgtacgagggaaccggcagactgttcttcgagttttacagactgctgcacgacgcccggcctaaggaaggcgacgaccggcccttcttttggctgttcgagaatgtggtggccatgggagtcagcgacaagcgggatattagccggttcctggagagcaaccccgtgatgatcgatgccaaggaagtgagcgccgcccaccgggccagatacttctggggcaatctgcctggcatgaacagacccctggccagcaccgtgaacgacaagctggagctgcaggagtgcctggagcacggccggatcgccaagttcagcaaggtgagaaccatcaccacccgaagcaacagcatcaaacaaggcaaggaccagcactttcctgtgttcatgaacgagaaggaggacatcctgtggtgtaccgagatggagagagtgttcgggttcccagtccactacacagatgtcagcaacatgtctagactggccagacagagactgctgggaagaagctggtccgtccctgtgatcagacacctgttcgcccctctgaaggagtacttcgcctgcgtgagcagcggcaacagcaacgccaacagccggggccccagcttctctagcggcctggtgccactgtccctgagagggagccacatgggccccatggagatctacaaaaccgtgagcgcctggaagcggcagcctgtgcgcgtgctgagcctgtttcggaatatcgataaagtcctgaaaagcctgggattcctggagagcggctctggctccggcggtggcaccctgaagtacgtggaggatgtgacaaacgtggtcagacgggatgtggagaagtggggccccttcgatctggtgtacggcagcacccaacccctgggcagctcttgtgaccggtgccctggctggtacatgtttcagttccaccggatcctgcagtacgccctgccgagacaggagtcccagcggccattcttttggattttcatggacaacttgctgctgaccgaggatgaccaggaaactaccactcggttcctgcagaccgaagccgtgaccctgcaggacgtgagaggccgggactaccagaacgccatgcgggtgtggtccaacatccctggactgaaaagcaagcacgcacctctgacccctaaagaagaggagtacctgcaggcccaggtgcggagcagaagcaagctggacgcccctaaggtggatctgctggtgaagaattgcctcctgcccctgagagagtacttcaagtatttcagccagaatagtctgcccctgggaggcagcggcggcggcgccctggtgacatttgaggacgtcgccgtgcggttcacccaggaggaatgggctctgctggatccttctcagaaaatcctgtaccgggacgtgatgagagagacataccggaatctgacctccgtgggcatcaactgggaatgttgggaccttgaagcctgcttcagaagcctgggaagaaacctgagagtgcaggtggtgaagagaaagtgcgagctgaccaacagcggcccctgcgccgagggcggcccaagcagcggcgcccctcctcccagcggcggcagcccagccggctccccaacctctaccgaggagggcacctctgagtccgccacccccgagagcggccctggcacctccaccgagcccagcgagggcagcgcacccggcagccctgccggcagccccacctccacagaggagggaaccagcaccgagcccagcgaaggcagcgccccaggcaccagcaccgagcctagtgagcaggagattaaacggatcaacaagatcagaagaagacttgtgaaagacagcaacaccaagaaggccggcaagacaggccccatgaaaaccctgctggttagagtgatgacacccgatctgagagagcggctggaaaacctgagaaagaagcctgaaaatatcccccagcccatcagcaatacatctagagccaacctgaataagctgctgaccgattacaccgaaatgaagaaggcgatcctgcatgtgtactgggaagagttccagaaggaccctgtgggcctgatgagccgggtggcccagcctgccagcaagaagatcgatcagaacaagctgaaacctgagatggacgagaagggcaacctgaccaccgccggctttgcctgctctcagtgtggccagcccctgttcgtgtacaagctggagcaggtgtctgagaagggcaaggcttacaccaactacttcggacggtgcaatgtggccgagcacgaaaagctgatcctgctggcccagctgaagcccgagaaggatagcgacgaagccgtgacatatagcctgggaaagtttgggcagagggccctggatttctacagcattcatgtgaccaaggagtccacccaccccgtgaagcccctggcccagatcgccggaaacagatacgcctccggacctgtgggaaaggccctgagcgacgcatgtatgggcacaatcgcctccttcctgtctaagtaccaggacatcatcatcgaacaccagaaggtggtgaagggcaaccagaagagactggagagcctgcgggagctggccggcaaggaaaacctggaataccctagcgtgaccctgccacctcagcctcacaccaaggagggcgttgatgcctacaacgaagtgatcgcccgggtgcgaatgtgggtgaacctgaacctgtggcagaagctgaagctaagcagagatgatgccaagcctctgctgagactgaagggattcccttcctttcctctggtcgagagacaggccaacgaagtggactggtgggacatggtgtgtaacgtgaagaagctgatcaacgagaaaaaggaggatggcaaggtgttttggcagaatctggctggctacaagagacaggaagccctgagaccatacctgagcagcgaggaagatcggaagaagggaaagaaattcgctcggtaccagctgggcgacctgctgctgcacctggaaaagaagcacggcgaggactggggaaaggtgtacgacgaggcctgggagcggattgacaagaaagtggaaggcctgagcaagcacatcaagctggaagaggaacggagaagcgaggacgcccagagcaaggccgccctgaccgactggctgcgggctaaggccagcttcgtgatcgagggcctgaaggaggccgacaaggacgagttctgcagatgcgagctgaagctgcagaagtggtacggggacctgcggggaaagcccttcgccatcgaagccgagaacagcatcctggacatcagcggcttcagcaagcagtacaactgtgccttcatctggcagaaggacggcgtgaagaagctgaacctgtacctgatcatcaactacttcaagggcggcaagctgcggttcaagaagatcaaacctgaagccttcgaagccaacagattctacaccgtgatcaacaaaaagagcggcgagatcgtgcccatggaggtgaacttcaacttcgacgaccccaacctgatcatcctgcctctggcctttggcaagagacagggcagagaattcatctggaacgacctgctgtccctggaaaccggcagcctgaagctggccaacggaagagtgatcgagaagacactgtacaacagaagaacccggcaggatgagcctgccctgttcgtggccctgaccttcgagcggcgggaggtcctggactcctccaatatcaaaccaatgaacctgatcggcgtggcaagaggcgaaaacatccccgccgtgatcgccctgaccgaccccgagggctgcccactgagccggtttaaggatagcctgggaaacccaacccacatcctgagaatcggcgagagctataaggagaagcagcggaccatccaggccaagaaggaggtggagcagcggagagccggcggctacagccggaagtacgccagcaaagccaagaatctggcagacgatatggtgagaaacaccgctagagatctgctgtactacgccgtgacccaggatgccatgctgatcttcgccaacctgagccggggcttcggccggcagggcaagcggaccttcatggccgagagacagtacacacggatggaggactggctgaccgccaagctggcctacgagggcctgagcaagacctacctgtccaagacactggcccagtacacctccaagacatgcagcaactgtgggtttaccatcaccagcgccgactacgacagggtgctggagaagctgaagaagacagcaacaggctggatgaccacaattaacggcaaggagctgaaggtggagggccagattacctactacaacagatacaagagacagaacgtagtcaaggacctgtccgtcgagctggatagactgagcgaagaatctgtgaacaacgacatctcctcctggacaaagggcagaagcggagaagctctgagcctcctgaagaaaagattctcccatagacccgtgcaggagaagttcgtgtgcctgaactgcggcttcgagacacacgcagccgagcaagccgccctgaacatcgccagatcctggctgttcctgcggagccaggagtacaagaaataccagacaaacaagacaaccggcaacaccgataagagagccttcgtcgagacctggcagtccttttaccggaagaagcttaaggaggtgtggaaacctgccgtgcggtctggcggatctggcggaggctccctgaggggcctggtgaccttcgaggacgtggccgtggagttcacccaggaggagtgggccctgctggaccccgcccagaggaccctgtacagggacgtgatgctggagaactgcaggaacctggccagcctgggctgcagggtgaacaagcccagcctgatcagccagctggagcaggacaagaaggtgatcaccgaggagaggggcatcctgcccagcacctgccccgacctggagaccctgggcggcccaagcagcggcgcccctcctcccagcggcggcagcccagccggctccccaacctctaccgaggagggcacctctgagtccgccacccccgagagcggccctggcacctccaccgagcccagcgagggcagcgcacccggcagccctgccggcagccccacctccacagaggagggaaccagcaccgagcccagcgaaggcagcgccccaggcaccagcaccgagcctagtgagcaggagattaaacggatcaacaagatcagaagaagacttgtgaaagacagcaacaccaagaaggccggcaagacaggccccatgaaaaccctgctggttagagtgatgacacccgatctgagagagcggctggaaaacctgagaaagaagcctgaaaatatcccccagcccatcagcaatacatctagagccaacctgaataagctgctgaccgattacaccgaaatgaagaaggcgatcctgcatgtgtactgggaagagttccagaaggaccctgtgggcctgatgagccgggtggcccagcctgccagcaagaagatcgatcagaacaagctgaaacctgagatggacgagaagggcaacctgaccaccgccggctttgcctgctctcagtgtggccagcccctgttcgtgtacaagctggagcaggtgtctgagaagggcaaggcttacaccaactacttcggacggtgcaatgtggccgagcacgaaaagctgatcctgctggcccagctgaagcccgagaaggatagcgacgaagccgtgacatatagcctgggaaagtttgggcagagggccctggatttctacagcattcatgtgaccaaggagtccacccaccccgtgaagcccctggcccagatcgccggaaacagatacgcctccggacctgtgggaaaggccctgagcgacgcatgtatgggcacaatcgcctccttcctgtctaagtaccaggacatcatcatcgaacaccagaaggtggtgaagggcaaccagaagagactggagagcctgcgggagctggccggcaaggaaaacctggaataccctagcgtgaccctgccacctcagcctcacaccaaggagggcgttgatgcctacaacgaagtgatcgcccgggtgcgaatgtgggtgaacctgaacctgtggcagaagctgaagctaagcagagatgatgccaagcctctgctgagactgaagggattcccttcctttcctctggtcgagagacaggccaacgaagtggactggtgggacatggtgtgtaacgtgaagaagctgatcaacgagaaaaaggaggatggcaaggtgttttggcagaatctggctggctacaagagacaggaagccctgagaccatacctgagcagcgaggaagatcggaagaagggaaagaaattcgctcggtaccagctgggcgacctgctgctgcacctggaaaagaagcacggcgaggactggggaaaggtgtacgacgaggcctgggagcggattgacaagaaagtggaaggcctgagcaagcacatcaagctggaagaggaacggagaagcgaggacgcccagagcaaggccgccctgaccgactggctgcgggctaaggccagcttcgtgatcgagggcctgaaggaggccgacaaggacgagttctgcagatgcgagctgaagctgcagaagtggtacggggacctgcggggaaagcccttcgccatcgaagccgagaacagcatcctggacatcagcggcttcagcaagcagtacaactgtgccttcatctggcagaaggacggcgtgaagaagctgaacctgtacctgatcatcaactacttcaagggcggcaagctgcggttcaagaagatcaaacctgaagccttcgaagccaacagattctacaccgtgatcaacaaaaagagcggcgagatcgtgcccatggaggtgaacttcaacttcgacgaccccaacctgatcatcctgcctctggcctttggcaagagacagggcagagaattcatctggaacgacctgctgtccctggaaaccggcagcctgaagctggccaacggaagagtgatcgagaagacactgtacaacagaagaacccggcaggatgagcctgccctgttcgtggccctgaccttcgagcggcgggaggtcctggactcctccaatatcaaaccaatgaacctgatcggcgtggcaagaggcgaaaacatccccgccgtgatcgccctgaccgaccccgagggctgcccactgagccggtttaaggatagcctgggaaacccaacccacatcctgagaatcggcgagagctataaggagaagcagcggaccatccaggccaagaaggaggtggagcagcggagagccggcggctacagccggaagtacgccagcaaagccaagaatctggcagacgatatggtgagaaacaccgctagagatctgctgtactacgccgtgacccaggatgccatgctgatcttcgccaacctgagccggggcttcggccggcagggcaagcggaccttcatggccgagagacagtacacacggatggaggactggctgaccgccaagctggcctacgagggcctgagcaagacctacctgtccaagacactggcccagtacacctccaagacatgcagcaactgtgggtttaccatcaccagcgccgactacgacagggtgctggagaagctgaagaagacagcaacaggctggatgaccacaattaacggcaaggagctgaaggtggagggccagattacctactacaacagatacaagagacagaacgtagtcaaggacctgtccgtcgagctggatagactgagcgaagaatctgtgaacaacgacatctcctcctggacaaagggcagaagcggagaagctctgagcctcctgaagaaaagattctcccatagacccgtgcaggagaagttcgtgtgcctgaactgcggcttcgagacacacgcagccgagcaagccgccctgaacatcgccagatcctggctgttcctgcggagccaggagtacaagaaataccagacaaacaagacaaccggcaacaccgataagagagccttcgtcgagacctggcagtccttttaccggaagaagcttaaggaggtgtggaaacctgccgtgcggtctggcggatctggcggaggctcctctgaggggcctggtgaccttcgaggacgtggccgtggagttcacccaggaggagtgggccctgctggaccccgcccagaggaccctgtacagggacgtgatgctggagaactgcaggaacctggccagcctgggctgcagggtgaacaagcccagcctgatcagccagctggagcaggacaagaaggtgatcaccgaggagaggggcatcctgcccagcacctgccccgacctggagaccctgggatctggctccggcagcggccccaagaaaaagagaaaagtctaagctgccttctgcggggcttgccttctggccatgcccttcttctctcccttgcacctgtacctcttggtctttgaataaagcctgagtaggaaggctagcaaaaaaaaaaaaaaaaaaaaaaaaaaaaaaaaaaaaaaaaaaaaaaaaaaaaaaaaaaaaaaaaaaaaaaaaaaaaaaaa

SEQ ID NO: 16062 - RNA, 9485 nt, synthetic construct
  source 1..9485: mol_type = other RNA
aggaaataagagagaaaagaagagtaagaagaaatataagagccaccatggcccctaagaagaagcgtaaagtgagccggatggaacgcctcgtctacgaggtgcggcagaagtgcagaaacatcgaggacatctgcatctcctgcggatctctgaacgtgaccctggagcacccactgttcatcggcggcatgtgccagaactgtaaaaactgttttctggagtgtgcctatcaatacgacgatgacggctaccagagctactgcaccatctgttgcggcggaagagaggtgctgatgtgtggaaataacaactgctgccggtgcttctgcgtggaatgcgtggacctgctggtgggccccggcgccgcccaggccgctattaaggaagatccttggaactgctacatgtgcggccacaagggcacatacggcctgctgagacggagagaggactggcctagcagactgcagatgttcttcgccaataaccacgaccaggagttcgacccccctaaggtgtaccctcccgtccccgccgagaagagaaagcccatccgggtcctgagcctgttcgatggcatcgccaccggtctgctggtgctgaaggacctgggcatccaggtggataggtacattgcctccgaggtgtgcgaggactccatcaccgtgggaatggtgcgtcatcagggcaagatcatgtacgtgggcgacgtgcggagcgtgacacagaagcatatccaggagtggggccctttcgacctggtgatcggcggcagcccttgcaatgacctgagcatcgtgaacccagcccggaagggcctgtacgagggaaccggcagactgttcttcgagttttacagactgctgcacgacgcccggcctaaggaaggcgacgaccggcccttcttttggctgttcgagaatgtggtggccatgggagtcagcgacaagcgggatattagccggttcctggagagcaaccccgtgatgatcgatgccaaggaagtgagcgccgcccaccgggccagatacttctggggcaatctgcctggcatgaacagacccctggccagcaccgtgaacgacaagctggagctgcaggagtgcctggagcacggccggatcgccaagttcagcaaggtgagaaccatcaccacccgaagcaacagcatcaaacaaggcaaggaccagcactttcctgtgttcatgaacgagaaggaggacatcctgtggtgtaccgagatggagagagtgttcgggttcccagtccactacacagatgtcagcaacatgtctagactggccagacagagactgctgggaagaagctggtccgtccctgtgatcagacacctgttcgcccctctgaaggagtacttcgcctgcgtgagcagcggcaacagcaacgccaacagccggggccccagcttctctagcggcctggtgccactgtccctgagagggagccacatgggccccatggagatctacaaaaccgtgagcgcctggaagcggcagcctgtgcgcgtgctgagcctgtttcggaatatcgataaagtcctgaaaagcctgggattcctggagagcggctctggctccggcggtggcaccctgaagtacgtggaggatgtgacaaacgtggtcagacgggatgtggagaagtggggccccttcgatctggtgtacggcagcacccaacccctgggcagctcttgtgaccggtgccctggctggtacatgtttcagttccaccggatcctgcagtacgccctgccgagacaggagtcccagcggccattcttttggattttcatggacaacttgctgctgaccgaggatgaccaggaaactaccactcggttcctgcagaccgaagccgtgaccctgcaggacgtgagaggccgggactaccagaacgccatgcgggtgtggtccaacatccctggactgaaaagcaagcacgcacctctgacccctaaagaagaggagtacctgcaggcccaggtgcggagcagaagcaagctggacgcccctaaggtggatctgctggtgaagaattgcctcctgcccctgagagagtacttcaagtatttcagccagaatagtctgcccctgggaggcagcggcggcggcgccctggtgacatttgaggacgtcgccgtgcggttcacccaggaggaatgggctctgctggatccttctcagaaaatcctgtaccgggacgtgatgagagagacataccggaatctgacctccgtgggcatcaactgggaatgttgggaccttgaagcctgcttcagaagcctgggaagaaacctgagagtgcaggtggtgaagagaaagtgcgagctgaccaacagcggcccctgcgccgagggcggcccaagcagcggcgcccctcctcccagcggcggcagcccagccggctccccaacctctaccgaggagggcacctctgagtccgccacccccgagagcggccctggcacctccaccgagcccagcgagggcagcgcacccggcagccctgccggcagccccacctccacagaggagggaaccagcaccgagcccagcgaaggcagcgccccaggcaccagcaccgagcctagtgagcaggagattaaacggatcaacaagatcagaagaagacttgtgaaagacagcaacaccaagaaggccggcaagacaggccccatgaaaaccctgctggttagagtgatgacacccgatctgagagagcggctggaaaacctgagaaagaagcctgaaaatatcccccagcccatcagcaatacatctagagccaacctgaataagctgctgaccgattacaccgaaatgaagaaggcgatcctgcatgtgtactgggaagagttccagaaggaccctgtgggcctgatgagccgggtggcccagcctgccagcaagaagatcgatcagaacaagctgaaacctgagatggacgagaagggcaacctgaccaccgccggctttgcctgctctcagtgtggccagcccctgttcgtgtacaagctggagcaggtgtctgagaagggcaaggcttacaccaactacttcggacggtgcaatgtggccgagcacgaaaagctgatcctgctggcccagctgaagcccgagaaggatagcgacgaagccgtgacatatagcctgggaaagtttgggcagagggccctggatttctacagcattcatgtgaccaaggagtccacccaccccgtgaagcccctggcccagatcgccggaaacagatacgcctccggacctgtgggaaaggccctgagcgacgcatgtatgggcacaatcgcctccttcctgtctaagtaccaggacatcatcatcgaacaccagaaggtggtgaagggcaaccagaagagactggagagcctgcgggagctggccggcaaggaaaacctggaataccctagcgtgaccctgccacctcagcctcacaccaaggagggcgttgatgcctacaacgaagtgatcgcccgggtgcgaatgtgggtgaacctgaacctgtggcagaagctgaagctaagcagagatgatgccaagcctctgctgagactgaagggattcccttcctttcctctggtcgagagacaggccaacgaagtggactggtgggacatggtgtgtaacgtgaagaagctgatcaacgagaaaaaggaggatggcaaggtgttttggcagaatctggctggctacaagagacaggaagccctgagaccatacctgagcagcgaggaagatcggaagaagggaaagaaattcgctcggtaccagctgggcgacctgctgctgcacctggaaaagaagcacggcgaggactggggaaaggtgtacgacgaggcctgggagcggattgacaagaaagtggaaggcctgagcaagcacatcaagctggaagaggaacggagaagcgaggacgcccagagcaaggccgccctgaccgactggctgcgggctaaggccagcttcgtgatcgagggcctgaaggaggccgacaaggacgagttctgcagatgcgagctgaagctgcagaagtggtacggggacctgcggggaaagcccttcgccatcgaagccgagaacagcatcctggacatcagcggcttcagcaagcagtacaactgtgccttcatctggcagaaggacggcgtgaagaagctgaacctgtacctgatcatcaactacttcaagggcggcaagctgcggttcaagaagatcaaacctgaagccttcgaagccaacagattctacaccgtgatcaacaaaaagagcggcgagatcgtgcccatggaggtgaacttcaacttcgacgaccccaacctgatcatcctgcctctggcctttggcaagagacagggcagagaattcatctggaacgacctgctgtccctggaaaccggcagcctgaagctggccaacggaagagtgatcgagaagacactgtacaacagaagaacccggcaggatgagcctgccctgttcgtggccctgaccttcgagcggcgggaggtcctggactcctccaatatcaaaccaatgaacctgatcggcgtggcaagaggcgaaaacatccccgccgtgatcgccctgaccgaccccgagggctgcccactgagccggtttaaggatagcctgggaaacccaacccacatcctgagaatcggcgagagctataaggagaagcagcggaccatccaggccaagaaggaggtggagcagcggagagccggcggctacagccggaagtacgccagcaaagccaagaatctggcagacgatatggtgagaaacaccgctagagatctgctgtactacgccgtgacccaggatgccatgctgatcttcgccaacctgagccggggcttcggccggcagggcaagcggaccttcatggccgagagacagtacacacggatggaggactggctgaccgccaagctggcctacgagggcctgagcaagacctacctgtccaagacactggcccagtacacctccaagacatgcagcaactgtgggtttaccatcaccagcgccgactacgacagggtgctggagaagctgaagaagacagcaacaggctggatgaccacaattaacggcaaggagctgaaggtggagggccagattacctactacaacagatacaagagacagaacgtagtcaaggacctgtccgtcgagctggatagactgagcgaagaatctgtgaacaacgacatctcctcctggacaaagggcagaagcggagaagctctgagcctcctgaagaaaagattctcccatagacccgtgcaggagaagttcgtgtgcctgaactgcggcttcgagacacacgcagccgagcaagccgccctgaacatcgccagatcctggctgttcctgcggagccaggagtacaagaaataccagacaaacaagacaaccggcaacaccgataagagagccttcgtcgagacctggcagtccttttaccggaagaagcttaaggaggtgtggaaacctgccgtgcggtctggcggatctggcggaggctccagcctggagcaggtgagcttcaaggacgtgtgcgtggacttcacccaggaggagtggtacctgctggaccccgcccagaagatcctgtacagggacgtgatcctggagaactacagcaacatcgtgagcgtgggccactgcggcaccaagcccgaggtgatcttcaagatcgagcagggcgaggagccctgggtgctgggcgagggcttcagcagcctgcagcaccccgagaggaactggaagggcggcccaagcagcggcgcccctcctcccagcggcggcagcccagccggctccccaacctctaccgaggagggcacctctgagtccgccacccccgagagcggccctggcacctccaccgagcccagcgagggcagcgcacccggcagccctgccggcagccccacctccacagaggagggaaccagcaccgagcccagcgaaggcagcgccccaggcaccagcaccgagcctagtgagcaggagattaaacggatcaacaagatcagaagaagacttgtgaaagacagcaacaccaagaaggccggcaagacaggccccatgaaaaccctgctggttagagtgatgacacccgatctgagagagcggctggaaaacctgagaaagaagcctgaaaatatcccccagcccatcagcaatacatctagagccaacctgaataagctgctgaccgattacaccgaaatgaagaaggcgatcctgcatgtgtactgggaagagttccagaaggaccctgtgggcctgatgagccgggtggcccagcctgccagcaagaagatcgatcagaacaagctgaaacctgagatggacgagaagggcaacctgaccaccgccggctttgcctgctctcagtgtggccagcccctgttcgtgtacaagctggagcaggtgtctgagaagggcaaggcttacaccaactacttcggacggtgcaatgtggccgagcacgaaaagctgatcctgctggcccagctgaagcccgagaaggatagcgacgaagccgtgacatatagcctgggaaagtttgggcagagggccctggatttctacagcattcatgtgaccaaggagtccacccaccccgtgaagcccctggcccagatcgccggaaacagatacgcctccggacctgtgggaaaggccctgagcgacgcatgtatgggcacaatcgcctccttcctgtctaagtaccaggacatcatcatcgaacaccagaaggtggtgaagggcaaccagaagagactggagagcctgcgggagctggccggcaaggaaaacctggaataccctagcgtgaccctgccacctcagcctcacaccaaggagggcgttgatgcctacaacgaagtgatcgcccgggtgcgaatgtgggtgaacctgaacctgtggcagaagctgaagctaagcagagatgatgccaagcctctgctgagactgaagggattcccttcctttcctctggtcgagagacaggccaacgaagtggactggtgggacatggtgtgtaacgtgaagaagctgatcaacgagaaaaaggaggatggcaaggtgttttggcagaatctggctggctacaagagacaggaagccctgagaccatacctgagcagcgaggaagatcggaagaagggaaagaaattcgctcggtaccagctgggcgacctgctgctgcacctggaaaagaagcacggcgaggactggggaaaggtgtacgacgaggcctgggagcggattgacaagaaagtggaaggcctgagcaagcacatcaagctggaagaggaacggagaagcgaggacgcccagagcaaggccgccctgaccgactggctgcgggctaaggccagcttcgtgatcgagggcctgaaggaggccgacaaggacgagttctgcagatgcgagctgaagctgcagaagtggtacggggacctgcggggaaagcccttcgccatcgaagccgagaacagcatcctggacatcagcggcttcagcaagcagtacaactgtgccttcatctggcagaaggacggcgtgaagaagctgaacctgtacctgatcatcaactacttcaagggcggcaagctgcggttcaagaagatcaaacctgaagccttcgaagccaacagattctacaccgtgatcaacaaaaagagcggcgagatcgtgcccatggaggtgaacttcaacttcgacgaccccaacctgatcatcctgcctctggcctttggcaagagacagggcagagaattcatctggaacgacctgctgtccctggaaaccggcagcctgaagctggccaacggaagagtgatcgagaagacactgtacaacagaagaacccggcaggatgagcctgccctgttcgtggccctgaccttcgagcggcgggaggtcctggactcctccaatatcaaaccaatgaacctgatcggcgtggcaagaggcgaaaacatccccgccgtgatcgccctgaccgaccccgagggctgcccactgagccggtttaaggatagcctgggaaacccaacccacatcctgagaatcggcgagagctataaggagaagcagcggaccatccaggccaagaaggaggtggagcagcggagagccggcggctacagccggaagtacgccagcaaagccaagaatctggcagacgatatggtgagaaacaccgctagagatctgctgtactacgccgtgacccaggatgccatgctgatcttcgccaacctgagccggggcttcggccggcagggcaagcggaccttcatggccgagagacagtacacacggatggaggactggctgaccgccaagctggcctacgagggcctgagcaagacctacctgtccaagacactggcccagtacacctccaagacatgcagcaactgtgggtttaccatcaccagcgccgactacgacagggtgctggagaagctgaagaagacagcaacaggctggatgaccacaattaacggcaaggagctgaaggtggagggccagattacctactacaacagatacaagagacagaacgtagtcaaggacctgtccgtcgagctggatagactgagcgaagaatctgtgaacaacgacatctcctcctggacaaagggcagaagcggagaagctctgagcctcctgaagaaaagattctcccatagacccgtgcaggagaagttcgtgtgcctgaactgcggcttcgagacacacgcagccgagcaagccgccctgaacatcgccagatcctggctgttcctgcggagccaggagtacaagaaataccagacaaacaagacaaccggcaacaccgataagagagccttcgtcgagacctggcagtccttttaccggaagaagcttaaggaggtgtggaaacctgccgtgcggtctggcggatctggcggaggctcctagcctggagcaggtgagcttcaaggacgtgtgcgtggacttcacccaggaggagtggtacctgctggaccccgcccagaagatcctgtacagggacgtgatcctggagaactacagcaacatcgtgagcgtgggccactgcggcaccaagcccgaggtgatcttcaagatcgagcagggcgaggagccctgggtgctgggcgagggcttcagcagcctgcagcaccccgagaggaactggaagggatctggctccggcagcggccccaagaaaaagagaaaagtctaagctgccttctgcggggcttgccttctggccatgcccttcttctctcccttgcacctgtacctcttggtctttgaataaagcctgagtaggaaggctagcaaaaaaaaaaaaaaaaaaaaaaaaaaaaaaaaaaaaaaaaaaaaaaaaaaaaaaaaaaaaaaaaaaaaaaaaaaaaaaaa

SEQ ID NO: 16063 - RNA, 9485 nt, synthetic construct
  source 1..9485: mol_type = other RNA
aggaaataagagagaaaagaagagtaagaagaaatataagagccaccatggcccctaagaagaagcgtaaagtgagccggatggaacgcctcgtctacgaggtgcggcagaagtgcagaaacatcgaggacatctgcatctcctgcggatctctgaacgtgaccctggagcacccactgttcatcggcggcatgtgccagaactgtaaaaactgttttctggagtgtgcctatcaatacgacgatgacggctaccagagctactgcaccatctgttgcggcggaagagaggtgctgatgtgtggaaataacaactgctgccggtgcttctgcgtggaatgcgtggacctgctggtgggccccggcgccgcccaggccgctattaaggaagatccttggaactgctacatgtgcggccacaagggcacatacggcctgctgagacggagagaggactggcctagcagactgcagatgttcttcgccaataaccacgaccaggagttcgacccccctaaggtgtaccctcccgtccccgccgagaagagaaagcccatccgggtcctgagcctgttcgatggcatcgccaccggtctgctggtgctgaaggacctgggcatccaggtggataggtacattgcctccgaggtgtgcgaggactccatcaccgtgggaatggtgcgtcatcagggcaagatcatgtacgtgggcgacgtgcggagcgtgacacagaagcatatccaggagtggggccctttcgacctggtgatcggcggcagcccttgcaatgacctgagcatcgtgaacccagcccggaagggcctgtacgagggaaccggcagactgttcttcgagttttacagactgctgcacgacgcccggcctaaggaaggcgacgaccggcccttcttttggctgttcgagaatgtggtggccatgggagtcagcgacaagcgggatattagccggttcctggagagcaaccccgtgatgatcgatgccaaggaagtgagcgccgcccaccgggccagatacttctggggcaatctgcctggcatgaacagacccctggccagcaccgtgaacgacaagctggagctgcaggagtgcctggagcacggccggatcgccaagttcagcaaggtgagaaccatcaccacccgaagcaacagcatcaaacaaggcaaggaccagcactttcctgtgttcatgaacgagaaggaggacatcctgtggtgtaccgagatggagagagtgttcgggttcccagtccactacacagatgtcagcaacatgtctagactggccagacagagactgctgggaagaagctggtccgtccctgtgatcagacacctgttcgcccctctgaaggagtacttcgcctgcgtgagcagcggcaacagcaacgccaacagccggggccccagcttctctagcggcctggtgccactgtccctgagagggagccacatgggccccatggagatctacaaaaccgtgagcgcctggaagcggcagcctgtgcgcgtgctgagcctgtttcggaatatcgataaagtcctgaaaagcctgggattcctggagagcggctctggctccggcggtggcaccctgaagtacgtggaggatgtgacaaacgtggtcagacgggatgtggagaagtggggccccttcgatctggtgtacggcagcacccaacccctgggcagctcttgtgaccggtgccctggctggtacatgtttcagttccaccggatcctgcagtacgccctgccgagacaggagtcccagcggccattcttttggattttcatggacaacttgctgctgaccgaggatgaccaggaaactaccactcggttcctgcagaccgaagccgtgaccctgcaggacgtgagaggccgggactaccagaacgccatgcgggtgtggtccaacatccctggactgaaaagcaagcacgcacctctgacccctaaagaagaggagtacctgcaggcccaggtgcggagcagaagcaagctggacgcccctaaggtggatctgctggtgaagaattgcctcctgcccctgagagagtacttcaagtatttcagccagaatagtctgcccctgggaggcagcggcggcggcgccctggtgacatttgaggacgtcgccgtgcggttcacccaggaggaatgggctctgctggatccttctcagaaaatcctgtaccgggacgtgatgagagagacataccggaatctgacctccgtgggcatcaactgggaatgttgggaccttgaagcctgcttcagaagcctgggaagaaacctgagagtgcaggtggtgaagagaaagtgcgagctgaccaacagcggcccctgcgccgagggcggcccaagcagcggcgcccctcctcccagcggcggcagcccagccggctccccaacctctaccgaggagggcacctctgagtccgccacccccgagagcggccctggcacctccaccgagcccagcgagggcagcgcacccggcagccctgccggcagccccacctccacagaggagggaaccagcaccgagcccagcgaaggcagcgccccaggcaccagcaccgagcctagtgagcaggagattaaacggatcaacaagatcagaagaagacttgtgaaagacagcaacaccaagaaggccggcaagacaggccccatgaaaaccctgctggttagagtgatgacacccgatctgagagagcggctggaaaacctgagaaagaagcctgaaaatatcccccagcccatcagcaatacatctagagccaacctgaataagctgctgaccgattacaccgaaatgaagaaggcgatcctgcatgtgtactgggaagagttccagaaggaccctgtgggcctgatgagccgggtggcccagcctgccagcaagaagatcgatcagaacaagctgaaacctgagatggacgagaagggcaacctgaccaccgccggctttgcctgctctcagtgtggccagcccctgttcgtgtacaagctggagcaggtgtctgagaagggcaaggcttacaccaactacttcggacggtgcaatgtggccgagcacgaaaagctgatcctgctggcccagctgaagcccgagaaggatagcgacgaagccgtgacatatagcctgggaaagtttgggcagagggccctggatttctacagcattcatgtgaccaaggagtccacccaccccgtgaagcccctggcccagatcgccggaaacagatacgcctccggacctgtgggaaaggccctgagcgacgcatgtatgggcacaatcgcctccttcctgtctaagtaccaggacatcatcatcgaacaccagaaggtggtgaagggcaaccagaagagactggagagcctgcgggagctggccggcaaggaaaacctggaataccctagcgtgaccctgccacctcagcctcacaccaaggagggcgttgatgcctacaacgaagtgatcgcccgggtgcgaatgtgggtgaacctgaacctgtggcagaagctgaagctaagcagagatgatgccaagcctctgctgagactgaagggattcccttcctttcctctggtcgagagacaggccaacgaagtggactggtgggacatggtgtgtaacgtgaagaagctgatcaacgagaaaaaggaggatggcaaggtgttttggcagaatctggctggctacaagagacaggaagccctgagaccatacctgagcagcgaggaagatcggaagaagggaaagaaattcgctcggtaccagctgggcgacctgctgctgcacctggaaaagaagcacggcgaggactggggaaaggtgtacgacgaggcctgggagcggattgacaagaaagtggaaggcctgagcaagcacatcaagctggaagaggaacggagaagcgaggacgcccagagcaaggccgccctgaccgactggctgcgggctaaggccagcttcgtgatcgagggcctgaaggaggccgacaaggacgagttctgcagatgcgagctgaagctgcagaagtggtacggggacctgcggggaaagcccttcgccatcgaagccgagaacagcatcctggacatcagcggcttcagcaagcagtacaactgtgccttcatctggcagaaggacggcgtgaagaagctgaacctgtacctgatcatcaactacttcaagggcggcaagctgcggttcaagaagatcaaacctgaagccttcgaagccaacagattctacaccgtgatcaacaaaaagagcggcgagatcgtgcccatggaggtgaacttcaacttcgacgaccccaacctgatcatcctgcctctggcctttggcaagagacagggcagagaattcatctggaacgacctgctgtccctggaaaccggcagcctgaagctggccaacggaagagtgatcgagaagacactgtacaacagaagaacccggcaggatgagcctgccctgttcgtggccctgaccttcgagcggcgggaggtcctggactcctccaatatcaaaccaatgaacctgatcggcgtggcaagaggcgaaaacatccccgccgtgatcgccctgaccgaccccgagggctgcccactgagccggtttaaggatagcctgggaaacccaacccacatcctgagaatcggcgagagctataaggagaagcagcggaccatccaggccaagaaggaggtggagcagcggagagccggcggctacagccggaagtacgccagcaaagccaagaatctggcagacgatatggtgagaaacaccgctagagatctgctgtactacgccgtgacccaggatgccatgctgatcttcgccaacctgagccggggcttcggccggcagggcaagcggaccttcatggccgagagacagtacacacggatggaggactggctgaccgccaagctggcctacgagggcctgagcaagacctacctgtccaagacactggcccagtacacctccaagacatgcagcaactgtgggtttaccatcaccagcgccgactacgacagggtgctggagaagctgaagaagacagcaacaggctggatgaccacaattaacggcaaggagctgaaggtggagggccagattacctactacaacagatacaagagacagaacgtagtcaaggacctgtccgtcgagctggatagactgagcgaagaatctgtgaacaacgacatctcctcctggacaaagggcagaagcggagaagctctgagcctcctgaagaaaagattctcccatagacccgtgcaggagaagttcgtgtgcctgaactgcggcttcgagacacacgcagccgagcaagccgccctgaacatcgccagatcctggctgttcctgcggagccaggagtacaagaaataccagacaaacaagacaaccggcaacaccgataagagagccttcgtcgagacctggcagtccttttaccggaagaagcttaaggaggtgtggaaacctgccgtgcggtctggcggatctggcggaggctccctgaagggcctggtgaccttcgaggacgtggccgtggagttcacccaggaggagtgggccctgctggaccccgcccagaggaccctgtacagggacgtgatgctggagaacttcaggaacctggccagcctgggcaaccaggtggacaagcccggcctgatcagccagctggagcaggaggacaaggtgatgaccgaggagaggggcatcttccccggcgcctgccccgacgtggagaaccccggcggcccaagcagcggcgcccctcctcccagcggcggcagcccagccggctccccaacctctaccgaggagggcacctctgagtccgccacccccgagagcggccctggcacctccaccgagcccagcgagggcagcgcacccggcagccctgccggcagccccacctccacagaggagggaaccagcaccgagcccagcgaaggcagcgccccaggcaccagcaccgagcctagtgagcaggagattaaacggatcaacaagatcagaagaagacttgtgaaagacagcaacaccaagaaggccggcaagacaggccccatgaaaaccctgctggttagagtgatgacacccgatctgagagagcggctggaaaacctgagaaagaagcctgaaaatatcccccagcccatcagcaatacatctagagccaacctgaataagctgctgaccgattacaccgaaatgaagaaggcgatcctgcatgtgtactgggaagagttccagaaggaccctgtgggcctgatgagccgggtggcccagcctgccagcaagaagatcgatcagaacaagctgaaacctgagatggacgagaagggcaacctgaccaccgccggctttgcctgctctcagtgtggccagcccctgttcgtgtacaagctggagcaggtgtctgagaagggcaaggcttacaccaactacttcggacggtgcaatgtggccgagcacgaaaagctgatcctgctggcccagctgaagcccgagaaggatagcgacgaagccgtgacatatagcctgggaaagtttgggcagagggccctggatttctacagcattcatgtgaccaaggagtccacccaccccgtgaagcccctggcccagatcgccggaaacagatacgcctccggacctgtgggaaaggccctgagcgacgcatgtatgggcacaatcgcctccttcctgtctaagtaccaggacatcatcatcgaacaccagaaggtggtgaagggcaaccagaagagactggagagcctgcgggagctggccggcaaggaaaacctggaataccctagcgtgaccctgccacctcagcctcacaccaaggagggcgttgatgcctacaacgaagtgatcgcccgggtgcgaatgtgggtgaacctgaacctgtggcagaagctgaagctaagcagagatgatgccaagcctctgctgagactgaagggattcccttcctttcctctggtcgagagacaggccaacgaagtggactggtgggacatggtgtgtaacgtgaagaagctgatcaacgagaaaaaggaggatggcaaggtgttttggcagaatctggctggctacaagagacaggaagccctgagaccatacctgagcagcgaggaagatcggaagaagggaaagaaattcgctcggtaccagctgggcgacctgctgctgcacctggaaaagaagcacggcgaggactggggaaaggtgtacgacgaggcctgggagcggattgacaagaaagtggaaggcctgagcaagcacatcaagctggaagaggaacggagaagcgaggacgcccagagcaaggccgccctgaccgactggctgcgggctaaggccagcttcgtgatcgagggcctgaaggaggccgacaaggacgagttctgcagatgcgagctgaagctgcagaagtggtacggggacctgcggggaaagcccttcgccatcgaagccgagaacagcatcctggacatcagcggcttcagcaagcagtacaactgtgccttcatctggcagaaggacggcgtgaagaagctgaacctgtacctgatcatcaactacttcaagggcggcaagctgcggttcaagaagatcaaacctgaagccttcgaagccaacagattctacaccgtgatcaacaaaaagagcggcgagatcgtgcccatggaggtgaacttcaacttcgacgaccccaacctgatcatcctgcctctggcctttggcaagagacagggcagagaattcatctggaacgacctgctgtccctggaaaccggcagcctgaagctggccaacggaagagtgatcgagaagacactgtacaacagaagaacccggcaggatgagcctgccctgttcgtggccctgaccttcgagcggcgggaggtcctggactcctccaatatcaaaccaatgaacctgatcggcgtggcaagaggcgaaaacatccccgccgtgatcgccctgaccgaccccgagggctgcccactgagccggtttaaggatagcctgggaaacccaacccacatcctgagaatcggcgagagctataaggagaagcagcggaccatccaggccaagaaggaggtggagcagcggagagccggcggctacagccggaagtacgccagcaaagccaagaatctggcagacgatatggtgagaaacaccgctagagatctgctgtactacgccgtgacccaggatgccatgctgatcttcgccaacctgagccggggcttcggccggcagggcaagcggaccttcatggccgagagacagtacacacggatggaggactggctgaccgccaagctggcctacgagggcctgagcaagacctacctgtccaagacactggcccagtacacctccaagacatgcagcaactgtgggtttaccatcaccagcgccgactacgacagggtgctggagaagctgaagaagacagcaacaggctggatgaccacaattaacggcaaggagctgaaggtggagggccagattacctactacaacagatacaagagacagaacgtagtcaaggacctgtccgtcgagctggatagactgagcgaagaatctgtgaacaacgacatctcctcctggacaaagggcagaagcggagaagctctgagcctcctgaagaaaagattctcccatagacccgtgcaggagaagttcgtgtgcctgaactgcggcttcgagacacacgcagccgagcaagccgccctgaacatcgccagatcctggctgttcctgcggagccaggagtacaagaaataccagacaaacaagacaaccggcaacaccgataagagagccttcgtcgagacctggcagtccttttaccggaagaagcttaaggaggtgtggaaacctgccgtgcggtctggcggatctggcggaggctcctctgaagggcctggtgaccttcgaggacgtggccgtggagttcacccaggaggagtgggccctgctggaccccgcccagaggaccctgtacagggacgtgatgctggagaacttcaggaacctggccagcctgggcaaccaggtggacaagcccggcctgatcagccagctggagcaggaggacaaggtgatgaccgaggagaggggcatcttccccggcgcctgccccgacgtggagaaccccggatctggctccggcagcggccccaagaaaaagagaaaagtctaagctgccttctgcggggcttgccttctggccatgcccttcttctctcccttgcacctgtacctcttggtctttgaataaagcctgagtaggaaggctagcaaaaaaaaaaaaaaaaaaaaaaaaaaaaaaaaaaaaaaaaaaaaaaaaaaaaaaaaaaaaaaaaaaaaaaaaaaaaaaaa

SEQ ID NO: 16064 - RNA, 9485 nt, synthetic construct
  source 1..9485: mol_type = other RNA
aggaaataagagagaaaagaagagtaagaagaaatataagagccaccatggcccctaagaagaagcgtaaagtgagccggatggaacgcctcgtctacgaggtgcggcagaagtgcagaaacatcgaggacatctgcatctcctgcggatctctgaacgtgaccctggagcacccactgttcatcggcggcatgtgccagaactgtaaaaactgttttctggagtgtgcctatcaatacgacgatgacggctaccagagctactgcaccatctgttgcggcggaagagaggtgctgatgtgtggaaataacaactgctgccggtgcttctgcgtggaatgcgtggacctgctggtgggccccggcgccgcccaggccgctattaaggaagatccttggaactgctacatgtgcggccacaagggcacatacggcctgctgagacggagagaggactggcctagcagactgcagatgttcttcgccaataaccacgaccaggagttcgacccccctaaggtgtaccctcccgtccccgccgagaagagaaagcccatccgggtcctgagcctgttcgatggcatcgccaccggtctgctggtgctgaaggacctgggcatccaggtggataggtacattgcctccgaggtgtgcgaggactccatcaccgtgggaatggtgcgtcatcagggcaagatcatgtacgtgggcgacgtgcggagcgtgacacagaagcatatccaggagtggggccctttcgacctggtgatcggcggcagcccttgcaatgacctgagcatcgtgaacccagcccggaagggcctgtacgagggaaccggcagactgttcttcgagttttacagactgctgcacgacgcccggcctaaggaaggcgacgaccggcccttcttttggctgttcgagaatgtggtggccatgggagtcagcgacaagcgggatattagccggttcctggagagcaaccccgtgatgatcgatgccaaggaagtgagcgccgcccaccgggccagatacttctggggcaatctgcctggcatgaacagacccctggccagcaccgtgaacgacaagctggagctgcaggagtgcctggagcacggccggatcgccaagttcagcaaggtgagaaccatcaccacccgaagcaacagcatcaaacaaggcaaggaccagcactttcctgtgttcatgaacgagaaggaggacatcctgtggtgtaccgagatggagagagtgttcgggttcccagtccactacacagatgtcagcaacatgtctagactggccagacagagactgctgggaagaagctggtccgtccctgtgatcagacacctgttcgcccctctgaaggagtacttcgcctgcgtgagcagcggcaacagcaacgccaacagccggggccccagcttctctagcggcctggtgccactgtccctgagagggagccacatgggccccatggagatctacaaaaccgtgagcgcctggaagcggcagcctgtgcgcgtgctgagcctgtttcggaatatcgataaagtcctgaaaagcctgggattcctggagagcggctctggctccggcggtggcaccctgaagtacgtggaggatgtgacaaacgtggtcagacgggatgtggagaagtggggccccttcgatctggtgtacggcagcacccaacccctgggcagctcttgtgaccggtgccctggctggtacatgtttcagttccaccggatcctgcagtacgccctgccgagacaggagtcccagcggccattcttttggattttcatggacaacttgctgctgaccgaggatgaccaggaaactaccactcggttcctgcagaccgaagccgtgaccctgcaggacgtgagaggccgggactaccagaacgccatgcgggtgtggtccaacatccctggactgaaaagcaagcacgcacctctgacccctaaagaagaggagtacctgcaggcccaggtgcggagcagaagcaagctggacgcccctaaggtggatctgctggtgaagaattgcctcctgcccctgagagagtacttcaagtatttcagccagaatagtctgcccctgggaggcagcggcggcggcgccctggtgacatttgaggacgtcgccgtgcggttcacccaggaggaatgggctctgctggatccttctcagaaaatcctgtaccgggacgtgatgagagagacataccggaatctgacctccgtgggcatcaactgggaatgttgggaccttgaagcctgcttcagaagcctgggaagaaacctgagagtgcaggtggtgaagagaaagtgcgagctgaccaacagcggcccctgcgccgagggcggcccaagcagcggcgcccctcctcccagcggcggcagcccagccggctccccaacctctaccgaggagggcacctctgagtccgccacccccgagagcggccctggcacctccaccgagcccagcgagggcagcgcacccggcagccctgccggcagccccacctccacagaggagggaaccagcaccgagcccagcgaaggcagcgccccaggcaccagcaccgagcctagtgagcaggagattaaacggatcaacaagatcagaagaagacttgtgaaagacagcaacaccaagaaggccggcaagacaggccccatgaaaaccctgctggttagagtgatgacacccgatctgagagagcggctggaaaacctgagaaagaagcctgaaaatatcccccagcccatcagcaatacatctagagccaacctgaataagctgctgaccgattacaccgaaatgaagaaggcgatcctgcatgtgtactgggaagagttccagaaggaccctgtgggcctgatgagccgggtggcccagcctgccagcaagaagatcgatcagaacaagctgaaacctgagatggacgagaagggcaacctgaccaccgccggctttgcctgctctcagtgtggccagcccctgttcgtgtacaagctggagcaggtgtctgagaagggcaaggcttacaccaactacttcggacggtgcaatgtggccgagcacgaaaagctgatcctgctggcccagctgaagcccgagaaggatagcgacgaagccgtgacatatagcctgggaaagtttgggcagagggccctggatttctacagcattcatgtgaccaaggagtccacccaccccgtgaagcccctggcccagatcgccggaaacagatacgcctccggacctgtgggaaaggccctgagcgacgcatgtatgggcacaatcgcctccttcctgtctaagtaccaggacatcatcatcgaacaccagaaggtggtgaagggcaaccagaagagactggagagcctgcgggagctggccggcaaggaaaacctggaataccctagcgtgaccctgccacctcagcctcacaccaaggagggcgttgatgcctacaacgaagtgatcgcccgggtgcgaatgtgggtgaacctgaacctgtggcagaagctgaagctaagcagagatgatgccaagcctctgctgagactgaagggattcccttcctttcctctggtcgagagacaggccaacgaagtggactggtgggacatggtgtgtaacgtgaagaagctgatcaacgagaaaaaggaggatggcaaggtgttttggcagaatctggctggctacaagagacaggaagccctgagaccatacctgagcagcgaggaagatcggaagaagggaaagaaattcgctcggtaccagctgggcgacctgctgctgcacctggaaaagaagcacggcgaggactggggaaaggtgtacgacgaggcctgggagcggattgacaagaaagtggaaggcctgagcaagcacatcaagctggaagaggaacggagaagcgaggacgcccagagcaaggccgccctgaccgactggctgcgggctaaggccagcttcgtgatcgagggcctgaaggaggccgacaaggacgagttctgcagatgcgagctgaagctgcagaagtggtacggggacctgcggggaaagcccttcgccatcgaagccgagaacagcatcctggacatcagcggcttcagcaagcagtacaactgtgccttcatctggcagaaggacggcgtgaagaagctgaacctgtacctgatcatcaactacttcaagggcggcaagctgcggttcaagaagatcaaacctgaagccttcgaagccaacagattctacaccgtgatcaacaaaaagagcggcgagatcgtgcccatggaggtgaacttcaacttcgacgaccccaacctgatcatcctgcctctggcctttggcaagagacagggcagagaattcatctggaacgacctgctgtccctggaaaccggcagcctgaagctggccaacggaagagtgatcgagaagacactgtacaacagaagaacccggcaggatgagcctgccctgttcgtggccctgaccttcgagcggcgggaggtcctggactcctccaatatcaaaccaatgaacctgatcggcgtggcaagaggcgaaaacatccccgccgtgatcgccctgaccgaccccgagggctgcccactgagccggtttaaggatagcctgggaaacccaacccacatcctgagaatcggcgagagctataaggagaagcagcggaccatccaggccaagaaggaggtggagcagcggagagccggcggctacagccggaagtacgccagcaaagccaagaatctggcagacgatatggtgagaaacaccgctagagatctgctgtactacgccgtgacccaggatgccatgctgatcttcgccaacctgagccggggcttcggccggcagggcaagcggaccttcatggccgagagacagtacacacggatggaggactggctgaccgccaagctggcctacgagggcctgagcaagacctacctgtccaagacactggcccagtacacctccaagacatgcagcaactgtgggtttaccatcaccagcgccgactacgacagggtgctggagaagctgaagaagacagcaacaggctggatgaccacaattaacggcaaggagctgaaggtggagggccagattacctactacaacagatacaagagacagaacgtagtcaaggacctgtccgtcgagctggatagactgagcgaagaatctgtgaacaacgacatctcctcctggacaaagggcagaagcggagaagctctgagcctcctgaagaaaagattctcccatagacccgtgcaggagaagttcgtgtgcctgaactgcggcttcgagacacacgcagccgagcaagccgccctgaacatcgccagatcctggctgttcctgcggagccaggagtacaagaaataccagacaaacaagacaaccggcaacaccgataagagagccttcgtcgagacctggcagtccttttaccggaagaagcttaaggaggtgtggaaacctgccgtgcggtctggcggatctggcggaggctccgacaagaccatcatcgccttcggcgacgtggccgtggccttcaccgagagggagtggaagctgctgagccccgcccagaggaccctgtacagggacgtgatgctggagacctacagccacctggtgagcctgggcatcgccttcagcaagcccaagttcatcacccagctggagcagggcgacgagccctggagggaggagagcgagtgcctgctggagctgtgccccgagcccaggaccgagggcggcccaagcagcggcgcccctcctcccagcggcggcagcccagccggctccccaacctctaccgaggagggcacctctgagtccgccacccccgagagcggccctggcacctccaccgagcccagcgagggcagcgcacccggcagccctgccggcagccccacctccacagaggagggaaccagcaccgagcccagcgaaggcagcgccccaggcaccagcaccgagcctagtgagcaggagattaaacggatcaacaagatcagaagaagacttgtgaaagacagcaacaccaagaaggccggcaagacaggccccatgaaaaccctgctggttagagtgatgacacccgatctgagagagcggctggaaaacctgagaaagaagcctgaaaatatcccccagcccatcagcaatacatctagagccaacctgaataagctgctgaccgattacaccgaaatgaagaaggcgatcctgcatgtgtactgggaagagttccagaaggaccctgtgggcctgatgagccgggtggcccagcctgccagcaagaagatcgatcagaacaagctgaaacctgagatggacgagaagggcaacctgaccaccgccggctttgcctgctctcagtgtggccagcccctgttcgtgtacaagctggagcaggtgtctgagaagggcaaggcttacaccaactacttcggacggtgcaatgtggccgagcacgaaaagctgatcctgctggcccagctgaagcccgagaaggatagcgacgaagccgtgacatatagcctgggaaagtttgggcagagggccctggatttctacagcattcatgtgaccaaggagtccacccaccccgtgaagcccctggcccagatcgccggaaacagatacgcctccggacctgtgggaaaggccctgagcgacgcatgtatgggcacaatcgcctccttcctgtctaagtaccaggacatcatcatcgaacaccagaaggtggtgaagggcaaccagaagagactggagagcctgcgggagctggccggcaaggaaaacctggaataccctagcgtgaccctgccacctcagcctcacaccaaggagggcgttgatgcctacaacgaagtgatcgcccgggtgcgaatgtgggtgaacctgaacctgtggcagaagctgaagctaagcagagatgatgccaagcctctgctgagactgaagggattcccttcctttcctctggtcgagagacaggccaacgaagtggactggtgggacatggtgtgtaacgtgaagaagctgatcaacgagaaaaaggaggatggcaaggtgttttggcagaatctggctggctacaagagacaggaagccctgagaccatacctgagcagcgaggaagatcggaagaagggaaagaaattcgctcggtaccagctgggcgacctgctgctgcacctggaaaagaagcacggcgaggactggggaaaggtgtacgacgaggcctgggagcggattgacaagaaagtggaaggcctgagcaagcacatcaagctggaagaggaacggagaagcgaggacgcccagagcaaggccgccctgaccgactggctgcgggctaaggccagcttcgtgatcgagggcctgaaggaggccgacaaggacgagttctgcagatgcgagctgaagctgcagaagtggtacggggacctgcggggaaagcccttcgccatcgaagccgagaacagcatcctggacatcagcggcttcagcaagcagtacaactgtgccttcatctggcagaaggacggcgtgaagaagctgaacctgtacctgatcatcaactacttcaagggcggcaagctgcggttcaagaagatcaaacctgaagccttcgaagccaacagattctacaccgtgatcaacaaaaagagcggcgagatcgtgcccatggaggtgaacttcaacttcgacgaccccaacctgatcatcctgcctctggcctttggcaagagacagggcagagaattcatctggaacgacctgctgtccctggaaaccggcagcctgaagctggccaacggaagagtgatcgagaagacactgtacaacagaagaacccggcaggatgagcctgccctgttcgtggccctgaccttcgagcggcgggaggtcctggactcctccaatatcaaaccaatgaacctgatcggcgtggcaagaggcgaaaacatccccgccgtgatcgccctgaccgaccccgagggctgcccactgagccggtttaaggatagcctgggaaacccaacccacatcctgagaatcggcgagagctataaggagaagcagcggaccatccaggccaagaaggaggtggagcagcggagagccggcggctacagccggaagtacgccagcaaagccaagaatctggcagacgatatggtgagaaacaccgctagagatctgctgtactacgccgtgacccaggatgccatgctgatcttcgccaacctgagccggggcttcggccggcagggcaagcggaccttcatggccgagagacagtacacacggatggaggactggctgaccgccaagctggcctacgagggcctgagcaagacctacctgtccaagacactggcccagtacacctccaagacatgcagcaactgtgggtttaccatcaccagcgccgactacgacagggtgctggagaagctgaagaagacagcaacaggctggatgaccacaattaacggcaaggagctgaaggtggagggccagattacctactacaacagatacaagagacagaacgtagtcaaggacctgtccgtcgagctggatagactgagcgaagaatctgtgaacaacgacatctcctcctggacaaagggcagaagcggagaagctctgagcctcctgaagaaaagattctcccatagacccgtgcaggagaagttcgtgtgcctgaactgcggcttcgagacacacgcagccgagcaagccgccctgaacatcgccagatcctggctgttcctgcggagccaggagtacaagaaataccagacaaacaagacaaccggcaacaccgataagagagccttcgtcgagacctggcagtccttttaccggaagaagcttaaggaggtgtggaaacctgccgtgcggtctggcggatctggcggaggctcctgacaagaccatcatcgccttcggcgacgtggccgtggccttcaccgagagggagtggaagctgctgagccccgcccagaggaccctgtacagggacgtgatgctggagacctacagccacctggtgagcctgggcatcgccttcagcaagcccaagttcatcacccagctggagcagggcgacgagccctggagggaggagagcgagtgcctgctggagctgtgccccgagcccaggaccgagggatctggctccggcagcggccccaagaaaaagagaaaagtctaagctgccttctgcggggcttgccttctggccatgcccttcttctctcccttgcacctgtacctcttggtctttgaataaagcctgagtaggaaggctagcaaaaaaaaaaaaaaaaaaaaaaaaaaaaaaaaaaaaaaaaaaaaaaaaaaaaaaaaaaaaaaaaaaaaaaaaaaaaaaaa

SEQ ID NO: 16065 - RNA, 9485 nt, synthetic construct
  source 1..9485: mol_type = other RNA
aggaaataagagagaaaagaagagtaagaagaaatataagagccaccatggcccctaagaagaagcgtaaagtgagccggatggaacgcctcgtctacgaggtgcggcagaagtgcagaaacatcgaggacatctgcatctcctgcggatctctgaacgtgaccctggagcacccactgttcatcggcggcatgtgccagaactgtaaaaactgttttctggagtgtgcctatcaatacgacgatgacggctaccagagctactgcaccatctgttgcggcggaagagaggtgctgatgtgtggaaataacaactgctgccggtgcttctgcgtggaatgcgtggacctgctggtgggccccggcgccgcccaggccgctattaaggaagatccttggaactgctacatgtgcggccacaagggcacatacggcctgctgagacggagagaggactggcctagcagactgcagatgttcttcgccaataaccacgaccaggagttcgacccccctaaggtgtaccctcccgtccccgccgagaagagaaagcccatccgggtcctgagcctgttcgatggcatcgccaccggtctgctggtgctgaaggacctgggcatccaggtggataggtacattgcctccgaggtgtgcgaggactccatcaccgtgggaatggtgcgtcatcagggcaagatcatgtacgtgggcgacgtgcggagcgtgacacagaagcatatccaggagtggggccctttcgacctggtgatcggcggcagcccttgcaatgacctgagcatcgtgaacccagcccggaagggcctgtacgagggaaccggcagactgttcttcgagttttacagactgctgcacgacgcccggcctaaggaaggcgacgaccggcccttcttttggctgttcgagaatgtggtggccatgggagtcagcgacaagcgggatattagccggttcctggagagcaaccccgtgatgatcgatgccaaggaagtgagcgccgcccaccgggccagatacttctggggcaatctgcctggcatgaacagacccctggccagcaccgtgaacgacaagctggagctgcaggagtgcctggagcacggccggatcgccaagttcagcaaggtgagaaccatcaccacccgaagcaacagcatcaaacaaggcaaggaccagcactttcctgtgttcatgaacgagaaggaggacatcctgtggtgtaccgagatggagagagtgttcgggttcccagtccactacacagatgtcagcaacatgtctagactggccagacagagactgctgggaagaagctggtccgtccctgtgatcagacacctgttcgcccctctgaaggagtacttcgcctgcgtgagcagcggcaacagcaacgccaacagccggggccccagcttctctagcggcctggtgccactgtccctgagagggagccacatgggccccatggagatctacaaaaccgtgagcgcctggaagcggcagcctgtgcgcgtgctgagcctgtttcggaatatcgataaagtcctgaaaagcctgggattcctggagagcggctctggctccggcggtggcaccctgaagtacgtggaggatgtgacaaacgtggtcagacgggatgtggagaagtggggccccttcgatctggtgtacggcagcacccaacccctgggcagctcttgtgaccggtgccctggctggtacatgtttcagttccaccggatcctgcagtacgccctgccgagacaggagtcccagcggccattcttttggattttcatggacaacttgctgctgaccgaggatgaccaggaaactaccactcggttcctgcagaccgaagccgtgaccctgcaggacgtgagaggccgggactaccagaacgccatgcgggtgtggtccaacatccctggactgaaaagcaagcacgcacctctgacccctaaagaagaggagtacctgcaggcccaggtgcggagcagaagcaagctggacgcccctaaggtggatctgctggtgaagaattgcctcctgcccctgagagagtacttcaagtatttcagccagaatagtctgcccctgggaggcagcggcggcggcgccctggtgacatttgaggacgtcgccgtgcggttcacccaggaggaatgggctctgctggatccttctcagaaaatcctgtaccgggacgtgatgagagagacataccggaatctgacctccgtgggcatcaactgggaatgttgggaccttgaagcctgcttcagaagcctgggaagaaacctgagagtgcaggtggtgaagagaaagtgcgagctgaccaacagcggcccctgcgccgagggcggcccaagcagcggcgcccctcctcccagcggcggcagcccagccggctccccaacctctaccgaggagggcacctctgagtccgccacccccgagagcggccctggcacctccaccgagcccagcgagggcagcgcacccggcagccctgccggcagccccacctccacagaggagggaaccagcaccgagcccagcgaaggcagcgccccaggcaccagcaccgagcctagtgagcaggagattaaacggatcaacaagatcagaagaagacttgtgaaagacagcaacaccaagaaggccggcaagacaggccccatgaaaaccctgctggttagagtgatgacacccgatctgagagagcggctggaaaacctgagaaagaagcctgaaaatatcccccagcccatcagcaatacatctagagccaacctgaataagctgctgaccgattacaccgaaatgaagaaggcgatcctgcatgtgtactgggaagagttccagaaggaccctgtgggcctgatgagccgggtggcccagcctgccagcaagaagatcgatcagaacaagctgaaacctgagatggacgagaagggcaacctgaccaccgccggctttgcctgctctcagtgtggccagcccctgttcgtgtacaagctggagcaggtgtctgagaagggcaaggcttacaccaactacttcggacggtgcaatgtggccgagcacgaaaagctgatcctgctggcccagctgaagcccgagaaggatagcgacgaagccgtgacatatagcctgggaaagtttgggcagagggccctggatttctacagcattcatgtgaccaaggagtccacccaccccgtgaagcccctggcccagatcgccggaaacagatacgcctccggacctgtgggaaaggccctgagcgacgcatgtatgggcacaatcgcctccttcctgtctaagtaccaggacatcatcatcgaacaccagaaggtggtgaagggcaaccagaagagactggagagcctgcgggagctggccggcaaggaaaacctggaataccctagcgtgaccctgccacctcagcctcacaccaaggagggcgttgatgcctacaacgaagtgatcgcccgggtgcgaatgtgggtgaacctgaacctgtggcagaagctgaagctaagcagagatgatgccaagcctctgctgagactgaagggattcccttcctttcctctggtcgagagacaggccaacgaagtggactggtgggacatggtgtgtaacgtgaagaagctgatcaacgagaaaaaggaggatggcaaggtgttttggcagaatctggctggctacaagagacaggaagccctgagaccatacctgagcagcgaggaagatcggaagaagggaaagaaattcgctcggtaccagctgggcgacctgctgctgcacctggaaaagaagcacggcgaggactggggaaaggtgtacgacgaggcctgggagcggattgacaagaaagtggaaggcctgagcaagcacatcaagctggaagaggaacggagaagcgaggacgcccagagcaaggccgccctgaccgactggctgcgggctaaggccagcttcgtgatcgagggcctgaaggaggccgacaaggacgagttctgcagatgcgagctgaagctgcagaagtggtacggggacctgcggggaaagcccttcgccatcgaagccgagaacagcatcctggacatcagcggcttcagcaagcagtacaactgtgccttcatctggcagaaggacggcgtgaagaagctgaacctgtacctgatcatcaactacttcaagggcggcaagctgcggttcaagaagatcaaacctgaagccttcgaagccaacagattctacaccgtgatcaacaaaaagagcggcgagatcgtgcccatggaggtgaacttcaacttcgacgaccccaacctgatcatcctgcctctggcctttggcaagagacagggcagagaattcatctggaacgacctgctgtccctggaaaccggcagcctgaagctggccaacggaagagtgatcgagaagacactgtacaacagaagaacccggcaggatgagcctgccctgttcgtggccctgaccttcgagcggcgggaggtcctggactcctccaatatcaaaccaatgaacctgatcggcgtggcaagaggcgaaaacatccccgccgtgatcgccctgaccgaccccgagggctgcccactgagccggtttaaggatagcctgggaaacccaacccacatcctgagaatcggcgagagctataaggagaagcagcggaccatccaggccaagaaggaggtggagcagcggagagccggcggctacagccggaagtacgccagcaaagccaagaatctggcagacgatatggtgagaaacaccgctagagatctgctgtactacgccgtgacccaggatgccatgctgatcttcgccaacctgagccggggcttcggccggcagggcaagcggaccttcatggccgagagacagtacacacggatggaggactggctgaccgccaagctggcctacgagggcctgagcaagacctacctgtccaagacactggcccagtacacctccaagacatgcagcaactgtgggtttaccatcaccagcgccgactacgacagggtgctggagaagctgaagaagacagcaacaggctggatgaccacaattaacggcaaggagctgaaggtggagggccagattacctactacaacagatacaagagacagaacgtagtcaaggacctgtccgtcgagctggatagactgagcgaagaatctgtgaacaacgacatctcctcctggacaaagggcagaagcggagaagctctgagcctcctgaagaaaagattctcccatagacccgtgcaggagaagttcgtgtgcctgaactgcggcttcgagacacacgcagccgagcaagccgccctgaacatcgccagatcctggctgttcctgcggagccaggagtacaagaaataccagacaaacaagacaaccggcaacaccgataagagagccttcgtcgagacctggcagtccttttaccggaagaagcttaaggaggtgtggaaacctgccgtgcggtctggcggatctggcggaggctccggcaagatgcccgtgaccttcgaggacgtggccgtgtacttcagccccgaggagtgggccgagctggccggctggcagaggaggctgtacagggaggtgatgctggagaactaccaggccgtggccagcctgggctggcccgccgtgaagcccgagatcatctgcaagatggagagggaggagatgccctgcatgcccgccccccccagggccaggtggaggcacaggacccccgtgcccgccggcggcccaagcagcggcgcccctcctcccagcggcggcagcccagccggctccccaacctctaccgaggagggcacctctgagtccgccacccccgagagcggccctggcacctccaccgagcccagcgagggcagcgcacccggcagccctgccggcagccccacctccacagaggagggaaccagcaccgagcccagcgaaggcagcgccccaggcaccagcaccgagcctagtgagcaggagattaaacggatcaacaagatcagaagaagacttgtgaaagacagcaacaccaagaaggccggcaagacaggccccatgaaaaccctgctggttagagtgatgacacccgatctgagagagcggctggaaaacctgagaaagaagcctgaaaatatcccccagcccatcagcaatacatctagagccaacctgaataagctgctgaccgattacaccgaaatgaagaaggcgatcctgcatgtgtactgggaagagttccagaaggaccctgtgggcctgatgagccgggtggcccagcctgccagcaagaagatcgatcagaacaagctgaaacctgagatggacgagaagggcaacctgaccaccgccggctttgcctgctctcagtgtggccagcccctgttcgtgtacaagctggagcaggtgtctgagaagggcaaggcttacaccaactacttcggacggtgcaatgtggccgagcacgaaaagctgatcctgctggcccagctgaagcccgagaaggatagcgacgaagccgtgacatatagcctgggaaagtttgggcagagggccctggatttctacagcattcatgtgaccaaggagtccacccaccccgtgaagcccctggcccagatcgccggaaacagatacgcctccggacctgtgggaaaggccctgagcgacgcatgtatgggcacaatcgcctccttcctgtctaagtaccaggacatcatcatcgaacaccagaaggtggtgaagggcaaccagaagagactggagagcctgcgggagctggccggcaaggaaaacctggaataccctagcgtgaccctgccacctcagcctcacaccaaggagggcgttgatgcctacaacgaagtgatcgcccgggtgcgaatgtgggtgaacctgaacctgtggcagaagctgaagctaagcagagatgatgccaagcctctgctgagactgaagggattcccttcctttcctctggtcgagagacaggccaacgaagtggactggtgggacatggtgtgtaacgtgaagaagctgatcaacgagaaaaaggaggatggcaaggtgttttggcagaatctggctggctacaagagacaggaagccctgagaccatacctgagcagcgaggaagatcggaagaagggaaagaaattcgctcggtaccagctgggcgacctgctgctgcacctggaaaagaagcacggcgaggactggggaaaggtgtacgacgaggcctgggagcggattgacaagaaagtggaaggcctgagcaagcacatcaagctggaagaggaacggagaagcgaggacgcccagagcaaggccgccctgaccgactggctgcgggctaaggccagcttcgtgatcgagggcctgaaggaggccgacaaggacgagttctgcagatgcgagctgaagctgcagaagtggtacggggacctgcggggaaagcccttcgccatcgaagccgagaacagcatcctggacatcagcggcttcagcaagcagtacaactgtgccttcatctggcagaaggacggcgtgaagaagctgaacctgtacctgatcatcaactacttcaagggcggcaagctgcggttcaagaagatcaaacctgaagccttcgaagccaacagattctacaccgtgatcaacaaaaagagcggcgagatcgtgcccatggaggtgaacttcaacttcgacgaccccaacctgatcatcctgcctctggcctttggcaagagacagggcagagaattcatctggaacgacctgctgtccctggaaaccggcagcctgaagctggccaacggaagagtgatcgagaagacactgtacaacagaagaacccggcaggatgagcctgccctgttcgtggccctgaccttcgagcggcgggaggtcctggactcctccaatatcaaaccaatgaacctgatcggcgtggcaagaggcgaaaacatccccgccgtgatcgccctgaccgaccccgagggctgcccactgagccggtttaaggatagcctgggaaacccaacccacatcctgagaatcggcgagagctataaggagaagcagcggaccatccaggccaagaaggaggtggagcagcggagagccggcggctacagccggaagtacgccagcaaagccaagaatctggcagacgatatggtgagaaacaccgctagagatctgctgtactacgccgtgacccaggatgccatgctgatcttcgccaacctgagccggggcttcggccggcagggcaagcggaccttcatggccgagagacagtacacacggatggaggactggctgaccgccaagctggcctacgagggcctgagcaagacctacctgtccaagacactggcccagtacacctccaagacatgcagcaactgtgggtttaccatcaccagcgccgactacgacagggtgctggagaagctgaagaagacagcaacaggctggatgaccacaattaacggcaaggagctgaaggtggagggccagattacctactacaacagatacaagagacagaacgtagtcaaggacctgtccgtcgagctggatagactgagcgaagaatctgtgaacaacgacatctcctcctggacaaagggcagaagcggagaagctctgagcctcctgaagaaaagattctcccatagacccgtgcaggagaagttcgtgtgcctgaactgcggcttcgagacacacgcagccgagcaagccgccctgaacatcgccagatcctggctgttcctgcggagccaggagtacaagaaataccagacaaacaagacaaccggcaacaccgataagagagccttcgtcgagacctggcagtccttttaccggaagaagcttaaggaggtgtggaaacctgccgtgcggtctggcggatctggcggaggctcctggcaagatgcccgtgaccttcgaggacgtggccgtgtacttcagccccgaggagtgggccgagctggccggctggcagaggaggctgtacagggaggtgatgctggagaactaccaggccgtggccagcctgggctggcccgccgtgaagcccgagatcatctgcaagatggagagggaggagatgccctgcatgcccgccccccccagggccaggtggaggcacaggacccccgtgcccgccggatctggctccggcagcggccccaagaaaaagagaaaagtctaagctgccttctgcggggcttgccttctggccatgcccttcttctctcccttgcacctgtacctcttggtctttgaataaagcctgagtaggaaggctagcaaaaaaaaaaaaaaaaaaaaaaaaaaaaaaaaaaaaaaaaaaaaaaaaaaaaaaaaaaaaaaaaaaaaaaaaaaaaaaaa

SEQ ID NO: 16066 - RNA, 9485 nt, synthetic construct
  source 1..9485: mol_type = other RNA
aggaaataagagagaaaagaagagtaagaagaaatataagagccaccatggcccctaagaagaagcgtaaagtgagccggatggaacgcctcgtctacgaggtgcggcagaagtgcagaaacatcgaggacatctgcatctcctgcggatctctgaacgtgaccctggagcacccactgttcatcggcggcatgtgccagaactgtaaaaactgttttctggagtgtgcctatcaatacgacgatgacggctaccagagctactgcaccatctgttgcggcggaagagaggtgctgatgtgtggaaataacaactgctgccggtgcttctgcgtggaatgcgtggacctgctggtgggccccggcgccgcccaggccgctattaaggaagatccttggaactgctacatgtgcggccacaagggcacatacggcctgctgagacggagagaggactggcctagcagactgcagatgttcttcgccaataaccacgaccaggagttcgacccccctaaggtgtaccctcccgtccccgccgagaagagaaagcccatccgggtcctgagcctgttcgatggcatcgccaccggtctgctggtgctgaaggacctgggcatccaggtggataggtacattgcctccgaggtgtgcgaggactccatcaccgtgggaatggtgcgtcatcagggcaagatcatgtacgtgggcgacgtgcggagcgtgacacagaagcatatccaggagtggggccctttcgacctggtgatcggcggcagcccttgcaatgacctgagcatcgtgaacccagcccggaagggcctgtacgagggaaccggcagactgttcttcgagttttacagactgctgcacgacgcccggcctaaggaaggcgacgaccggcccttcttttggctgttcgagaatgtggtggccatgggagtcagcgacaagcgggatattagccggttcctggagagcaaccccgtgatgatcgatgccaaggaagtgagcgccgcccaccgggccagatacttctggggcaatctgcctggcatgaacagacccctggccagcaccgtgaacgacaagctggagctgcaggagtgcctggagcacggccggatcgccaagttcagcaaggtgagaaccatcaccacccgaagcaacagcatcaaacaaggcaaggaccagcactttcctgtgttcatgaacgagaaggaggacatcctgtggtgtaccgagatggagagagtgttcgggttcccagtccactacacagatgtcagcaacatgtctagactggccagacagagactgctgggaagaagctggtccgtccctgtgatcagacacctgttcgcccctctgaaggagtacttcgcctgcgtgagcagcggcaacagcaacgccaacagccggggccccagcttctctagcggcctggtgccactgtccctgagagggagccacatgggccccatggagatctacaaaaccgtgagcgcctggaagcggcagcctgtgcgcgtgctgagcctgtttcggaatatcgataaagtcctgaaaagcctgggattcctggagagcggctctggctccggcggtggcaccctgaagtacgtggaggatgtgacaaacgtggtcagacgggatgtggagaagtggggccccttcgatctggtgtacggcagcacccaacccctgggcagctcttgtgaccggtgccctggctggtacatgtttcagttccaccggatcctgcagtacgccctgccgagacaggagtcccagcggccattcttttggattttcatggacaacttgctgctgaccgaggatgaccaggaaactaccactcggttcctgcagaccgaagccgtgaccctgcaggacgtgagaggccgggactaccagaacgccatgcgggtgtggtccaacatccctggactgaaaagcaagcacgcacctctgacccctaaagaagaggagtacctgcaggcccaggtgcggagcagaagcaagctggacgcccctaaggtggatctgctggtgaagaattgcctcctgcccctgagagagtacttcaagtatttcagccagaatagtctgcccctgggaggcagcggcggcggcgccctggtgacatttgaggacgtcgccgtgcggttcacccaggaggaatgggctctgctggatccttctcagaaaatcctgtaccgggacgtgatgagagagacataccggaatctgacctccgtgggcatcaactgggaatgttgggaccttgaagcctgcttcagaagcctgggaagaaacctgagagtgcaggtggtgaagagaaagtgcgagctgaccaacagcggcccctgcgccgagggcggcccaagcagcggcgcccctcctcccagcggcggcagcccagccggctccccaacctctaccgaggagggcacctctgagtccgccacccccgagagcggccctggcacctccaccgagcccagcgagggcagcgcacccggcagccctgccggcagccccacctccacagaggagggaaccagcaccgagcccagcgaaggcagcgccccaggcaccagcaccgagcctagtgagcaggagattaaacggatcaacaagatcagaagaagacttgtgaaagacagcaacaccaagaaggccggcaagacaggccccatgaaaaccctgctggttagagtgatgacacccgatctgagagagcggctggaaaacctgagaaagaagcctgaaaatatcccccagcccatcagcaatacatctagagccaacctgaataagctgctgaccgattacaccgaaatgaagaaggcgatcctgcatgtgtactgggaagagttccagaaggaccctgtgggcctgatgagccgggtggcccagcctgccagcaagaagatcgatcagaacaagctgaaacctgagatggacgagaagggcaacctgaccaccgccggctttgcctgctctcagtgtggccagcccctgttcgtgtacaagctggagcaggtgtctgagaagggcaaggcttacaccaactacttcggacggtgcaatgtggccgagcacgaaaagctgatcctgctggcccagctgaagcccgagaaggatagcgacgaagccgtgacatatagcctgggaaagtttgggcagagggccctggatttctacagcattcatgtgaccaaggagtccacccaccccgtgaagcccctggcccagatcgccggaaacagatacgcctccggacctgtgggaaaggccctgagcgacgcatgtatgggcacaatcgcctccttcctgtctaagtaccaggacatcatcatcgaacaccagaaggtggtgaagggcaaccagaagagactggagagcctgcgggagctggccggcaaggaaaacctggaataccctagcgtgaccctgccacctcagcctcacaccaaggagggcgttgatgcctacaacgaagtgatcgcccgggtgcgaatgtgggtgaacctgaacctgtggcagaagctgaagctaagcagagatgatgccaagcctctgctgagactgaagggattcccttcctttcctctggtcgagagacaggccaacgaagtggactggtgggacatggtgtgtaacgtgaagaagctgatcaacgagaaaaaggaggatggcaaggtgttttggcagaatctggctggctacaagagacaggaagccctgagaccatacctgagcagcgaggaagatcggaagaagggaaagaaattcgctcggtaccagctgggcgacctgctgctgcacctggaaaagaagcacggcgaggactggggaaaggtgtacgacgaggcctgggagcggattgacaagaaagtggaaggcctgagcaagcacatcaagctggaagaggaacggagaagcgaggacgcccagagcaaggccgccctgaccgactggctgcgggctaaggccagcttcgtgatcgagggcctgaaggaggccgacaaggacgagttctgcagatgcgagctgaagctgcagaagtggtacggggacctgcggggaaagcccttcgccatcgaagccgagaacagcatcctggacatcagcggcttcagcaagcagtacaactgtgccttcatctggcagaaggacggcgtgaagaagctgaacctgtacctgatcatcaactacttcaagggcggcaagctgcggttcaagaagatcaaacctgaagccttcgaagccaacagattctacaccgtgatcaacaaaaagagcggcgagatcgtgcccatggaggtgaacttcaacttcgacgaccccaacctgatcatcctgcctctggcctttggcaagagacagggcagagaattcatctggaacgacctgctgtccctggaaaccggcagcctgaagctggccaacggaagagtgatcgagaagacactgtacaacagaagaacccggcaggatgagcctgccctgttcgtggccctgaccttcgagcggcgggaggtcctggactcctccaatatcaaaccaatgaacctgatcggcgtggcaagaggcgaaaacatccccgccgtgatcgccctgaccgaccccgagggctgcccactgagccggtttaaggatagcctgggaaacccaacccacatcctgagaatcggcgagagctataaggagaagcagcggaccatccaggccaagaaggaggtggagcagcggagagccggcggctacagccggaagtacgccagcaaagccaagaatctggcagacgatatggtgagaaacaccgctagagatctgctgtactacgccgtgacccaggatgccatgctgatcttcgccaacctgagccggggcttcggccggcagggcaagcggaccttcatggccgagagacagtacacacggatggaggactggctgaccgccaagctggcctacgagggcctgagcaagacctacctgtccaagacactggcccagtacacctccaagacatgcagcaactgtgggtttaccatcaccagcgccgactacgacagggtgctggagaagctgaagaagacagcaacaggctggatgaccacaattaacggcaaggagctgaaggtggagggccagattacctactacaacagatacaagagacagaacgtagtcaaggacctgtccgtcgagctggatagactgagcgaagaatctgtgaacaacgacatctcctcctggacaaagggcagaagcggagaagctctgagcctcctgaagaaaagattctcccatagacccgtgcaggagaagttcgtgtgcctgaactgcggcttcgagacacacgcagccgagcaagccgccctgaacatcgccagatcctggctgttcctgcggagccaggagtacaagaaataccagacaaacaagacaaccggcaacaccgataagagagccttcgtcgagacctggcagtccttttaccggaagaagcttaaggaggtgtggaaacctgccgtgcggtctggcggatctggcggaggctcccagtgcggcctgctgaccttcggcgacgtggccatcgagttcagccaggaggagtggaggtgcctgagccacacccagagggagctgtacagggacgtgatgctggagaactacggccacctgctgttcctgggcctgatcgtgagcaagcccgacctggtgagcctgctggagcagagcaaggagccctgggacgtgaggaggaagaagacccagaggcccagcgtgctgatgggccacgtgggcggcccaagcagcggcgcccctcctcccagcggcggcagcccagccggctccccaacctctaccgaggagggcacctctgagtccgccacccccgagagcggccctggcacctccaccgagcccagcgagggcagcgcacccggcagccctgccggcagccccacctccacagaggagggaaccagcaccgagcccagcgaaggcagcgccccaggcaccagcaccgagcctagtgagcaggagattaaacggatcaacaagatcagaagaagacttgtgaaagacagcaacaccaagaaggccggcaagacaggccccatgaaaaccctgctggttagagtgatgacacccgatctgagagagcggctggaaaacctgagaaagaagcctgaaaatatcccccagcccatcagcaatacatctagagccaacctgaataagctgctgaccgattacaccgaaatgaagaaggcgatcctgcatgtgtactgggaagagttccagaaggaccctgtgggcctgatgagccgggtggcccagcctgccagcaagaagatcgatcagaacaagctgaaacctgagatggacgagaagggcaacctgaccaccgccggctttgcctgctctcagtgtggccagcccctgttcgtgtacaagctggagcaggtgtctgagaagggcaaggcttacaccaactacttcggacggtgcaatgtggccgagcacgaaaagctgatcctgctggcccagctgaagcccgagaaggatagcgacgaagccgtgacatatagcctgggaaagtttgggcagagggccctggatttctacagcattcatgtgaccaaggagtccacccaccccgtgaagcccctggcccagatcgccggaaacagatacgcctccggacctgtgggaaaggccctgagcgacgcatgtatgggcacaatcgcctccttcctgtctaagtaccaggacatcatcatcgaacaccagaaggtggtgaagggcaaccagaagagactggagagcctgcgggagctggccggcaaggaaaacctggaataccctagcgtgaccctgccacctcagcctcacaccaaggagggcgttgatgcctacaacgaagtgatcgcccgggtgcgaatgtgggtgaacctgaacctgtggcagaagctgaagctaagcagagatgatgccaagcctctgctgagactgaagggattcccttcctttcctctggtcgagagacaggccaacgaagtggactggtgggacatggtgtgtaacgtgaagaagctgatcaacgagaaaaaggaggatggcaaggtgttttggcagaatctggctggctacaagagacaggaagccctgagaccatacctgagcagcgaggaagatcggaagaagggaaagaaattcgctcggtaccagctgggcgacctgctgctgcacctggaaaagaagcacggcgaggactggggaaaggtgtacgacgaggcctgggagcggattgacaagaaagtggaaggcctgagcaagcacatcaagctggaagaggaacggagaagcgaggacgcccagagcaaggccgccctgaccgactggctgcgggctaaggccagcttcgtgatcgagggcctgaaggaggccgacaaggacgagttctgcagatgcgagctgaagctgcagaagtggtacggggacctgcggggaaagcccttcgccatcgaagccgagaacagcatcctggacatcagcggcttcagcaagcagtacaactgtgccttcatctggcagaaggacggcgtgaagaagctgaacctgtacctgatcatcaactacttcaagggcggcaagctgcggttcaagaagatcaaacctgaagccttcgaagccaacagattctacaccgtgatcaacaaaaagagcggcgagatcgtgcccatggaggtgaacttcaacttcgacgaccccaacctgatcatcctgcctctggcctttggcaagagacagggcagagaattcatctggaacgacctgctgtccctggaaaccggcagcctgaagctggccaacggaagagtgatcgagaagacactgtacaacagaagaacccggcaggatgagcctgccctgttcgtggccctgaccttcgagcggcgggaggtcctggactcctccaatatcaaaccaatgaacctgatcggcgtggcaagaggcgaaaacatccccgccgtgatcgccctgaccgaccccgagggctgcccactgagccggtttaaggatagcctgggaaacccaacccacatcctgagaatcggcgagagctataaggagaagcagcggaccatccaggccaagaaggaggtggagcagcggagagccggcggctacagccggaagtacgccagcaaagccaagaatctggcagacgatatggtgagaaacaccgctagagatctgctgtactacgccgtgacccaggatgccatgctgatcttcgccaacctgagccggggcttcggccggcagggcaagcggaccttcatggccgagagacagtacacacggatggaggactggctgaccgccaagctggcctacgagggcctgagcaagacctacctgtccaagacactggcccagtacacctccaagacatgcagcaactgtgggtttaccatcaccagcgccgactacgacagggtgctggagaagctgaagaagacagcaacaggctggatgaccacaattaacggcaaggagctgaaggtggagggccagattacctactacaacagatacaagagacagaacgtagtcaaggacctgtccgtcgagctggatagactgagcgaagaatctgtgaacaacgacatctcctcctggacaaagggcagaagcggagaagctctgagcctcctgaagaaaagattctcccatagacccgtgcaggagaagttcgtgtgcctgaactgcggcttcgagacacacgcagccgagcaagccgccctgaacatcgccagatcctggctgttcctgcggagccaggagtacaagaaataccagacaaacaagacaaccggcaacaccgataagagagccttcgtcgagacctggcagtccttttaccggaagaagcttaaggaggtgtggaaacctgccgtgcggtctggcggatctggcggaggctcctcagtgcggcctgctgaccttcggcgacgtggccatcgagttcagccaggaggagtggaggtgcctgagccacacccagagggagctgtacagggacgtgatgctggagaactacggccacctgctgttcctgggcctgatcgtgagcaagcccgacctggtgagcctgctggagcagagcaaggagccctgggacgtgaggaggaagaagacccagaggcccagcgtgctgatgggccacgtgggatctggctccggcagcggccccaagaaaaagagaaaagtctaagctgccttctgcggggcttgccttctggccatgcccttcttctctcccttgcacctgtacctcttggtctttgaataaagcctgagtaggaaggctagcaaaaaaaaaaaaaaaaaaaaaaaaaaaaaaaaaaaaaaaaaaaaaaaaaaaaaaaaaaaaaaaaaaaaaaaaaaaaaaaa

SEQ ID NO: 16067 - RNA, 9485 nt, synthetic construct
  source 1..9485: mol_type = other RNA
aggaaataagagagaaaagaagagtaagaagaaatataagagccaccatggcccctaagaagaagcgtaaagtgagccggatggaacgcctcgtctacgaggtgcggcagaagtgcagaaacatcgaggacatctgcatctcctgcggatctctgaacgtgaccctggagcacccactgttcatcggcggcatgtgccagaactgtaaaaactgttttctggagtgtgcctatcaatacgacgatgacggctaccagagctactgcaccatctgttgcggcggaagagaggtgctgatgtgtggaaataacaactgctgccggtgcttctgcgtggaatgcgtggacctgctggtgggccccggcgccgcccaggccgctattaaggaagatccttggaactgctacatgtgcggccacaagggcacatacggcctgctgagacggagagaggactggcctagcagactgcagatgttcttcgccaataaccacgaccaggagttcgacccccctaaggtgtaccctcccgtccccgccgagaagagaaagcccatccgggtcctgagcctgttcgatggcatcgccaccggtctgctggtgctgaaggacctgggcatccaggtggataggtacattgcctccgaggtgtgcgaggactccatcaccgtgggaatggtgcgtcatcagggcaagatcatgtacgtgggcgacgtgcggagcgtgacacagaagcatatccaggagtggggccctttcgacctggtgatcggcggcagcccttgcaatgacctgagcatcgtgaacccagcccggaagggcctgtacgagggaaccggcagactgttcttcgagttttacagactgctgcacgacgcccggcctaaggaaggcgacgaccggcccttcttttggctgttcgagaatgtggtggccatgggagtcagcgacaagcgggatattagccggttcctggagagcaaccccgtgatgatcgatgccaaggaagtgagcgccgcccaccgggccagatacttctggggcaatctgcctggcatgaacagacccctggccagcaccgtgaacgacaagctggagctgcaggagtgcctggagcacggccggatcgccaagttcagcaaggtgagaaccatcaccacccgaagcaacagcatcaaacaaggcaaggaccagcactttcctgtgttcatgaacgagaaggaggacatcctgtggtgtaccgagatggagagagtgttcgggttcccagtccactacacagatgtcagcaacatgtctagactggccagacagagactgctgggaagaagctggtccgtccctgtgatcagacacctgttcgcccctctgaaggagtacttcgcctgcgtgagcagcggcaacagcaacgccaacagccggggccccagcttctctagcggcctggtgccactgtccctgagagggagccacatgggccccatggagatctacaaaaccgtgagcgcctggaagcggcagcctgtgcgcgtgctgagcctgtttcggaatatcgataaagtcctgaaaagcctgggattcctggagagcggctctggctccggcggtggcaccctgaagtacgtggaggatgtgacaaacgtggtcagacgggatgtggagaagtggggccccttcgatctggtgtacggcagcacccaacccctgggcagctcttgtgaccggtgccctggctggtacatgtttcagttccaccggatcctgcagtacgccctgccgagacaggagtcccagcggccattcttttggattttcatggacaacttgctgctgaccgaggatgaccaggaaactaccactcggttcctgcagaccgaagccgtgaccctgcaggacgtgagaggccgggactaccagaacgccatgcgggtgtggtccaacatccctggactgaaaagcaagcacgcacctctgacccctaaagaagaggagtacctgcaggcccaggtgcggagcagaagcaagctggacgcccctaaggtggatctgctggtgaagaattgcctcctgcccctgagagagtacttcaagtatttcagccagaatagtctgcccctgggaggcagcggcggcggcgccctggtgacatttgaggacgtcgccgtgcggttcacccaggaggaatgggctctgctggatccttctcagaaaatcctgtaccgggacgtgatgagagagacataccggaatctgacctccgtgggcatcaactgggaatgttgggaccttgaagcctgcttcagaagcctgggaagaaacctgagagtgcaggtggtgaagagaaagtgcgagctgaccaacagcggcccctgcgccgagggcggcccaagcagcggcgcccctcctcccagcggcggcagcccagccggctccccaacctctaccgaggagggcacctctgagtccgccacccccgagagcggccctggcacctccaccgagcccagcgagggcagcgcacccggcagccctgccggcagccccacctccacagaggagggaaccagcaccgagcccagcgaaggcagcgccccaggcaccagcaccgagcctagtgagcaggagattaaacggatcaacaagatcagaagaagacttgtgaaagacagcaacaccaagaaggccggcaagacaggccccatgaaaaccctgctggttagagtgatgacacccgatctgagagagcggctggaaaacctgagaaagaagcctgaaaatatcccccagcccatcagcaatacatctagagccaacctgaataagctgctgaccgattacaccgaaatgaagaaggcgatcctgcatgtgtactgggaagagttccagaaggaccctgtgggcctgatgagccgggtggcccagcctgccagcaagaagatcgatcagaacaagctgaaacctgagatggacgagaagggcaacctgaccaccgccggctttgcctgctctcagtgtggccagcccctgttcgtgtacaagctggagcaggtgtctgagaagggcaaggcttacaccaactacttcggacggtgcaatgtggccgagcacgaaaagctgatcctgctggcccagctgaagcccgagaaggatagcgacgaagccgtgacatatagcctgggaaagtttgggcagagggccctggatttctacagcattcatgtgaccaaggagtccacccaccccgtgaagcccctggcccagatcgccggaaacagatacgcctccggacctgtgggaaaggccctgagcgacgcatgtatgggcacaatcgcctccttcctgtctaagtaccaggacatcatcatcgaacaccagaaggtggtgaagggcaaccagaagagactggagagcctgcgggagctggccggcaaggaaaacctggaataccctagcgtgaccctgccacctcagcctcacaccaaggagggcgttgatgcctacaacgaagtgatcgcccgggtgcgaatgtgggtgaacctgaacctgtggcagaagctgaagctaagcagagatgatgccaagcctctgctgagactgaagggattcccttcctttcctctggtcgagagacaggccaacgaagtggactggtgggacatggtgtgtaacgtgaagaagctgatcaacgagaaaaaggaggatggcaaggtgttttggcagaatctggctggctacaagagacaggaagccctgagaccatacctgagcagcgaggaagatcggaagaagggaaagaaattcgctcggtaccagctgggcgacctgctgctgcacctggaaaagaagcacggcgaggactggggaaaggtgtacgacgaggcctgggagcggattgacaagaaagtggaaggcctgagcaagcacatcaagctggaagaggaacggagaagcgaggacgcccagagcaaggccgccctgaccgactggctgcgggctaaggccagcttcgtgatcgagggcctgaaggaggccgacaaggacgagttctgcagatgcgagctgaagctgcagaagtggtacggggacctgcggggaaagcccttcgccatcgaagccgagaacagcatcctggacatcagcggcttcagcaagcagtacaactgtgccttcatctggcagaaggacggcgtgaagaagctgaacctgtacctgatcatcaactacttcaagggcggcaagctgcggttcaagaagatcaaacctgaagccttcgaagccaacagattctacaccgtgatcaacaaaaagagcggcgagatcgtgcccatggaggtgaacttcaacttcgacgaccccaacctgatcatcctgcctctggcctttggcaagagacagggcagagaattcatctggaacgacctgctgtccctggaaaccggcagcctgaagctggccaacggaagagtgatcgagaagacactgtacaacagaagaacccggcaggatgagcctgccctgttcgtggccctgaccttcgagcggcgggaggtcctggactcctccaatatcaaaccaatgaacctgatcggcgtggcaagaggcgaaaacatccccgccgtgatcgccctgaccgaccccgagggctgcccactgagccggtttaaggatagcctgggaaacccaacccacatcctgagaatcggcgagagctataaggagaagcagcggaccatccaggccaagaaggaggtggagcagcggagagccggcggctacagccggaagtacgccagcaaagccaagaatctggcagacgatatggtgagaaacaccgctagagatctgctgtactacgccgtgacccaggatgccatgctgatcttcgccaacctgagccggggcttcggccggcagggcaagcggaccttcatggccgagagacagtacacacggatggaggactggctgaccgccaagctggcctacgagggcctgagcaagacctacctgtccaagacactggcccagtacacctccaagacatgcagcaactgtgggtttaccatcaccagcgccgactacgacagggtgctggagaagctgaagaagacagcaacaggctggatgaccacaattaacggcaaggagctgaaggtggagggccagattacctactacaacagatacaagagacagaacgtagtcaaggacctgtccgtcgagctggatagactgagcgaagaatctgtgaacaacgacatctcctcctggacaaagggcagaagcggagaagctctgagcctcctgaagaaaagattctcccatagacccgtgcaggagaagttcgtgtgcctgaactgcggcttcgagacacacgcagccgagcaagccgccctgaacatcgccagatcctggctgttcctgcggagccaggagtacaagaaataccagacaaacaagacaaccggcaacaccgataagagagccttcgtcgagacctggcagtccttttaccggaagaagcttaaggaggtgtggaaacctgccgtgcggtctggcggatctggcggaggctccttccaggaggccgtgaccttcaaggacgtggccgtggccttcaccgaggaggagctgggcctgctggaccccgcccagaggaagctgtacagggacgtgatgctggagaacttcaggaacctggtgagcgtgggccaccagagcttcaagcccgacatgatcagccagctggagagggaggagaagctgtggatgaaggagttccagacccagaggggcaagcacagcggcgacaggaacctgggcggcccaagcagcggcgcccctcctcccagcggcggcagcccagccggctccccaacctctaccgaggagggcacctctgagtccgccacccccgagagcggccctggcacctccaccgagcccagcgagggcagcgcacccggcagccctgccggcagccccacctccacagaggagggaaccagcaccgagcccagcgaaggcagcgccccaggcaccagcaccgagcctagtgagcaggagattaaacggatcaacaagatcagaagaagacttgtgaaagacagcaacaccaagaaggccggcaagacaggccccatgaaaaccctgctggttagagtgatgacacccgatctgagagagcggctggaaaacctgagaaagaagcctgaaaatatcccccagcccatcagcaatacatctagagccaacctgaataagctgctgaccgattacaccgaaatgaagaaggcgatcctgcatgtgtactgggaagagttccagaaggaccctgtgggcctgatgagccgggtggcccagcctgccagcaagaagatcgatcagaacaagctgaaacctgagatggacgagaagggcaacctgaccaccgccggctttgcctgctctcagtgtggccagcccctgttcgtgtacaagctggagcaggtgtctgagaagggcaaggcttacaccaactacttcggacggtgcaatgtggccgagcacgaaaagctgatcctgctggcccagctgaagcccgagaaggatagcgacgaagccgtgacatatagcctgggaaagtttgggcagagggccctggatttctacagcattcatgtgaccaaggagtccacccaccccgtgaagcccctggcccagatcgccggaaacagatacgcctccggacctgtgggaaaggccctgagcgacgcatgtatgggcacaatcgcctccttcctgtctaagtaccaggacatcatcatcgaacaccagaaggtggtgaagggcaaccagaagagactggagagcctgcgggagctggccggcaaggaaaacctggaataccctagcgtgaccctgccacctcagcctcacaccaaggagggcgttgatgcctacaacgaagtgatcgcccgggtgcgaatgtgggtgaacctgaacctgtggcagaagctgaagctaagcagagatgatgccaagcctctgctgagactgaagggattcccttcctttcctctggtcgagagacaggccaacgaagtggactggtgggacatggtgtgtaacgtgaagaagctgatcaacgagaaaaaggaggatggcaaggtgttttggcagaatctggctggctacaagagacaggaagccctgagaccatacctgagcagcgaggaagatcggaagaagggaaagaaattcgctcggtaccagctgggcgacctgctgctgcacctggaaaagaagcacggcgaggactggggaaaggtgtacgacgaggcctgggagcggattgacaagaaagtggaaggcctgagcaagcacatcaagctggaagaggaacggagaagcgaggacgcccagagcaaggccgccctgaccgactggctgcgggctaaggccagcttcgtgatcgagggcctgaaggaggccgacaaggacgagttctgcagatgcgagctgaagctgcagaagtggtacggggacctgcggggaaagcccttcgccatcgaagccgagaacagcatcctggacatcagcggcttcagcaagcagtacaactgtgccttcatctggcagaaggacggcgtgaagaagctgaacctgtacctgatcatcaactacttcaagggcggcaagctgcggttcaagaagatcaaacctgaagccttcgaagccaacagattctacaccgtgatcaacaaaaagagcggcgagatcgtgcccatggaggtgaacttcaacttcgacgaccccaacctgatcatcctgcctctggcctttggcaagagacagggcagagaattcatctggaacgacctgctgtccctggaaaccggcagcctgaagctggccaacggaagagtgatcgagaagacactgtacaacagaagaacccggcaggatgagcctgccctgttcgtggccctgaccttcgagcggcgggaggtcctggactcctccaatatcaaaccaatgaacctgatcggcgtggcaagaggcgaaaacatccccgccgtgatcgccctgaccgaccccgagggctgcccactgagccggtttaaggatagcctgggaaacccaacccacatcctgagaatcggcgagagctataaggagaagcagcggaccatccaggccaagaaggaggtggagcagcggagagccggcggctacagccggaagtacgccagcaaagccaagaatctggcagacgatatggtgagaaacaccgctagagatctgctgtactacgccgtgacccaggatgccatgctgatcttcgccaacctgagccggggcttcggccggcagggcaagcggaccttcatggccgagagacagtacacacggatggaggactggctgaccgccaagctggcctacgagggcctgagcaagacctacctgtccaagacactggcccagtacacctccaagacatgcagcaactgtgggtttaccatcaccagcgccgactacgacagggtgctggagaagctgaagaagacagcaacaggctggatgaccacaattaacggcaaggagctgaaggtggagggccagattacctactacaacagatacaagagacagaacgtagtcaaggacctgtccgtcgagctggatagactgagcgaagaatctgtgaacaacgacatctcctcctggacaaagggcagaagcggagaagctctgagcctcctgaagaaaagattctcccatagacccgtgcaggagaagttcgtgtgcctgaactgcggcttcgagacacacgcagccgagcaagccgccctgaacatcgccagatcctggctgttcctgcggagccaggagtacaagaaataccagacaaacaagacaaccggcaacaccgataagagagccttcgtcgagacctggcagtccttttaccggaagaagcttaaggaggtgtggaaacctgccgtgcggtctggcggatctggcggaggctcctttccaggaggccgtgaccttcaaggacgtggccgtggccttcaccgaggaggagctgggcctgctggaccccgcccagaggaagctgtacagggacgtgatgctggagaacttcaggaacctggtgagcgtgggccaccagagcttcaagcccgacatgatcagccagctggagagggaggagaagctgtggatgaaggagttccagacccagaggggcaagcacagcggcgacaggaacctgggatctggctccggcagcggccccaagaaaaagagaaaagtctaagctgccttctgcggggcttgccttctggccatgcccttcttctctcccttgcacctgtacctcttggtctttgaataaagcctgagtaggaaggctagcaaaaaaaaaaaaaaaaaaaaaaaaaaaaaaaaaaaaaaaaaaaaaaaaaaaaaaaaaaaaaaaaaaaaaaaaaaaaaaaa

SEQ ID NO: 16068 - RNA, 9485 nt, synthetic construct
  source 1..9485: mol_type = other RNA
aggaaataagagagaaaagaagagtaagaagaaatataagagccaccatggcccctaagaagaagcgtaaagtgagccggatggaacgcctcgtctacgaggtgcggcagaagtgcagaaacatcgaggacatctgcatctcctgcggatctctgaacgtgaccctggagcacccactgttcatcggcggcatgtgccagaactgtaaaaactgttttctggagtgtgcctatcaatacgacgatgacggctaccagagctactgcaccatctgttgcggcggaagagaggtgctgatgtgtggaaataacaactgctgccggtgcttctgcgtggaatgcgtggacctgctggtgggccccggcgccgcccaggccgctattaaggaagatccttggaactgctacatgtgcggccacaagggcacatacggcctgctgagacggagagaggactggcctagcagactgcagatgttcttcgccaataaccacgaccaggagttcgacccccctaaggtgtaccctcccgtccccgccgagaagagaaagcccatccgggtcctgagcctgttcgatggcatcgccaccggtctgctggtgctgaaggacctgggcatccaggtggataggtacattgcctccgaggtgtgcgaggactccatcaccgtgggaatggtgcgtcatcagggcaagatcatgtacgtgggcgacgtgcggagcgtgacacagaagcatatccaggagtggggccctttcgacctggtgatcggcggcagcccttgcaatgacctgagcatcgtgaacccagcccggaagggcctgtacgagggaaccggcagactgttcttcgagttttacagactgctgcacgacgcccggcctaaggaaggcgacgaccggcccttcttttggctgttcgagaatgtggtggccatgggagtcagcgacaagcgggatattagccggttcctggagagcaaccccgtgatgatcgatgccaaggaagtgagcgccgcccaccgggccagatacttctggggcaatctgcctggcatgaacagacccctggccagcaccgtgaacgacaagctggagctgcaggagtgcctggagcacggccggatcgccaagttcagcaaggtgagaaccatcaccacccgaagcaacagcatcaaacaaggcaaggaccagcactttcctgtgttcatgaacgagaaggaggacatcctgtggtgtaccgagatggagagagtgttcgggttcccagtccactacacagatgtcagcaacatgtctagactggccagacagagactgctgggaagaagctggtccgtccctgtgatcagacacctgttcgcccctctgaaggagtacttcgcctgcgtgagcagcggcaacagcaacgccaacagccggggccccagcttctctagcggcctggtgccactgtccctgagagggagccacatgggccccatggagatctacaaaaccgtgagcgcctggaagcggcagcctgtgcgcgtgctgagcctgtttcggaatatcgataaagtcctgaaaagcctgggattcctggagagcggctctggctccggcggtggcaccctgaagtacgtggaggatgtgacaaacgtggtcagacgggatgtggagaagtggggccccttcgatctggtgtacggcagcacccaacccctgggcagctcttgtgaccggtgccctggctggtacatgtttcagttccaccggatcctgcagtacgccctgccgagacaggagtcccagcggccattcttttggattttcatggacaacttgctgctgaccgaggatgaccaggaaactaccactcggttcctgcagaccgaagccgtgaccctgcaggacgtgagaggccgggactaccagaacgccatgcgggtgtggtccaacatccctggactgaaaagcaagcacgcacctctgacccctaaagaagaggagtacctgcaggcccaggtgcggagcagaagcaagctggacgcccctaaggtggatctgctggtgaagaattgcctcctgcccctgagagagtacttcaagtatttcagccagaatagtctgcccctgggaggcagcggcggcggcgccctggtgacatttgaggacgtcgccgtgcggttcacccaggaggaatgggctctgctggatccttctcagaaaatcctgtaccgggacgtgatgagagagacataccggaatctgacctccgtgggcatcaactgggaatgttgggaccttgaagcctgcttcagaagcctgggaagaaacctgagagtgcaggtggtgaagagaaagtgcgagctgaccaacagcggcccctgcgccgagggcggcccaagcagcggcgcccctcctcccagcggcggcagcccagccggctccccaacctctaccgaggagggcacctctgagtccgccacccccgagagcggccctggcacctccaccgagcccagcgagggcagcgcacccggcagccctgccggcagccccacctccacagaggagggaaccagcaccgagcccagcgaaggcagcgccccaggcaccagcaccgagcctagtgagcaggagattaaacggatcaacaagatcagaagaagacttgtgaaagacagcaacaccaagaaggccggcaagacaggccccatgaaaaccctgctggttagagtgatgacacccgatctgagagagcggctggaaaacctgagaaagaagcctgaaaatatcccccagcccatcagcaatacatctagagccaacctgaataagctgctgaccgattacaccgaaatgaagaaggcgatcctgcatgtgtactgggaagagttccagaaggaccctgtgggcctgatgagccgggtggcccagcctgccagcaagaagatcgatcagaacaagctgaaacctgagatggacgagaagggcaacctgaccaccgccggctttgcctgctctcagtgtggccagcccctgttcgtgtacaagctggagcaggtgtctgagaagggcaaggcttacaccaactacttcggacggtgcaatgtggccgagcacgaaaagctgatcctgctggcccagctgaagcccgagaaggatagcgacgaagccgtgacatatagcctgggaaagtttgggcagagggccctggatttctacagcattcatgtgaccaaggagtccacccaccccgtgaagcccctggcccagatcgccggaaacagatacgcctccggacctgtgggaaaggccctgagcgacgcatgtatgggcacaatcgcctccttcctgtctaagtaccaggacatcatcatcgaacaccagaaggtggtgaagggcaaccagaagagactggagagcctgcgggagctggccggcaaggaaaacctggaataccctagcgtgaccctgccacctcagcctcacaccaaggagggcgttgatgcctacaacgaagtgatcgcccgggtgcgaatgtgggtgaacctgaacctgtggcagaagctgaagctaagcagagatgatgccaagcctctgctgagactgaagggattcccttcctttcctctggtcgagagacaggccaacgaagtggactggtgggacatggtgtgtaacgtgaagaagctgatcaacgagaaaaaggaggatggcaaggtgttttggcagaatctggctggctacaagagacaggaagccctgagaccatacctgagcagcgaggaagatcggaagaagggaaagaaattcgctcggtaccagctgggcgacctgctgctgcacctggaaaagaagcacggcgaggactggggaaaggtgtacgacgaggcctgggagcggattgacaagaaagtggaaggcctgagcaagcacatcaagctggaagaggaacggagaagcgaggacgcccagagcaaggccgccctgaccgactggctgcgggctaaggccagcttcgtgatcgagggcctgaaggaggccgacaaggacgagttctgcagatgcgagctgaagctgcagaagtggtacggggacctgcggggaaagcccttcgccatcgaagccgagaacagcatcctggacatcagcggcttcagcaagcagtacaactgtgccttcatctggcagaaggacggcgtgaagaagctgaacctgtacctgatcatcaactacttcaagggcggcaagctgcggttcaagaagatcaaacctgaagccttcgaagccaacagattctacaccgtgatcaacaaaaagagcggcgagatcgtgcccatggaggtgaacttcaacttcgacgaccccaacctgatcatcctgcctctggcctttggcaagagacagggcagagaattcatctggaacgacctgctgtccctggaaaccggcagcctgaagctggccaacggaagagtgatcgagaagacactgtacaacagaagaacccggcaggatgagcctgccctgttcgtggccctgaccttcgagcggcgggaggtcctggactcctccaatatcaaaccaatgaacctgatcggcgtggcaagaggcgaaaacatccccgccgtgatcgccctgaccgaccccgagggctgcccactgagccggtttaaggatagcctgggaaacccaacccacatcctgagaatcggcgagagctataaggagaagcagcggaccatccaggccaagaaggaggtggagcagcggagagccggcggctacagccggaagtacgccagcaaagccaagaatctggcagacgatatggtgagaaacaccgctagagatctgctgtactacgccgtgacccaggatgccatgctgatcttcgccaacctgagccggggcttcggccggcagggcaagcggaccttcatggccgagagacagtacacacggatggaggactggctgaccgccaagctggcctacgagggcctgagcaagacctacctgtccaagacactggcccagtacacctccaagacatgcagcaactgtgggtttaccatcaccagcgccgactacgacagggtgctggagaagctgaagaagacagcaacaggctggatgaccacaattaacggcaaggagctgaaggtggagggccagattacctactacaacagatacaagagacagaacgtagtcaaggacctgtccgtcgagctggatagactgagcgaagaatctgtgaacaacgacatctcctcctggacaaagggcagaagcggagaagctctgagcctcctgaagaaaagattctcccatagacccgtgcaggagaagttcgtgtgcctgaactgcggcttcgagacacacgcagccgagcaagccgccctgaacatcgccagatcctggctgttcctgcggagccaggagtacaagaaataccagacaaacaagacaaccggcaacaccgataagagagccttcgtcgagacctggcagtccttttaccggaagaagcttaaggaggtgtggaaacctgccgtgcggtctggcggatctggcggaggctccagccaggtgagcgtgaccttcgaggacgtggccgtgctgttcaccagggacgagtggaagaagctggtgcccagccagaggagcctgtacagggaggtgatgctggagaactacagcaacctggccagcctggccggcttccccttcaccaagcccaaggtgatcagcctgctgcagcagggcgaggacccctggaaggtggaggaggagggccccggcggcttcagcctgggcctgaagtgcggcggcccaagcagcggcgcccctcctcccagcggcggcagcccagccggctccccaacctctaccgaggagggcacctctgagtccgccacccccgagagcggccctggcacctccaccgagcccagcgagggcagcgcacccggcagccctgccggcagccccacctccacagaggagggaaccagcaccgagcccagcgaaggcagcgccccaggcaccagcaccgagcctagtgagcaggagattaaacggatcaacaagatcagaagaagacttgtgaaagacagcaacaccaagaaggccggcaagacaggccccatgaaaaccctgctggttagagtgatgacacccgatctgagagagcggctggaaaacctgagaaagaagcctgaaaatatcccccagcccatcagcaatacatctagagccaacctgaataagctgctgaccgattacaccgaaatgaagaaggcgatcctgcatgtgtactgggaagagttccagaaggaccctgtgggcctgatgagccgggtggcccagcctgccagcaagaagatcgatcagaacaagctgaaacctgagatggacgagaagggcaacctgaccaccgccggctttgcctgctctcagtgtggccagcccctgttcgtgtacaagctggagcaggtgtctgagaagggcaaggcttacaccaactacttcggacggtgcaatgtggccgagcacgaaaagctgatcctgctggcccagctgaagcccgagaaggatagcgacgaagccgtgacatatagcctgggaaagtttgggcagagggccctggatttctacagcattcatgtgaccaaggagtccacccaccccgtgaagcccctggcccagatcgccggaaacagatacgcctccggacctgtgggaaaggccctgagcgacgcatgtatgggcacaatcgcctccttcctgtctaagtaccaggacatcatcatcgaacaccagaaggtggtgaagggcaaccagaagagactggagagcctgcgggagctggccggcaaggaaaacctggaataccctagcgtgaccctgccacctcagcctcacaccaaggagggcgttgatgcctacaacgaagtgatcgcccgggtgcgaatgtgggtgaacctgaacctgtggcagaagctgaagctaagcagagatgatgccaagcctctgctgagactgaagggattcccttcctttcctctggtcgagagacaggccaacgaagtggactggtgggacatggtgtgtaacgtgaagaagctgatcaacgagaaaaaggaggatggcaaggtgttttggcagaatctggctggctacaagagacaggaagccctgagaccatacctgagcagcgaggaagatcggaagaagggaaagaaattcgctcggtaccagctgggcgacctgctgctgcacctggaaaagaagcacggcgaggactggggaaaggtgtacgacgaggcctgggagcggattgacaagaaagtggaaggcctgagcaagcacatcaagctggaagaggaacggagaagcgaggacgcccagagcaaggccgccctgaccgactggctgcgggctaaggccagcttcgtgatcgagggcctgaaggaggccgacaaggacgagttctgcagatgcgagctgaagctgcagaagtggtacggggacctgcggggaaagcccttcgccatcgaagccgagaacagcatcctggacatcagcggcttcagcaagcagtacaactgtgccttcatctggcagaaggacggcgtgaagaagctgaacctgtacctgatcatcaactacttcaagggcggcaagctgcggttcaagaagatcaaacctgaagccttcgaagccaacagattctacaccgtgatcaacaaaaagagcggcgagatcgtgcccatggaggtgaacttcaacttcgacgaccccaacctgatcatcctgcctctggcctttggcaagagacagggcagagaattcatctggaacgacctgctgtccctggaaaccggcagcctgaagctggccaacggaagagtgatcgagaagacactgtacaacagaagaacccggcaggatgagcctgccctgttcgtggccctgaccttcgagcggcgggaggtcctggactcctccaatatcaaaccaatgaacctgatcggcgtggcaagaggcgaaaacatccccgccgtgatcgccctgaccgaccccgagggctgcccactgagccggtttaaggatagcctgggaaacccaacccacatcctgagaatcggcgagagctataaggagaagcagcggaccatccaggccaagaaggaggtggagcagcggagagccggcggctacagccggaagtacgccagcaaagccaagaatctggcagacgatatggtgagaaacaccgctagagatctgctgtactacgccgtgacccaggatgccatgctgatcttcgccaacctgagccggggcttcggccggcagggcaagcggaccttcatggccgagagacagtacacacggatggaggactggctgaccgccaagctggcctacgagggcctgagcaagacctacctgtccaagacactggcccagtacacctccaagacatgcagcaactgtgggtttaccatcaccagcgccgactacgacagggtgctggagaagctgaagaagacagcaacaggctggatgaccacaattaacggcaaggagctgaaggtggagggccagattacctactacaacagatacaagagacagaacgtagtcaaggacctgtccgtcgagctggatagactgagcgaagaatctgtgaacaacgacatctcctcctggacaaagggcagaagcggagaagctctgagcctcctgaagaaaagattctcccatagacccgtgcaggagaagttcgtgtgcctgaactgcggcttcgagacacacgcagccgagcaagccgccctgaacatcgccagatcctggctgttcctgcggagccaggagtacaagaaataccagacaaacaagacaaccggcaacaccgataagagagccttcgtcgagacctggcagtccttttaccggaagaagcttaaggaggtgtggaaacctgccgtgcggtctggcggatctggcggaggctcctagccaggtgagcgtgaccttcgaggacgtggccgtgctgttcaccagggacgagtggaagaagctggtgcccagccagaggagcctgtacagggaggtgatgctggagaactacagcaacctggccagcctggccggcttccccttcaccaagcccaaggtgatcagcctgctgcagcagggcgaggacccctggaaggtggaggaggagggccccggcggcttcagcctgggcctgaagtgcggatctggctccggcagcggccccaagaaaaagagaaaagtctaagctgccttctgcggggcttgccttctggccatgcccttcttctctcccttgcacctgtacctcttggtctttgaataaagcctgagtaggaaggctagcaaaaaaaaaaaaaaaaaaaaaaaaaaaaaaaaaaaaaaaaaaaaaaaaaaaaaaaaaaaaaaaaaaaaaaaaaaaaaaaa

SEQ ID NO: 16069 - RNA, 9485 nt, synthetic construct
  source 1..9485: mol_type = other RNA
aggaaataagagagaaaagaagagtaagaagaaatataagagccaccatggcccctaagaagaagcgtaaagtgagccggatggaacgcctcgtctacgaggtgcggcagaagtgcagaaacatcgaggacatctgcatctcctgcggatctctgaacgtgaccctggagcacccactgttcatcggcggcatgtgccagaactgtaaaaactgttttctggagtgtgcctatcaatacgacgatgacggctaccagagctactgcaccatctgttgcggcggaagagaggtgctgatgtgtggaaataacaactgctgccggtgcttctgcgtggaatgcgtggacctgctggtgggccccggcgccgcccaggccgctattaaggaagatccttggaactgctacatgtgcggccacaagggcacatacggcctgctgagacggagagaggactggcctagcagactgcagatgttcttcgccaataaccacgaccaggagttcgacccccctaaggtgtaccctcccgtccccgccgagaagagaaagcccatccgggtcctgagcctgttcgatggcatcgccaccggtctgctggtgctgaaggacctgggcatccaggtggataggtacattgcctccgaggtgtgcgaggactccatcaccgtgggaatggtgcgtcatcagggcaagatcatgtacgtgggcgacgtgcggagcgtgacacagaagcatatccaggagtggggccctttcgacctggtgatcggcggcagcccttgcaatgacctgagcatcgtgaacccagcccggaagggcctgtacgagggaaccggcagactgttcttcgagttttacagactgctgcacgacgcccggcctaaggaaggcgacgaccggcccttcttttggctgttcgagaatgtggtggccatgggagtcagcgacaagcgggatattagccggttcctggagagcaaccccgtgatgatcgatgccaaggaagtgagcgccgcccaccgggccagatacttctggggcaatctgcctggcatgaacagacccctggccagcaccgtgaacgacaagctggagctgcaggagtgcctggagcacggccggatcgccaagttcagcaaggtgagaaccatcaccacccgaagcaacagcatcaaacaaggcaaggaccagcactttcctgtgttcatgaacgagaaggaggacatcctgtggtgtaccgagatggagagagtgttcgggttcccagtccactacacagatgtcagcaacatgtctagactggccagacagagactgctgggaagaagctggtccgtccctgtgatcagacacctgttcgcccctctgaaggagtacttcgcctgcgtgagcagcggcaacagcaacgccaacagccggggccccagcttctctagcggcctggtgccactgtccctgagagggagccacatgggccccatggagatctacaaaaccgtgagcgcctggaagcggcagcctgtgcgcgtgctgagcctgtttcggaatatcgataaagtcctgaaaagcctgggattcctggagagcggctctggctccggcggtggcaccctgaagtacgtggaggatgtgacaaacgtggtcagacgggatgtggagaagtggggccccttcgatctggtgtacggcagcacccaacccctgggcagctcttgtgaccggtgccctggctggtacatgtttcagttccaccggatcctgcagtacgccctgccgagacaggagtcccagcggccattcttttggattttcatggacaacttgctgctgaccgaggatgaccaggaaactaccactcggttcctgcagaccgaagccgtgaccctgcaggacgtgagaggccgggactaccagaacgccatgcgggtgtggtccaacatccctggactgaaaagcaagcacgcacctctgacccctaaagaagaggagtacctgcaggcccaggtgcggagcagaagcaagctggacgcccctaaggtggatctgctggtgaagaattgcctcctgcccctgagagagtacttcaagtatttcagccagaatagtctgcccctgggaggcagcggcggcggcgccctggtgacatttgaggacgtcgccgtgcggttcacccaggaggaatgggctctgctggatccttctcagaaaatcctgtaccgggacgtgatgagagagacataccggaatctgacctccgtgggcatcaactgggaatgttgggaccttgaagcctgcttcagaagcctgggaagaaacctgagagtgcaggtggtgaagagaaagtgcgagctgaccaacagcggcccctgcgccgagggcggcccaagcagcggcgcccctcctcccagcggcggcagcccagccggctccccaacctctaccgaggagggcacctctgagtccgccacccccgagagcggccctggcacctccaccgagcccagcgagggcagcgcacccggcagccctgccggcagccccacctccacagaggagggaaccagcaccgagcccagcgaaggcagcgccccaggcaccagcaccgagcctagtgagcaggagattaaacggatcaacaagatcagaagaagacttgtgaaagacagcaacaccaagaaggccggcaagacaggccccatgaaaaccctgctggttagagtgatgacacccgatctgagagagcggctggaaaacctgagaaagaagcctgaaaatatcccccagcccatcagcaatacatctagagccaacctgaataagctgctgaccgattacaccgaaatgaagaaggcgatcctgcatgtgtactgggaagagttccagaaggaccctgtgggcctgatgagccgggtggcccagcctgccagcaagaagatcgatcagaacaagctgaaacctgagatggacgagaagggcaacctgaccaccgccggctttgcctgctctcagtgtggccagcccctgttcgtgtacaagctggagcaggtgtctgagaagggcaaggcttacaccaactacttcggacggtgcaatgtggccgagcacgaaaagctgatcctgctggcccagctgaagcccgagaaggatagcgacgaagccgtgacatatagcctgggaaagtttgggcagagggccctggatttctacagcattcatgtgaccaaggagtccacccaccccgtgaagcccctggcccagatcgccggaaacagatacgcctccggacctgtgggaaaggccctgagcgacgcatgtatgggcacaatcgcctccttcctgtctaagtaccaggacatcatcatcgaacaccagaaggtggtgaagggcaaccagaagagactggagagcctgcgggagctggccggcaaggaaaacctggaataccctagcgtgaccctgccacctcagcctcacaccaaggagggcgttgatgcctacaacgaagtgatcgcccgggtgcgaatgtgggtgaacctgaacctgtggcagaagctgaagctaagcagagatgatgccaagcctctgctgagactgaagggattcccttcctttcctctggtcgagagacaggccaacgaagtggactggtgggacatggtgtgtaacgtgaagaagctgatcaacgagaaaaaggaggatggcaaggtgttttggcagaatctggctggctacaagagacaggaagccctgagaccatacctgagcagcgaggaagatcggaagaagggaaagaaattcgctcggtaccagctgggcgacctgctgctgcacctggaaaagaagcacggcgaggactggggaaaggtgtacgacgaggcctgggagcggattgacaagaaagtggaaggcctgagcaagcacatcaagctggaagaggaacggagaagcgaggacgcccagagcaaggccgccctgaccgactggctgcgggctaaggccagcttcgtgatcgagggcctgaaggaggccgacaaggacgagttctgcagatgcgagctgaagctgcagaagtggtacggggacctgcggggaaagcccttcgccatcgaagccgagaacagcatcctggacatcagcggcttcagcaagcagtacaactgtgccttcatctggcagaaggacggcgtgaagaagctgaacctgtacctgatcatcaactacttcaagggcggcaagctgcggttcaagaagatcaaacctgaagccttcgaagccaacagattctacaccgtgatcaacaaaaagagcggcgagatcgtgcccatggaggtgaacttcaacttcgacgaccccaacctgatcatcctgcctctggcctttggcaagagacagggcagagaattcatctggaacgacctgctgtccctggaaaccggcagcctgaagctggccaacggaagagtgatcgagaagacactgtacaacagaagaacccggcaggatgagcctgccctgttcgtggccctgaccttcgagcggcgggaggtcctggactcctccaatatcaaaccaatgaacctgatcggcgtggcaagaggcgaaaacatccccgccgtgatcgccctgaccgaccccgagggctgcccactgagccggtttaaggatagcctgggaaacccaacccacatcctgagaatcggcgagagctataaggagaagcagcggaccatccaggccaagaaggaggtggagcagcggagagccggcggctacagccggaagtacgccagcaaagccaagaatctggcagacgatatggtgagaaacaccgctagagatctgctgtactacgccgtgacccaggatgccatgctgatcttcgccaacctgagccggggcttcggccggcagggcaagcggaccttcatggccgagagacagtacacacggatggaggactggctgaccgccaagctggcctacgagggcctgagcaagacctacctgtccaagacactggcccagtacacctccaagacatgcagcaactgtgggtttaccatcaccagcgccgactacgacagggtgctggagaagctgaagaagacagcaacaggctggatgaccacaattaacggcaaggagctgaaggtggagggccagattacctactacaacagatacaagagacagaacgtagtcaaggacctgtccgtcgagctggatagactgagcgaagaatctgtgaacaacgacatctcctcctggacaaagggcagaagcggagaagctctgagcctcctgaagaaaagattctcccatagacccgtgcaggagaagttcgtgtgcctgaactgcggcttcgagacacacgcagccgagcaagccgccctgaacatcgccagatcctggctgttcctgcggagccaggagtacaagaaataccagacaaacaagacaaccggcaacaccgataagagagccttcgtcgagacctggcagtccttttaccggaagaagcttaaggaggtgtggaaacctgccgtgcggtctggcggatctggcggaggctccttccaggtgcccgtgaccttcagggacgtggccgtgtacttctgcagggaggagtgggagtgcctgagccccagccagaggaccctgtacaggaacgtgatgctggagaacttcaggaacctgaacgagctgggctgctgcagcaggaggcccggcctgatcaccaggctggagcagtgggacgagccctgggtggacgactgggacaggagcgagttccccgacggccagaagagcttctgcggcggcccaagcagcggcgcccctcctcccagcggcggcagcccagccggctccccaacctctaccgaggagggcacctctgagtccgccacccccgagagcggccctggcacctccaccgagcccagcgagggcagcgcacccggcagccctgccggcagccccacctccacagaggagggaaccagcaccgagcccagcgaaggcagcgccccaggcaccagcaccgagcctagtgagcaggagattaaacggatcaacaagatcagaagaagacttgtgaaagacagcaacaccaagaaggccggcaagacaggccccatgaaaaccctgctggttagagtgatgacacccgatctgagagagcggctggaaaacctgagaaagaagcctgaaaatatcccccagcccatcagcaatacatctagagccaacctgaataagctgctgaccgattacaccgaaatgaagaaggcgatcctgcatgtgtactgggaagagttccagaaggaccctgtgggcctgatgagccgggtggcccagcctgccagcaagaagatcgatcagaacaagctgaaacctgagatggacgagaagggcaacctgaccaccgccggctttgcctgctctcagtgtggccagcccctgttcgtgtacaagctggagcaggtgtctgagaagggcaaggcttacaccaactacttcggacggtgcaatgtggccgagcacgaaaagctgatcctgctggcccagctgaagcccgagaaggatagcgacgaagccgtgacatatagcctgggaaagtttgggcagagggccctggatttctacagcattcatgtgaccaaggagtccacccaccccgtgaagcccctggcccagatcgccggaaacagatacgcctccggacctgtgggaaaggccctgagcgacgcatgtatgggcacaatcgcctccttcctgtctaagtaccaggacatcatcatcgaacaccagaaggtggtgaagggcaaccagaagagactggagagcctgcgggagctggccggcaaggaaaacctggaataccctagcgtgaccctgccacctcagcctcacaccaaggagggcgttgatgcctacaacgaagtgatcgcccgggtgcgaatgtgggtgaacctgaacctgtggcagaagctgaagctaagcagagatgatgccaagcctctgctgagactgaagggattcccttcctttcctctggtcgagagacaggccaacgaagtggactggtgggacatggtgtgtaacgtgaagaagctgatcaacgagaaaaaggaggatggcaaggtgttttggcagaatctggctggctacaagagacaggaagccctgagaccatacctgagcagcgaggaagatcggaagaagggaaagaaattcgctcggtaccagctgggcgacctgctgctgcacctggaaaagaagcacggcgaggactggggaaaggtgtacgacgaggcctgggagcggattgacaagaaagtggaaggcctgagcaagcacatcaagctggaagaggaacggagaagcgaggacgcccagagcaaggccgccctgaccgactggctgcgggctaaggccagcttcgtgatcgagggcctgaaggaggccgacaaggacgagttctgcagatgcgagctgaagctgcagaagtggtacggggacctgcggggaaagcccttcgccatcgaagccgagaacagcatcctggacatcagcggcttcagcaagcagtacaactgtgccttcatctggcagaaggacggcgtgaagaagctgaacctgtacctgatcatcaactacttcaagggcggcaagctgcggttcaagaagatcaaacctgaagccttcgaagccaacagattctacaccgtgatcaacaaaaagagcggcgagatcgtgcccatggaggtgaacttcaacttcgacgaccccaacctgatcatcctgcctctggcctttggcaagagacagggcagagaattcatctggaacgacctgctgtccctggaaaccggcagcctgaagctggccaacggaagagtgatcgagaagacactgtacaacagaagaacccggcaggatgagcctgccctgttcgtggccctgaccttcgagcggcgggaggtcctggactcctccaatatcaaaccaatgaacctgatcggcgtggcaagaggcgaaaacatccccgccgtgatcgccctgaccgaccccgagggctgcccactgagccggtttaaggatagcctgggaaacccaacccacatcctgagaatcggcgagagctataaggagaagcagcggaccatccaggccaagaaggaggtggagcagcggagagccggcggctacagccggaagtacgccagcaaagccaagaatctggcagacgatatggtgagaaacaccgctagagatctgctgtactacgccgtgacccaggatgccatgctgatcttcgccaacctgagccggggcttcggccggcagggcaagcggaccttcatggccgagagacagtacacacggatggaggactggctgaccgccaagctggcctacgagggcctgagcaagacctacctgtccaagacactggcccagtacacctccaagacatgcagcaactgtgggtttaccatcaccagcgccgactacgacagggtgctggagaagctgaagaagacagcaacaggctggatgaccacaattaacggcaaggagctgaaggtggagggccagattacctactacaacagatacaagagacagaacgtagtcaaggacctgtccgtcgagctggatagactgagcgaagaatctgtgaacaacgacatctcctcctggacaaagggcagaagcggagaagctctgagcctcctgaagaaaagattctcccatagacccgtgcaggagaagttcgtgtgcctgaactgcggcttcgagacacacgcagccgagcaagccgccctgaacatcgccagatcctggctgttcctgcggagccaggagtacaagaaataccagacaaacaagacaaccggcaacaccgataagagagccttcgtcgagacctggcagtccttttaccggaagaagcttaaggaggtgtggaaacctgccgtgcggtctggcggatctggcggaggctcctttccaggtgcccgtgaccttcagggacgtggccgtgtacttctgcagggaggagtgggagtgcctgagccccagccagaggaccctgtacaggaacgtgatgctggagaacttcaggaacctgaacgagctgggctgctgcagcaggaggcccggcctgatcaccaggctggagcagtgggacgagccctgggtggacgactgggacaggagcgagttccccgacggccagaagagcttctgcggatctggctccggcagcggccccaagaaaaagagaaaagtctaagctgccttctgcggggcttgccttctggccatgcccttcttctctcccttgcacctgtacctcttggtctttgaataaagcctgagtaggaaggctagcaaaaaaaaaaaaaaaaaaaaaaaaaaaaaaaaaaaaaaaaaaaaaaaaaaaaaaaaaaaaaaaaaaaaaaaaaaaaaaaa

SEQ ID NO: 16070 - RNA, 9485 nt, synthetic construct
  source 1..9485: mol_type = other RNA
aggaaataagagagaaaagaagagtaagaagaaatataagagccaccatggcccctaagaagaagcgtaaagtgagccggatggaacgcctcgtctacgaggtgcggcagaagtgcagaaacatcgaggacatctgcatctcctgcggatctctgaacgtgaccctggagcacccactgttcatcggcggcatgtgccagaactgtaaaaactgttttctggagtgtgcctatcaatacgacgatgacggctaccagagctactgcaccatctgttgcggcggaagagaggtgctgatgtgtggaaataacaactgctgccggtgcttctgcgtggaatgcgtggacctgctggtgggccccggcgccgcccaggccgctattaaggaagatccttggaactgctacatgtgcggccacaagggcacatacggcctgctgagacggagagaggactggcctagcagactgcagatgttcttcgccaataaccacgaccaggagttcgacccccctaaggtgtaccctcccgtccccgccgagaagagaaagcccatccgggtcctgagcctgttcgatggcatcgccaccggtctgctggtgctgaaggacctgggcatccaggtggataggtacattgcctccgaggtgtgcgaggactccatcaccgtgggaatggtgcgtcatcagggcaagatcatgtacgtgggcgacgtgcggagcgtgacacagaagcatatccaggagtggggccctttcgacctggtgatcggcggcagcccttgcaatgacctgagcatcgtgaacccagcccggaagggcctgtacgagggaaccggcagactgttcttcgagttttacagactgctgcacgacgcccggcctaaggaaggcgacgaccggcccttcttttggctgttcgagaatgtggtggccatgggagtcagcgacaagcgggatattagccggttcctggagagcaaccccgtgatgatcgatgccaaggaagtgagcgccgcccaccgggccagatacttctggggcaatctgcctggcatgaacagacccctggccagcaccgtgaacgacaagctggagctgcaggagtgcctggagcacggccggatcgccaagttcagcaaggtgagaaccatcaccacccgaagcaacagcatcaaacaaggcaaggaccagcactttcctgtgttcatgaacgagaaggaggacatcctgtggtgtaccgagatggagagagtgttcgggttcccagtccactacacagatgtcagcaacatgtctagactggccagacagagactgctgggaagaagctggtccgtccctgtgatcagacacctgttcgcccctctgaaggagtacttcgcctgcgtgagcagcggcaacagcaacgccaacagccggggccccagcttctctagcggcctggtgccactgtccctgagagggagccacatgggccccatggagatctacaaaaccgtgagcgcctggaagcggcagcctgtgcgcgtgctgagcctgtttcggaatatcgataaagtcctgaaaagcctgggattcctggagagcggctctggctccggcggtggcaccctgaagtacgtggaggatgtgacaaacgtggtcagacgggatgtggagaagtggggccccttcgatctggtgtacggcagcacccaacccctgggcagctcttgtgaccggtgccctggctggtacatgtttcagttccaccggatcctgcagtacgccctgccgagacaggagtcccagcggccattcttttggattttcatggacaacttgctgctgaccgaggatgaccaggaaactaccactcggttcctgcagaccgaagccgtgaccctgcaggacgtgagaggccgggactaccagaacgccatgcgggtgtggtccaacatccctggactgaaaagcaagcacgcacctctgacccctaaagaagaggagtacctgcaggcccaggtgcggagcagaagcaagctggacgcccctaaggtggatctgctggtgaagaattgcctcctgcccctgagagagtacttcaagtatttcagccagaatagtctgcccctgggaggcagcggcggcggcgccctggtgacatttgaggacgtcgccgtgcggttcacccaggaggaatgggctctgctggatccttctcagaaaatcctgtaccgggacgtgatgagagagacataccggaatctgacctccgtgggcatcaactgggaatgttgggaccttgaagcctgcttcagaagcctgggaagaaacctgagagtgcaggtggtgaagagaaagtgcgagctgaccaacagcggcccctgcgccgagggcggcccaagcagcggcgcccctcctcccagcggcggcagcccagccggctccccaacctctaccgaggagggcacctctgagtccgccacccccgagagcggccctggcacctccaccgagcccagcgagggcagcgcacccggcagccctgccggcagccccacctccacagaggagggaaccagcaccgagcccagcgaaggcagcgccccaggcaccagcaccgagcctagtgagcaggagattaaacggatcaacaagatcagaagaagacttgtgaaagacagcaacaccaagaaggccggcaagacaggccccatgaaaaccctgctggttagagtgatgacacccgatctgagagagcggctggaaaacctgagaaagaagcctgaaaatatcccccagcccatcagcaatacatctagagccaacctgaataagctgctgaccgattacaccgaaatgaagaaggcgatcctgcatgtgtactgggaagagttccagaaggaccctgtgggcctgatgagccgggtggcccagcctgccagcaagaagatcgatcagaacaagctgaaacctgagatggacgagaagggcaacctgaccaccgccggctttgcctgctctcagtgtggccagcccctgttcgtgtacaagctggagcaggtgtctgagaagggcaaggcttacaccaactacttcggacggtgcaatgtggccgagcacgaaaagctgatcctgctggcccagctgaagcccgagaaggatagcgacgaagccgtgacatatagcctgggaaagtttgggcagagggccctggatttctacagcattcatgtgaccaaggagtccacccaccccgtgaagcccctggcccagatcgccggaaacagatacgcctccggacctgtgggaaaggccctgagcgacgcatgtatgggcacaatcgcctccttcctgtctaagtaccaggacatcatcatcgaacaccagaaggtggtgaagggcaaccagaagagactggagagcctgcgggagctggccggcaaggaaaacctggaataccctagcgtgaccctgccacctcagcctcacaccaaggagggcgttgatgcctacaacgaagtgatcgcccgggtgcgaatgtgggtgaacctgaacctgtggcagaagctgaagctaagcagagatgatgccaagcctctgctgagactgaagggattcccttcctttcctctggtcgagagacaggccaacgaagtggactggtgggacatggtgtgtaacgtgaagaagctgatcaacgagaaaaaggaggatggcaaggtgttttggcagaatctggctggctacaagagacaggaagccctgagaccatacctgagcagcgaggaagatcggaagaagggaaagaaattcgctcggtaccagctgggcgacctgctgctgcacctggaaaagaagcacggcgaggactggggaaaggtgtacgacgaggcctgggagcggattgacaagaaagtggaaggcctgagcaagcacatcaagctggaagaggaacggagaagcgaggacgcccagagcaaggccgccctgaccgactggctgcgggctaaggccagcttcgtgatcgagggcctgaaggaggccgacaaggacgagttctgcagatgcgagctgaagctgcagaagtggtacggggacctgcggggaaagcccttcgccatcgaagccgagaacagcatcctggacatcagcggcttcagcaagcagtacaactgtgccttcatctggcagaaggacggcgtgaagaagctgaacctgtacctgatcatcaactacttcaagggcggcaagctgcggttcaagaagatcaaacctgaagccttcgaagccaacagattctacaccgtgatcaacaaaaagagcggcgagatcgtgcccatggaggtgaacttcaacttcgacgaccccaacctgatcatcctgcctctggcctttggcaagagacagggcagagaattcatctggaacgacctgctgtccctggaaaccggcagcctgaagctggccaacggaagagtgatcgagaagacactgtacaacagaagaacccggcaggatgagcctgccctgttcgtggccctgaccttcgagcggcgggaggtcctggactcctccaatatcaaaccaatgaacctgatcggcgtggcaagaggcgaaaacatccccgccgtgatcgccctgaccgaccccgagggctgcccactgagccggtttaaggatagcctgggaaacccaacccacatcctgagaatcggcgagagctataaggagaagcagcggaccatccaggccaagaaggaggtggagcagcggagagccggcggctacagccggaagtacgccagcaaagccaagaatctggcagacgatatggtgagaaacaccgctagagatctgctgtactacgccgtgacccaggatgccatgctgatcttcgccaacctgagccggggcttcggccggcagggcaagcggaccttcatggccgagagacagtacacacggatggaggactggctgaccgccaagctggcctacgagggcctgagcaagacctacctgtccaagacactggcccagtacacctccaagacatgcagcaactgtgggtttaccatcaccagcgccgactacgacagggtgctggagaagctgaagaagacagcaacaggctggatgaccacaattaacggcaaggagctgaaggtggagggccagattacctactacaacagatacaagagacagaacgtagtcaaggacctgtccgtcgagctggatagactgagcgaagaatctgtgaacaacgacatctcctcctggacaaagggcagaagcggagaagctctgagcctcctgaagaaaagattctcccatagacccgtgcaggagaagttcgtgtgcctgaactgcggcttcgagacacacgcagccgagcaagccgccctgaacatcgccagatcctggctgttcctgcggagccaggagtacaagaaataccagacaaacaagacaaccggcaacaccgataagagagccttcgtcgagacctggcagtccttttaccggaagaagcttaaggaggtgtggaaacctgccgtgcggtctggcggatctggcggaggctccagcgtgaccttcgaggacgtggccgtgtacttcagctgggaggagtgggccctgctggacgaggcccagaggtgcctgtaccacgacgtgatgctggagaacttcgccctgaccagcagcctgggctgctggcacggcgccgaggacaagggcgcccccagcgagaagagcatcagcgtggagggcgtgagccagatcaagaccctgaaggccgacagctgcccccagaagggccagcccttcggcggcccaagcagcggcgcccctcctcccagcggcggcagcccagccggctccccaacctctaccgaggagggcacctctgagtccgccacccccgagagcggccctggcacctccaccgagcccagcgagggcagcgcacccggcagccctgccggcagccccacctccacagaggagggaaccagcaccgagcccagcgaaggcagcgccccaggcaccagcaccgagcctagtgagcaggagattaaacggatcaacaagatcagaagaagacttgtgaaagacagcaacaccaagaaggccggcaagacaggccccatgaaaaccctgctggttagagtgatgacacccgatctgagagagcggctggaaaacctgagaaagaagcctgaaaatatcccccagcccatcagcaatacatctagagccaacctgaataagctgctgaccgattacaccgaaatgaagaaggcgatcctgcatgtgtactgggaagagttccagaaggaccctgtgggcctgatgagccgggtggcccagcctgccagcaagaagatcgatcagaacaagctgaaacctgagatggacgagaagggcaacctgaccaccgccggctttgcctgctctcagtgtggccagcccctgttcgtgtacaagctggagcaggtgtctgagaagggcaaggcttacaccaactacttcggacggtgcaatgtggccgagcacgaaaagctgatcctgctggcccagctgaagcccgagaaggatagcgacgaagccgtgacatatagcctgggaaagtttgggcagagggccctggatttctacagcattcatgtgaccaaggagtccacccaccccgtgaagcccctggcccagatcgccggaaacagatacgcctccggacctgtgggaaaggccctgagcgacgcatgtatgggcacaatcgcctccttcctgtctaagtaccaggacatcatcatcgaacaccagaaggtggtgaagggcaaccagaagagactggagagcctgcgggagctggccggcaaggaaaacctggaataccctagcgtgaccctgccacctcagcctcacaccaaggagggcgttgatgcctacaacgaagtgatcgcccgggtgcgaatgtgggtgaacctgaacctgtggcagaagctgaagctaagcagagatgatgccaagcctctgctgagactgaagggattcccttcctttcctctggtcgagagacaggccaacgaagtggactggtgggacatggtgtgtaacgtgaagaagctgatcaacgagaaaaaggaggatggcaaggtgttttggcagaatctggctggctacaagagacaggaagccctgagaccatacctgagcagcgaggaagatcggaagaagggaaagaaattcgctcggtaccagctgggcgacctgctgctgcacctggaaaagaagcacggcgaggactggggaaaggtgtacgacgaggcctgggagcggattgacaagaaagtggaaggcctgagcaagcacatcaagctggaagaggaacggagaagcgaggacgcccagagcaaggccgccctgaccgactggctgcgggctaaggccagcttcgtgatcgagggcctgaaggaggccgacaaggacgagttctgcagatgcgagctgaagctgcagaagtggtacggggacctgcggggaaagcccttcgccatcgaagccgagaacagcatcctggacatcagcggcttcagcaagcagtacaactgtgccttcatctggcagaaggacggcgtgaagaagctgaacctgtacctgatcatcaactacttcaagggcggcaagctgcggttcaagaagatcaaacctgaagccttcgaagccaacagattctacaccgtgatcaacaaaaagagcggcgagatcgtgcccatggaggtgaacttcaacttcgacgaccccaacctgatcatcctgcctctggcctttggcaagagacagggcagagaattcatctggaacgacctgctgtccctggaaaccggcagcctgaagctggccaacggaagagtgatcgagaagacactgtacaacagaagaacccggcaggatgagcctgccctgttcgtggccctgaccttcgagcggcgggaggtcctggactcctccaatatcaaaccaatgaacctgatcggcgtggcaagaggcgaaaacatccccgccgtgatcgccctgaccgaccccgagggctgcccactgagccggtttaaggatagcctgggaaacccaacccacatcctgagaatcggcgagagctataaggagaagcagcggaccatccaggccaagaaggaggtggagcagcggagagccggcggctacagccggaagtacgccagcaaagccaagaatctggcagacgatatggtgagaaacaccgctagagatctgctgtactacgccgtgacccaggatgccatgctgatcttcgccaacctgagccggggcttcggccggcagggcaagcggaccttcatggccgagagacagtacacacggatggaggactggctgaccgccaagctggcctacgagggcctgagcaagacctacctgtccaagacactggcccagtacacctccaagacatgcagcaactgtgggtttaccatcaccagcgccgactacgacagggtgctggagaagctgaagaagacagcaacaggctggatgaccacaattaacggcaaggagctgaaggtggagggccagattacctactacaacagatacaagagacagaacgtagtcaaggacctgtccgtcgagctggatagactgagcgaagaatctgtgaacaacgacatctcctcctggacaaagggcagaagcggagaagctctgagcctcctgaagaaaagattctcccatagacccgtgcaggagaagttcgtgtgcctgaactgcggcttcgagacacacgcagccgagcaagccgccctgaacatcgccagatcctggctgttcctgcggagccaggagtacaagaaataccagacaaacaagacaaccggcaacaccgataagagagccttcgtcgagacctggcagtccttttaccggaagaagcttaaggaggtgtggaaacctgccgtgcggtctggcggatctggcggaggctcctagcgtgaccttcgaggacgtggccgtgtacttcagctgggaggagtgggccctgctggacgaggcccagaggtgcctgtaccacgacgtgatgctggagaacttcgccctgaccagcagcctgggctgctggcacggcgccgaggacaagggcgcccccagcgagaagagcatcagcgtggagggcgtgagccagatcaagaccctgaaggccgacagctgcccccagaagggccagcccttcggatctggctccggcagcggccccaagaaaaagagaaaagtctaagctgccttctgcggggcttgccttctggccatgcccttcttctctcccttgcacctgtacctcttggtctttgaataaagcctgagtaggaaggctagcaaaaaaaaaaaaaaaaaaaaaaaaaaaaaaaaaaaaaaaaaaaaaaaaaaaaaaaaaaaaaaaaaaaaaaaaaaaaaaaa

SEQ ID NO: 16071 - RNA, 9485 nt, synthetic construct
  source 1..9485: mol_type = other RNA
aggaaataagagagaaaagaagagtaagaagaaatataagagccaccatggcccctaagaagaagcgtaaagtgagccggatggaacgcctcgtctacgaggtgcggcagaagtgcagaaacatcgaggacatctgcatctcctgcggatctctgaacgtgaccctggagcacccactgttcatcggcggcatgtgccagaactgtaaaaactgttttctggagtgtgcctatcaatacgacgatgacggctaccagagctactgcaccatctgttgcggcggaagagaggtgctgatgtgtggaaataacaactgctgccggtgcttctgcgtggaatgcgtggacctgctggtgggccccggcgccgcccaggccgctattaaggaagatccttggaactgctacatgtgcggccacaagggcacatacggcctgctgagacggagagaggactggcctagcagactgcagatgttcttcgccaataaccacgaccaggagttcgacccccctaaggtgtaccctcccgtccccgccgagaagagaaagcccatccgggtcctgagcctgttcgatggcatcgccaccggtctgctggtgctgaaggacctgggcatccaggtggataggtacattgcctccgaggtgtgcgaggactccatcaccgtgggaatggtgcgtcatcagggcaagatcatgtacgtgggcgacgtgcggagcgtgacacagaagcatatccaggagtggggccctttcgacctggtgatcggcggcagcccttgcaatgacctgagcatcgtgaacccagcccggaagggcctgtacgagggaaccggcagactgttcttcgagttttacagactgctgcacgacgcccggcctaaggaaggcgacgaccggcccttcttttggctgttcgagaatgtggtggccatgggagtcagcgacaagcgggatattagccggttcctggagagcaaccccgtgatgatcgatgccaaggaagtgagcgccgcccaccgggccagatacttctggggcaatctgcctggcatgaacagacccctggccagcaccgtgaacgacaagctggagctgcaggagtgcctggagcacggccggatcgccaagttcagcaaggtgagaaccatcaccacccgaagcaacagcatcaaacaaggcaaggaccagcactttcctgtgttcatgaacgagaaggaggacatcctgtggtgtaccgagatggagagagtgttcgggttcccagtccactacacagatgtcagcaacatgtctagactggccagacagagactgctgggaagaagctggtccgtccctgtgatcagacacctgttcgcccctctgaaggagtacttcgcctgcgtgagcagcggcaacagcaacgccaacagccggggccccagcttctctagcggcctggtgccactgtccctgagagggagccacatgggccccatggagatctacaaaaccgtgagcgcctggaagcggcagcctgtgcgcgtgctgagcctgtttcggaatatcgataaagtcctgaaaagcctgggattcctggagagcggctctggctccggcggtggcaccctgaagtacgtggaggatgtgacaaacgtggtcagacgggatgtggagaagtggggccccttcgatctggtgtacggcagcacccaacccctgggcagctcttgtgaccggtgccctggctggtacatgtttcagttccaccggatcctgcagtacgccctgccgagacaggagtcccagcggccattcttttggattttcatggacaacttgctgctgaccgaggatgaccaggaaactaccactcggttcctgcagaccgaagccgtgaccctgcaggacgtgagaggccgggactaccagaacgccatgcgggtgtggtccaacatccctggactgaaaagcaagcacgcacctctgacccctaaagaagaggagtacctgcaggcccaggtgcggagcagaagcaagctggacgcccctaaggtggatctgctggtgaagaattgcctcctgcccctgagagagtacttcaagtatttcagccagaatagtctgcccctgggaggcagcggcggcggcgccctggtgacatttgaggacgtcgccgtgcggttcacccaggaggaatgggctctgctggatccttctcagaaaatcctgtaccgggacgtgatgagagagacataccggaatctgacctccgtgggcatcaactgggaatgttgggaccttgaagcctgcttcagaagcctgggaagaaacctgagagtgcaggtggtgaagagaaagtgcgagctgaccaacagcggcccctgcgccgagggcggcccaagcagcggcgcccctcctcccagcggcggcagcccagccggctccccaacctctaccgaggagggcacctctgagtccgccacccccgagagcggccctggcacctccaccgagcccagcgagggcagcgcacccggcagccctgccggcagccccacctccacagaggagggaaccagcaccgagcccagcgaaggcagcgccccaggcaccagcaccgagcctagtgagcaggagattaaacggatcaacaagatcagaagaagacttgtgaaagacagcaacaccaagaaggccggcaagacaggccccatgaaaaccctgctggttagagtgatgacacccgatctgagagagcggctggaaaacctgagaaagaagcctgaaaatatcccccagcccatcagcaatacatctagagccaacctgaataagctgctgaccgattacaccgaaatgaagaaggcgatcctgcatgtgtactgggaagagttccagaaggaccctgtgggcctgatgagccgggtggcccagcctgccagcaagaagatcgatcagaacaagctgaaacctgagatggacgagaagggcaacctgaccaccgccggctttgcctgctctcagtgtggccagcccctgttcgtgtacaagctggagcaggtgtctgagaagggcaaggcttacaccaactacttcggacggtgcaatgtggccgagcacgaaaagctgatcctgctggcccagctgaagcccgagaaggatagcgacgaagccgtgacatatagcctgggaaagtttgggcagagggccctggatttctacagcattcatgtgaccaaggagtccacccaccccgtgaagcccctggcccagatcgccggaaacagatacgcctccggacctgtgggaaaggccctgagcgacgcatgtatgggcacaatcgcctccttcctgtctaagtaccaggacatcatcatcgaacaccagaaggtggtgaagggcaaccagaagagactggagagcctgcgggagctggccggcaaggaaaacctggaataccctagcgtgaccctgccacctcagcctcacaccaaggagggcgttgatgcctacaacgaagtgatcgcccgggtgcgaatgtgggtgaacctgaacctgtggcagaagctgaagctaagcagagatgatgccaagcctctgctgagactgaagggattcccttcctttcctctggtcgagagacaggccaacgaagtggactggtgggacatggtgtgtaacgtgaagaagctgatcaacgagaaaaaggaggatggcaaggtgttttggcagaatctggctggctacaagagacaggaagccctgagaccatacctgagcagcgaggaagatcggaagaagggaaagaaattcgctcggtaccagctgggcgacctgctgctgcacctggaaaagaagcacggcgaggactggggaaaggtgtacgacgaggcctgggagcggattgacaagaaagtggaaggcctgagcaagcacatcaagctggaagaggaacggagaagcgaggacgcccagagcaaggccgccctgaccgactggctgcgggctaaggccagcttcgtgatcgagggcctgaaggaggccgacaaggacgagttctgcagatgcgagctgaagctgcagaagtggtacggggacctgcggggaaagcccttcgccatcgaagccgagaacagcatcctggacatcagcggcttcagcaagcagtacaactgtgccttcatctggcagaaggacggcgtgaagaagctgaacctgtacctgatcatcaactacttcaagggcggcaagctgcggttcaagaagatcaaacctgaagccttcgaagccaacagattctacaccgtgatcaacaaaaagagcggcgagatcgtgcccatggaggtgaacttcaacttcgacgaccccaacctgatcatcctgcctctggcctttggcaagagacagggcagagaattcatctggaacgacctgctgtccctggaaaccggcagcctgaagctggccaacggaagagtgatcgagaagacactgtacaacagaagaacccggcaggatgagcctgccctgttcgtggccctgaccttcgagcggcgggaggtcctggactcctccaatatcaaaccaatgaacctgatcggcgtggcaagaggcgaaaacatccccgccgtgatcgccctgaccgaccccgagggctgcccactgagccggtttaaggatagcctgggaaacccaacccacatcctgagaatcggcgagagctataaggagaagcagcggaccatccaggccaagaaggaggtggagcagcggagagccggcggctacagccggaagtacgccagcaaagccaagaatctggcagacgatatggtgagaaacaccgctagagatctgctgtactacgccgtgacccaggatgccatgctgatcttcgccaacctgagccggggcttcggccggcagggcaagcggaccttcatggccgagagacagtacacacggatggaggactggctgaccgccaagctggcctacgagggcctgagcaagacctacctgtccaagacactggcccagtacacctccaagacatgcagcaactgtgggtttaccatcaccagcgccgactacgacagggtgctggagaagctgaagaagacagcaacaggctggatgaccacaattaacggcaaggagctgaaggtggagggccagattacctactacaacagatacaagagacagaacgtagtcaaggacctgtccgtcgagctggatagactgagcgaagaatctgtgaacaacgacatctcctcctggacaaagggcagaagcggagaagctctgagcctcctgaagaaaagattctcccatagacccgtgcaggagaagttcgtgtgcctgaactgcggcttcgagacacacgcagccgagcaagccgccctgaacatcgccagatcctggctgttcctgcggagccaggagtacaagaaataccagacaaacaagacaaccggcaacaccgataagagagccttcgtcgagacctggcagtccttttaccggaagaagcttaaggaggtgtggaaacctgccgtgcggtctggcggatctggcggaggctccatggcccacctgatgatgttcagggacgtggccgtggacttcagccaggaggagtgggagtgcctggacctggagcagagggacctgtacagggacgtgatgctggagaactacagcaacatggtgagcctgggcctgtgcatctaccagcccgaggccttcagcctgctggagaagggcaaggacccctggaagatcctgagggacgagaccaggaggccctgccccgacatgcagagcaggggcggcccaagcagcggcgcccctcctcccagcggcggcagcccagccggctccccaacctctaccgaggagggcacctctgagtccgccacccccgagagcggccctggcacctccaccgagcccagcgagggcagcgcacccggcagccctgccggcagccccacctccacagaggagggaaccagcaccgagcccagcgaaggcagcgccccaggcaccagcaccgagcctagtgagcaggagattaaacggatcaacaagatcagaagaagacttgtgaaagacagcaacaccaagaaggccggcaagacaggccccatgaaaaccctgctggttagagtgatgacacccgatctgagagagcggctggaaaacctgagaaagaagcctgaaaatatcccccagcccatcagcaatacatctagagccaacctgaataagctgctgaccgattacaccgaaatgaagaaggcgatcctgcatgtgtactgggaagagttccagaaggaccctgtgggcctgatgagccgggtggcccagcctgccagcaagaagatcgatcagaacaagctgaaacctgagatggacgagaagggcaacctgaccaccgccggctttgcctgctctcagtgtggccagcccctgttcgtgtacaagctggagcaggtgtctgagaagggcaaggcttacaccaactacttcggacggtgcaatgtggccgagcacgaaaagctgatcctgctggcccagctgaagcccgagaaggatagcgacgaagccgtgacatatagcctgggaaagtttgggcagagggccctggatttctacagcattcatgtgaccaaggagtccacccaccccgtgaagcccctggcccagatcgccggaaacagatacgcctccggacctgtgggaaaggccctgagcgacgcatgtatgggcacaatcgcctccttcctgtctaagtaccaggacatcatcatcgaacaccagaaggtggtgaagggcaaccagaagagactggagagcctgcgggagctggccggcaaggaaaacctggaataccctagcgtgaccctgccacctcagcctcacaccaaggagggcgttgatgcctacaacgaagtgatcgcccgggtgcgaatgtgggtgaacctgaacctgtggcagaagctgaagctaagcagagatgatgccaagcctctgctgagactgaagggattcccttcctttcctctggtcgagagacaggccaacgaagtggactggtgggacatggtgtgtaacgtgaagaagctgatcaacgagaaaaaggaggatggcaaggtgttttggcagaatctggctggctacaagagacaggaagccctgagaccatacctgagcagcgaggaagatcggaagaagggaaagaaattcgctcggtaccagctgggcgacctgctgctgcacctggaaaagaagcacggcgaggactggggaaaggtgtacgacgaggcctgggagcggattgacaagaaagtggaaggcctgagcaagcacatcaagctggaagaggaacggagaagcgaggacgcccagagcaaggccgccctgaccgactggctgcgggctaaggccagcttcgtgatcgagggcctgaaggaggccgacaaggacgagttctgcagatgcgagctgaagctgcagaagtggtacggggacctgcggggaaagcccttcgccatcgaagccgagaacagcatcctggacatcagcggcttcagcaagcagtacaactgtgccttcatctggcagaaggacggcgtgaagaagctgaacctgtacctgatcatcaactacttcaagggcggcaagctgcggttcaagaagatcaaacctgaagccttcgaagccaacagattctacaccgtgatcaacaaaaagagcggcgagatcgtgcccatggaggtgaacttcaacttcgacgaccccaacctgatcatcctgcctctggcctttggcaagagacagggcagagaattcatctggaacgacctgctgtccctggaaaccggcagcctgaagctggccaacggaagagtgatcgagaagacactgtacaacagaagaacccggcaggatgagcctgccctgttcgtggccctgaccttcgagcggcgggaggtcctggactcctccaatatcaaaccaatgaacctgatcggcgtggcaagaggcgaaaacatccccgccgtgatcgccctgaccgaccccgagggctgcccactgagccggtttaaggatagcctgggaaacccaacccacatcctgagaatcggcgagagctataaggagaagcagcggaccatccaggccaagaaggaggtggagcagcggagagccggcggctacagccggaagtacgccagcaaagccaagaatctggcagacgatatggtgagaaacaccgctagagatctgctgtactacgccgtgacccaggatgccatgctgatcttcgccaacctgagccggggcttcggccggcagggcaagcggaccttcatggccgagagacagtacacacggatggaggactggctgaccgccaagctggcctacgagggcctgagcaagacctacctgtccaagacactggcccagtacacctccaagacatgcagcaactgtgggtttaccatcaccagcgccgactacgacagggtgctggagaagctgaagaagacagcaacaggctggatgaccacaattaacggcaaggagctgaaggtggagggccagattacctactacaacagatacaagagacagaacgtagtcaaggacctgtccgtcgagctggatagactgagcgaagaatctgtgaacaacgacatctcctcctggacaaagggcagaagcggagaagctctgagcctcctgaagaaaagattctcccatagacccgtgcaggagaagttcgtgtgcctgaactgcggcttcgagacacacgcagccgagcaagccgccctgaacatcgccagatcctggctgttcctgcggagccaggagtacaagaaataccagacaaacaagacaaccggcaacaccgataagagagccttcgtcgagacctggcagtccttttaccggaagaagcttaaggaggtgtggaaacctgccgtgcggtctggcggatctggcggaggctcctatggcccacctgatgatgttcagggacgtggccgtggacttcagccaggaggagtgggagtgcctggacctggagcagagggacctgtacagggacgtgatgctggagaactacagcaacatggtgagcctgggcctgtgcatctaccagcccgaggccttcagcctgctggagaagggcaaggacccctggaagatcctgagggacgagaccaggaggccctgccccgacatgcagagcaggggatctggctccggcagcggccccaagaaaaagagaaaagtctaagctgccttctgcggggcttgccttctggccatgcccttcttctctcccttgcacctgtacctcttggtctttgaataaagcctgagtaggaaggctagcaaaaaaaaaaaaaaaaaaaaaaaaaaaaaaaaaaaaaaaaaaaaaaaaaaaaaaaaaaaaaaaaaaaaaaaaaaaaaaaa

SEQ ID NO: 16072 - RNA, 9485 nt, synthetic construct
  source 1..9485: mol_type = other RNA
aggaaataagagagaaaagaagagtaagaagaaatataagagccaccatggcccctaagaagaagcgtaaagtgagccggatggaacgcctcgtctacgaggtgcggcagaagtgcagaaacatcgaggacatctgcatctcctgcggatctctgaacgtgaccctggagcacccactgttcatcggcggcatgtgccagaactgtaaaaactgttttctggagtgtgcctatcaatacgacgatgacggctaccagagctactgcaccatctgttgcggcggaagagaggtgctgatgtgtggaaataacaactgctgccggtgcttctgcgtggaatgcgtggacctgctggtgggccccggcgccgcccaggccgctattaaggaagatccttggaactgctacatgtgcggccacaagggcacatacggcctgctgagacggagagaggactggcctagcagactgcagatgttcttcgccaataaccacgaccaggagttcgacccccctaaggtgtaccctcccgtccccgccgagaagagaaagcccatccgggtcctgagcctgttcgatggcatcgccaccggtctgctggtgctgaaggacctgggcatccaggtggataggtacattgcctccgaggtgtgcgaggactccatcaccgtgggaatggtgcgtcatcagggcaagatcatgtacgtgggcgacgtgcggagcgtgacacagaagcatatccaggagtggggccctttcgacctggtgatcggcggcagcccttgcaatgacctgagcatcgtgaacccagcccggaagggcctgtacgagggaaccggcagactgttcttcgagttttacagactgctgcacgacgcccggcctaaggaaggcgacgaccggcccttcttttggctgttcgagaatgtggtggccatgggagtcagcgacaagcgggatattagccggttcctggagagcaaccccgtgatgatcgatgccaaggaagtgagcgccgcccaccgggccagatacttctggggcaatctgcctggcatgaacagacccctggccagcaccgtgaacgacaagctggagctgcaggagtgcctggagcacggccggatcgccaagttcagcaaggtgagaaccatcaccacccgaagcaacagcatcaaacaaggcaaggaccagcactttcctgtgttcatgaacgagaaggaggacatcctgtggtgtaccgagatggagagagtgttcgggttcccagtccactacacagatgtcagcaacatgtctagactggccagacagagactgctgggaagaagctggtccgtccctgtgatcagacacctgttcgcccctctgaaggagtacttcgcctgcgtgagcagcggcaacagcaacgccaacagccggggccccagcttctctagcggcctggtgccactgtccctgagagggagccacatgggccccatggagatctacaaaaccgtgagcgcctggaagcggcagcctgtgcgcgtgctgagcctgtttcggaatatcgataaagtcctgaaaagcctgggattcctggagagcggctctggctccggcggtggcaccctgaagtacgtggaggatgtgacaaacgtggtcagacgggatgtggagaagtggggccccttcgatctggtgtacggcagcacccaacccctgggcagctcttgtgaccggtgccctggctggtacatgtttcagttccaccggatcctgcagtacgccctgccgagacaggagtcccagcggccattcttttggattttcatggacaacttgctgctgaccgaggatgaccaggaaactaccactcggttcctgcagaccgaagccgtgaccctgcaggacgtgagaggccgggactaccagaacgccatgcgggtgtggtccaacatccctggactgaaaagcaagcacgcacctctgacccctaaagaagaggagtacctgcaggcccaggtgcggagcagaagcaagctggacgcccctaaggtggatctgctggtgaagaattgcctcctgcccctgagagagtacttcaagtatttcagccagaatagtctgcccctgggaggcagcggcggcggcgccctggtgacatttgaggacgtcgccgtgcggttcacccaggaggaatgggctctgctggatccttctcagaaaatcctgtaccgggacgtgatgagagagacataccggaatctgacctccgtgggcatcaactgggaatgttgggaccttgaagcctgcttcagaagcctgggaagaaacctgagagtgcaggtggtgaagagaaagtgcgagctgaccaacagcggcccctgcgccgagggcggcccaagcagcggcgcccctcctcccagcggcggcagcccagccggctccccaacctctaccgaggagggcacctctgagtccgccacccccgagagcggccctggcacctccaccgagcccagcgagggcagcgcacccggcagccctgccggcagccccacctccacagaggagggaaccagcaccgagcccagcgaaggcagcgccccaggcaccagcaccgagcctagtgagcaggagattaaacggatcaacaagatcagaagaagacttgtgaaagacagcaacaccaagaaggccggcaagacaggccccatgaaaaccctgctggttagagtgatgacacccgatctgagagagcggctggaaaacctgagaaagaagcctgaaaatatcccccagcccatcagcaatacatctagagccaacctgaataagctgctgaccgattacaccgaaatgaagaaggcgatcctgcatgtgtactgggaagagttccagaaggaccctgtgggcctgatgagccgggtggcccagcctgccagcaagaagatcgatcagaacaagctgaaacctgagatggacgagaagggcaacctgaccaccgccggctttgcctgctctcagtgtggccagcccctgttcgtgtacaagctggagcaggtgtctgagaagggcaaggcttacaccaactacttcggacggtgcaatgtggccgagcacgaaaagctgatcctgctggcccagctgaagcccgagaaggatagcgacgaagccgtgacatatagcctgggaaagtttgggcagagggccctggatttctacagcattcatgtgaccaaggagtccacccaccccgtgaagcccctggcccagatcgccggaaacagatacgcctccggacctgtgggaaaggccctgagcgacgcatgtatgggcacaatcgcctccttcctgtctaagtaccaggacatcatcatcgaacaccagaaggtggtgaagggcaaccagaagagactggagagcctgcgggagctggccggcaaggaaaacctggaataccctagcgtgaccctgccacctcagcctcacaccaaggagggcgttgatgcctacaacgaagtgatcgcccgggtgcgaatgtgggtgaacctgaacctgtggcagaagctgaagctaagcagagatgatgccaagcctctgctgagactgaagggattcccttcctttcctctggtcgagagacaggccaacgaagtggactggtgggacatggtgtgtaacgtgaagaagctgatcaacgagaaaaaggaggatggcaaggtgttttggcagaatctggctggctacaagagacaggaagccctgagaccatacctgagcagcgaggaagatcggaagaagggaaagaaattcgctcggtaccagctgggcgacctgctgctgcacctggaaaagaagcacggcgaggactggggaaaggtgtacgacgaggcctgggagcggattgacaagaaagtggaaggcctgagcaagcacatcaagctggaagaggaacggagaagcgaggacgcccagagcaaggccgccctgaccgactggctgcgggctaaggccagcttcgtgatcgagggcctgaaggaggccgacaaggacgagttctgcagatgcgagctgaagctgcagaagtggtacggggacctgcggggaaagcccttcgccatcgaagccgagaacagcatcctggacatcagcggcttcagcaagcagtacaactgtgccttcatctggcagaaggacggcgtgaagaagctgaacctgtacctgatcatcaactacttcaagggcggcaagctgcggttcaagaagatcaaacctgaagccttcgaagccaacagattctacaccgtgatcaacaaaaagagcggcgagatcgtgcccatggaggtgaacttcaacttcgacgaccccaacctgatcatcctgcctctggcctttggcaagagacagggcagagaattcatctggaacgacctgctgtccctggaaaccggcagcctgaagctggccaacggaagagtgatcgagaagacactgtacaacagaagaacccggcaggatgagcctgccctgttcgtggccctgaccttcgagcggcgggaggtcctggactcctccaatatcaaaccaatgaacctgatcggcgtggcaagaggcgaaaacatccccgccgtgatcgccctgaccgaccccgagggctgcccactgagccggtttaaggatagcctgggaaacccaacccacatcctgagaatcggcgagagctataaggagaagcagcggaccatccaggccaagaaggaggtggagcagcggagagccggcggctacagccggaagtacgccagcaaagccaagaatctggcagacgatatggtgagaaacaccgctagagatctgctgtactacgccgtgacccaggatgccatgctgatcttcgccaacctgagccggggcttcggccggcagggcaagcggaccttcatggccgagagacagtacacacggatggaggactggctgaccgccaagctggcctacgagggcctgagcaagacctacctgtccaagacactggcccagtacacctccaagacatgcagcaactgtgggtttaccatcaccagcgccgactacgacagggtgctggagaagctgaagaagacagcaacaggctggatgaccacaattaacggcaaggagctgaaggtggagggccagattacctactacaacagatacaagagacagaacgtagtcaaggacctgtccgtcgagctggatagactgagcgaagaatctgtgaacaacgacatctcctcctggacaaagggcagaagcggagaagctctgagcctcctgaagaaaagattctcccatagacccgtgcaggagaagttcgtgtgcctgaactgcggcttcgagacacacgcagccgagcaagccgccctgaacatcgccagatcctggctgttcctgcggagccaggagtacaagaaataccagacaaacaagacaaccggcaacaccgataagagagccttcgtcgagacctggcagtccttttaccggaagaagcttaaggaggtgtggaaacctgccgtgcggtctggcggatctggcggaggctccaggcccagggccgtgaagttcgccgacgtggccgtgtacttcagcaccgaggagtggggctgcctgaggcccgcccagagggccctgtacagggacgtgatgcaggagacctacggccacctgggcgccctgggctgcgccggccccaagcccgccctgatcagctggctggagaggaacaccgacgactgggagcccgccgccctggacccccaggagtgccccaggggcgtggccgtgcagggcggcccaagcagcggcgcccctcctcccagcggcggcagcccagccggctccccaacctctaccgaggagggcacctctgagtccgccacccccgagagcggccctggcacctccaccgagcccagcgagggcagcgcacccggcagccctgccggcagccccacctccacagaggagggaaccagcaccgagcccagcgaaggcagcgccccaggcaccagcaccgagcctagtgagcaggagattaaacggatcaacaagatcagaagaagacttgtgaaagacagcaacaccaagaaggccggcaagacaggccccatgaaaaccctgctggttagagtgatgacacccgatctgagagagcggctggaaaacctgagaaagaagcctgaaaatatcccccagcccatcagcaatacatctagagccaacctgaataagctgctgaccgattacaccgaaatgaagaaggcgatcctgcatgtgtactgggaagagttccagaaggaccctgtgggcctgatgagccgggtggcccagcctgccagcaagaagatcgatcagaacaagctgaaacctgagatggacgagaagggcaacctgaccaccgccggctttgcctgctctcagtgtggccagcccctgttcgtgtacaagctggagcaggtgtctgagaagggcaaggcttacaccaactacttcggacggtgcaatgtggccgagcacgaaaagctgatcctgctggcccagctgaagcccgagaaggatagcgacgaagccgtgacatatagcctgggaaagtttgggcagagggccctggatttctacagcattcatgtgaccaaggagtccacccaccccgtgaagcccctggcccagatcgccggaaacagatacgcctccggacctgtgggaaaggccctgagcgacgcatgtatgggcacaatcgcctccttcctgtctaagtaccaggacatcatcatcgaacaccagaaggtggtgaagggcaaccagaagagactggagagcctgcgggagctggccggcaaggaaaacctggaataccctagcgtgaccctgccacctcagcctcacaccaaggagggcgttgatgcctacaacgaagtgatcgcccgggtgcgaatgtgggtgaacctgaacctgtggcagaagctgaagctaagcagagatgatgccaagcctctgctgagactgaagggattcccttcctttcctctggtcgagagacaggccaacgaagtggactggtgggacatggtgtgtaacgtgaagaagctgatcaacgagaaaaaggaggatggcaaggtgttttggcagaatctggctggctacaagagacaggaagccctgagaccatacctgagcagcgaggaagatcggaagaagggaaagaaattcgctcggtaccagctgggcgacctgctgctgcacctggaaaagaagcacggcgaggactggggaaaggtgtacgacgaggcctgggagcggattgacaagaaagtggaaggcctgagcaagcacatcaagctggaagaggaacggagaagcgaggacgcccagagcaaggccgccctgaccgactggctgcgggctaaggccagcttcgtgatcgagggcctgaaggaggccgacaaggacgagttctgcagatgcgagctgaagctgcagaagtggtacggggacctgcggggaaagcccttcgccatcgaagccgagaacagcatcctggacatcagcggcttcagcaagcagtacaactgtgccttcatctggcagaaggacggcgtgaagaagctgaacctgtacctgatcatcaactacttcaagggcggcaagctgcggttcaagaagatcaaacctgaagccttcgaagccaacagattctacaccgtgatcaacaaaaagagcggcgagatcgtgcccatggaggtgaacttcaacttcgacgaccccaacctgatcatcctgcctctggcctttggcaagagacagggcagagaattcatctggaacgacctgctgtccctggaaaccggcagcctgaagctggccaacggaagagtgatcgagaagacactgtacaacagaagaacccggcaggatgagcctgccctgttcgtggccctgaccttcgagcggcgggaggtcctggactcctccaatatcaaaccaatgaacctgatcggcgtggcaagaggcgaaaacatccccgccgtgatcgccctgaccgaccccgagggctgcccactgagccggtttaaggatagcctgggaaacccaacccacatcctgagaatcggcgagagctataaggagaagcagcggaccatccaggccaagaaggaggtggagcagcggagagccggcggctacagccggaagtacgccagcaaagccaagaatctggcagacgatatggtgagaaacaccgctagagatctgctgtactacgccgtgacccaggatgccatgctgatcttcgccaacctgagccggggcttcggccggcagggcaagcggaccttcatggccgagagacagtacacacggatggaggactggctgaccgccaagctggcctacgagggcctgagcaagacctacctgtccaagacactggcccagtacacctccaagacatgcagcaactgtgggtttaccatcaccagcgccgactacgacagggtgctggagaagctgaagaagacagcaacaggctggatgaccacaattaacggcaaggagctgaaggtggagggccagattacctactacaacagatacaagagacagaacgtagtcaaggacctgtccgtcgagctggatagactgagcgaagaatctgtgaacaacgacatctcctcctggacaaagggcagaagcggagaagctctgagcctcctgaagaaaagattctcccatagacccgtgcaggagaagttcgtgtgcctgaactgcggcttcgagacacacgcagccgagcaagccgccctgaacatcgccagatcctggctgttcctgcggagccaggagtacaagaaataccagacaaacaagacaaccggcaacaccgataagagagccttcgtcgagacctggcagtccttttaccggaagaagcttaaggaggtgtggaaacctgccgtgcggtctggcggatctggcggaggctcctaggcccagggccgtgaagttcgccgacgtggccgtgtacttcagcaccgaggagtggggctgcctgaggcccgcccagagggccctgtacagggacgtgatgcaggagacctacggccacctgggcgccctgggctgcgccggccccaagcccgccctgatcagctggctggagaggaacaccgacgactgggagcccgccgccctggacccccaggagtgccccaggggcgtggccgtgcagggatctggctccggcagcggccccaagaaaaagagaaaagtctaagctgccttctgcggggcttgccttctggccatgcccttcttctctcccttgcacctgtacctcttggtctttgaataaagcctgagtaggaaggctagcaaaaaaaaaaaaaaaaaaaaaaaaaaaaaaaaaaaaaaaaaaaaaaaaaaaaaaaaaaaaaaaaaaaaaaaaaaaaaaaa

SEQ ID NO: 16073 - RNA, 9485 nt, synthetic construct
  source 1..9485: mol_type = other RNA
aggaaataagagagaaaagaagagtaagaagaaatataagagccaccatggcccctaagaagaagcgtaaagtgagccggatggaacgcctcgtctacgaggtgcggcagaagtgcagaaacatcgaggacatctgcatctcctgcggatctctgaacgtgaccctggagcacccactgttcatcggcggcatgtgccagaactgtaaaaactgttttctggagtgtgcctatcaatacgacgatgacggctaccagagctactgcaccatctgttgcggcggaagagaggtgctgatgtgtggaaataacaactgctgccggtgcttctgcgtggaatgcgtggacctgctggtgggccccggcgccgcccaggccgctattaaggaagatccttggaactgctacatgtgcggccacaagggcacatacggcctgctgagacggagagaggactggcctagcagactgcagatgttcttcgccaataaccacgaccaggagttcgacccccctaaggtgtaccctcccgtccccgccgagaagagaaagcccatccgggtcctgagcctgttcgatggcatcgccaccggtctgctggtgctgaaggacctgggcatccaggtggataggtacattgcctccgaggtgtgcgaggactccatcaccgtgggaatggtgcgtcatcagggcaagatcatgtacgtgggcgacgtgcggagcgtgacacagaagcatatccaggagtggggccctttcgacctggtgatcggcggcagcccttgcaatgacctgagcatcgtgaacccagcccggaagggcctgtacgagggaaccggcagactgttcttcgagttttacagactgctgcacgacgcccggcctaaggaaggcgacgaccggcccttcttttggctgttcgagaatgtggtggccatgggagtcagcgacaagcgggatattagccggttcctggagagcaaccccgtgatgatcgatgccaaggaagtgagcgccgcccaccgggccagatacttctggggcaatctgcctggcatgaacagacccctggccagcaccgtgaacgacaagctggagctgcaggagtgcctggagcacggccggatcgccaagttcagcaaggtgagaaccatcaccacccgaagcaacagcatcaaacaaggcaaggaccagcactttcctgtgttcatgaacgagaaggaggacatcctgtggtgtaccgagatggagagagtgttcgggttcccagtccactacacagatgtcagcaacatgtctagactggccagacagagactgctgggaagaagctggtccgtccctgtgatcagacacctgttcgcccctctgaaggagtacttcgcctgcgtgagcagcggcaacagcaacgccaacagccggggccccagcttctctagcggcctggtgccactgtccctgagagggagccacatgggccccatggagatctacaaaaccgtgagcgcctggaagcggcagcctgtgcgcgtgctgagcctgtttcggaatatcgataaagtcctgaaaagcctgggattcctggagagcggctctggctccggcggtggcaccctgaagtacgtggaggatgtgacaaacgtggtcagacgggatgtggagaagtggggccccttcgatctggtgtacggcagcacccaacccctgggcagctcttgtgaccggtgccctggctggtacatgtttcagttccaccggatcctgcagtacgccctgccgagacaggagtcccagcggccattcttttggattttcatggacaacttgctgctgaccgaggatgaccaggaaactaccactcggttcctgcagaccgaagccgtgaccctgcaggacgtgagaggccgggactaccagaacgccatgcgggtgtggtccaacatccctggactgaaaagcaagcacgcacctctgacccctaaagaagaggagtacctgcaggcccaggtgcggagcagaagcaagctggacgcccctaaggtggatctgctggtgaagaattgcctcctgcccctgagagagtacttcaagtatttcagccagaatagtctgcccctgggaggcagcggcggcggcgccctggtgacatttgaggacgtcgccgtgcggttcacccaggaggaatgggctctgctggatccttctcagaaaatcctgtaccgggacgtgatgagagagacataccggaatctgacctccgtgggcatcaactgggaatgttgggaccttgaagcctgcttcagaagcctgggaagaaacctgagagtgcaggtggtgaagagaaagtgcgagctgaccaacagcggcccctgcgccgagggcggcccaagcagcggcgcccctcctcccagcggcggcagcccagccggctccccaacctctaccgaggagggcacctctgagtccgccacccccgagagcggccctggcacctccaccgagcccagcgagggcagcgcacccggcagccctgccggcagccccacctccacagaggagggaaccagcaccgagcccagcgaaggcagcgccccaggcaccagcaccgagcctagtgagcaggagattaaacggatcaacaagatcagaagaagacttgtgaaagacagcaacaccaagaaggccggcaagacaggccccatgaaaaccctgctggttagagtgatgacacccgatctgagagagcggctggaaaacctgagaaagaagcctgaaaatatcccccagcccatcagcaatacatctagagccaacctgaataagctgctgaccgattacaccgaaatgaagaaggcgatcctgcatgtgtactgggaagagttccagaaggaccctgtgggcctgatgagccgggtggcccagcctgccagcaagaagatcgatcagaacaagctgaaacctgagatggacgagaagggcaacctgaccaccgccggctttgcctgctctcagtgtggccagcccctgttcgtgtacaagctggagcaggtgtctgagaagggcaaggcttacaccaactacttcggacggtgcaatgtggccgagcacgaaaagctgatcctgctggcccagctgaagcccgagaaggatagcgacgaagccgtgacatatagcctgggaaagtttgggcagagggccctggatttctacagcattcatgtgaccaaggagtccacccaccccgtgaagcccctggcccagatcgccggaaacagatacgcctccggacctgtgggaaaggccctgagcgacgcatgtatgggcacaatcgcctccttcctgtctaagtaccaggacatcatcatcgaacaccagaaggtggtgaagggcaaccagaagagactggagagcctgcgggagctggccggcaaggaaaacctggaataccctagcgtgaccctgccacctcagcctcacaccaaggagggcgttgatgcctacaacgaagtgatcgcccgggtgcgaatgtgggtgaacctgaacctgtggcagaagctgaagctaagcagagatgatgccaagcctctgctgagactgaagggattcccttcctttcctctggtcgagagacaggccaacgaagtggactggtgggacatggtgtgtaacgtgaagaagctgatcaacgagaaaaaggaggatggcaaggtgttttggcagaatctggctggctacaagagacaggaagccctgagaccatacctgagcagcgaggaagatcggaagaagggaaagaaattcgctcggtaccagctgggcgacctgctgctgcacctggaaaagaagcacggcgaggactggggaaaggtgtacgacgaggcctgggagcggattgacaagaaagtggaaggcctgagcaagcacatcaagctggaagaggaacggagaagcgaggacgcccagagcaaggccgccctgaccgactggctgcgggctaaggccagcttcgtgatcgagggcctgaaggaggccgacaaggacgagttctgcagatgcgagctgaagctgcagaagtggtacggggacctgcggggaaagcccttcgccatcgaagccgagaacagcatcctggacatcagcggcttcagcaagcagtacaactgtgccttcatctggcagaaggacggcgtgaagaagctgaacctgtacctgatcatcaactacttcaagggcggcaagctgcggttcaagaagatcaaacctgaagccttcgaagccaacagattctacaccgtgatcaacaaaaagagcggcgagatcgtgcccatggaggtgaacttcaacttcgacgaccccaacctgatcatcctgcctctggcctttggcaagagacagggcagagaattcatctggaacgacctgctgtccctggaaaccggcagcctgaagctggccaacggaagagtgatcgagaagacactgtacaacagaagaacccggcaggatgagcctgccctgttcgtggccctgaccttcgagcggcgggaggtcctggactcctccaatatcaaaccaatgaacctgatcggcgtggcaagaggcgaaaacatccccgccgtgatcgccctgaccgaccccgagggctgcccactgagccggtttaaggatagcctgggaaacccaacccacatcctgagaatcggcgagagctataaggagaagcagcggaccatccaggccaagaaggaggtggagcagcggagagccggcggctacagccggaagtacgccagcaaagccaagaatctggcagacgatatggtgagaaacaccgctagagatctgctgtactacgccgtgacccaggatgccatgctgatcttcgccaacctgagccggggcttcggccggcagggcaagcggaccttcatggccgagagacagtacacacggatggaggactggctgaccgccaagctggcctacgagggcctgagcaagacctacctgtccaagacactggcccagtacacctccaagacatgcagcaactgtgggtttaccatcaccagcgccgactacgacagggtgctggagaagctgaagaagacagcaacaggctggatgaccacaattaacggcaaggagctgaaggtggagggccagattacctactacaacagatacaagagacagaacgtagtcaaggacctgtccgtcgagctggatagactgagcgaagaatctgtgaacaacgacatctcctcctggacaaagggcagaagcggagaagctctgagcctcctgaagaaaagattctcccatagacccgtgcaggagaagttcgtgtgcctgaactgcggcttcgagacacacgcagccgagcaagccgccctgaacatcgccagatcctggctgttcctgcggagccaggagtacaagaaataccagacaaacaagacaaccggcaacaccgataagagagccttcgtcgagacctggcagtccttttaccggaagaagcttaaggaggtgtggaaacctgccgtgcggtctggcggatctggcggaggctccaggcccgagagcgtgaccttcgaggacgtggccatctacttcagcgagaacgagtggaccggcctggcccccgcccagagggccctgtacagggacgtgatgctggagaactacggcgccctggccagcctggccgccttccccttccccaagcccgccctgatcttccagctggagcagggcgaggccccctggagcagcgccccccagggcgccctggacggcgagggccccaggggcatcggcggcccaagcagcggcgcccctcctcccagcggcggcagcccagccggctccccaacctctaccgaggagggcacctctgagtccgccacccccgagagcggccctggcacctccaccgagcccagcgagggcagcgcacccggcagccctgccggcagccccacctccacagaggagggaaccagcaccgagcccagcgaaggcagcgccccaggcaccagcaccgagcctagtgagcaggagattaaacggatcaacaagatcagaagaagacttgtgaaagacagcaacaccaagaaggccggcaagacaggccccatgaaaaccctgctggttagagtgatgacacccgatctgagagagcggctggaaaacctgagaaagaagcctgaaaatatcccccagcccatcagcaatacatctagagccaacctgaataagctgctgaccgattacaccgaaatgaagaaggcgatcctgcatgtgtactgggaagagttccagaaggaccctgtgggcctgatgagccgggtggcccagcctgccagcaagaagatcgatcagaacaagctgaaacctgagatggacgagaagggcaacctgaccaccgccggctttgcctgctctcagtgtggccagcccctgttcgtgtacaagctggagcaggtgtctgagaagggcaaggcttacaccaactacttcggacggtgcaatgtggccgagcacgaaaagctgatcctgctggcccagctgaagcccgagaaggatagcgacgaagccgtgacatatagcctgggaaagtttgggcagagggccctggatttctacagcattcatgtgaccaaggagtccacccaccccgtgaagcccctggcccagatcgccggaaacagatacgcctccggacctgtgggaaaggccctgagcgacgcatgtatgggcacaatcgcctccttcctgtctaagtaccaggacatcatcatcgaacaccagaaggtggtgaagggcaaccagaagagactggagagcctgcgggagctggccggcaaggaaaacctggaataccctagcgtgaccctgccacctcagcctcacaccaaggagggcgttgatgcctacaacgaagtgatcgcccgggtgcgaatgtgggtgaacctgaacctgtggcagaagctgaagctaagcagagatgatgccaagcctctgctgagactgaagggattcccttcctttcctctggtcgagagacaggccaacgaagtggactggtgggacatggtgtgtaacgtgaagaagctgatcaacgagaaaaaggaggatggcaaggtgttttggcagaatctggctggctacaagagacaggaagccctgagaccatacctgagcagcgaggaagatcggaagaagggaaagaaattcgctcggtaccagctgggcgacctgctgctgcacctggaaaagaagcacggcgaggactggggaaaggtgtacgacgaggcctgggagcggattgacaagaaagtggaaggcctgagcaagcacatcaagctggaagaggaacggagaagcgaggacgcccagagcaaggccgccctgaccgactggctgcgggctaaggccagcttcgtgatcgagggcctgaaggaggccgacaaggacgagttctgcagatgcgagctgaagctgcagaagtggtacggggacctgcggggaaagcccttcgccatcgaagccgagaacagcatcctggacatcagcggcttcagcaagcagtacaactgtgccttcatctggcagaaggacggcgtgaagaagctgaacctgtacctgatcatcaactacttcaagggcggcaagctgcggttcaagaagatcaaacctgaagccttcgaagccaacagattctacaccgtgatcaacaaaaagagcggcgagatcgtgcccatggaggtgaacttcaacttcgacgaccccaacctgatcatcctgcctctggcctttggcaagagacagggcagagaattcatctggaacgacctgctgtccctggaaaccggcagcctgaagctggccaacggaagagtgatcgagaagacactgtacaacagaagaacccggcaggatgagcctgccctgttcgtggccctgaccttcgagcggcgggaggtcctggactcctccaatatcaaaccaatgaacctgatcggcgtggcaagaggcgaaaacatccccgccgtgatcgccctgaccgaccccgagggctgcccactgagccggtttaaggatagcctgggaaacccaacccacatcctgagaatcggcgagagctataaggagaagcagcggaccatccaggccaagaaggaggtggagcagcggagagccggcggctacagccggaagtacgccagcaaagccaagaatctggcagacgatatggtgagaaacaccgctagagatctgctgtactacgccgtgacccaggatgccatgctgatcttcgccaacctgagccggggcttcggccggcagggcaagcggaccttcatggccgagagacagtacacacggatggaggactggctgaccgccaagctggcctacgagggcctgagcaagacctacctgtccaagacactggcccagtacacctccaagacatgcagcaactgtgggtttaccatcaccagcgccgactacgacagggtgctggagaagctgaagaagacagcaacaggctggatgaccacaattaacggcaaggagctgaaggtggagggccagattacctactacaacagatacaagagacagaacgtagtcaaggacctgtccgtcgagctggatagactgagcgaagaatctgtgaacaacgacatctcctcctggacaaagggcagaagcggagaagctctgagcctcctgaagaaaagattctcccatagacccgtgcaggagaagttcgtgtgcctgaactgcggcttcgagacacacgcagccgagcaagccgccctgaacatcgccagatcctggctgttcctgcggagccaggagtacaagaaataccagacaaacaagacaaccggcaacaccgataagagagccttcgtcgagacctggcagtccttttaccggaagaagcttaaggaggtgtggaaacctgccgtgcggtctggcggatctggcggaggctcctaggcccgagagcgtgaccttcgaggacgtggccatctacttcagcgagaacgagtggaccggcctggcccccgcccagagggccctgtacagggacgtgatgctggagaactacggcgccctggccagcctggccgccttccccttccccaagcccgccctgatcttccagctggagcagggcgaggccccctggagcagcgccccccagggcgccctggacggcgagggccccaggggcatcggatctggctccggcagcggccccaagaaaaagagaaaagtctaagctgccttctgcggggcttgccttctggccatgcccttcttctctcccttgcacctgtacctcttggtctttgaataaagcctgagtaggaaggctagcaaaaaaaaaaaaaaaaaaaaaaaaaaaaaaaaaaaaaaaaaaaaaaaaaaaaaaaaaaaaaaaaaaaaaaaaaaaaaaaa

SEQ ID NO: 16074 - RNA, 9485 nt, synthetic construct
  source 1..9485: mol_type = other RNA
aggaaataagagagaaaagaagagtaagaagaaatataagagccaccatggcccctaagaagaagcgtaaagtgagccggatggaacgcctcgtctacgaggtgcggcagaagtgcagaaacatcgaggacatctgcatctcctgcggatctctgaacgtgaccctggagcacccactgttcatcggcggcatgtgccagaactgtaaaaactgttttctggagtgtgcctatcaatacgacgatgacggctaccagagctactgcaccatctgttgcggcggaagagaggtgctgatgtgtggaaataacaactgctgccggtgcttctgcgtggaatgcgtggacctgctggtgggccccggcgccgcccaggccgctattaaggaagatccttggaactgctacatgtgcggccacaagggcacatacggcctgctgagacggagagaggactggcctagcagactgcagatgttcttcgccaataaccacgaccaggagttcgacccccctaaggtgtaccctcccgtccccgccgagaagagaaagcccatccgggtcctgagcctgttcgatggcatcgccaccggtctgctggtgctgaaggacctgggcatccaggtggataggtacattgcctccgaggtgtgcgaggactccatcaccgtgggaatggtgcgtcatcagggcaagatcatgtacgtgggcgacgtgcggagcgtgacacagaagcatatccaggagtggggccctttcgacctggtgatcggcggcagcccttgcaatgacctgagcatcgtgaacccagcccggaagggcctgtacgagggaaccggcagactgttcttcgagttttacagactgctgcacgacgcccggcctaaggaaggcgacgaccggcccttcttttggctgttcgagaatgtggtggccatgggagtcagcgacaagcgggatattagccggttcctggagagcaaccccgtgatgatcgatgccaaggaagtgagcgccgcccaccgggccagatacttctggggcaatctgcctggcatgaacagacccctggccagcaccgtgaacgacaagctggagctgcaggagtgcctggagcacggccggatcgccaagttcagcaaggtgagaaccatcaccacccgaagcaacagcatcaaacaaggcaaggaccagcactttcctgtgttcatgaacgagaaggaggacatcctgtggtgtaccgagatggagagagtgttcgggttcccagtccactacacagatgtcagcaacatgtctagactggccagacagagactgctgggaagaagctggtccgtccctgtgatcagacacctgttcgcccctctgaaggagtacttcgcctgcgtgagcagcggcaacagcaacgccaacagccggggccccagcttctctagcggcctggtgccactgtccctgagagggagccacatgggccccatggagatctacaaaaccgtgagcgcctggaagcggcagcctgtgcgcgtgctgagcctgtttcggaatatcgataaagtcctgaaaagcctgggattcctggagagcggctctggctccggcggtggcaccctgaagtacgtggaggatgtgacaaacgtggtcagacgggatgtggagaagtggggccccttcgatctggtgtacggcagcacccaacccctgggcagctcttgtgaccggtgccctggctggtacatgtttcagttccaccggatcctgcagtacgccctgccgagacaggagtcccagcggccattcttttggattttcatggacaacttgctgctgaccgaggatgaccaggaaactaccactcggttcctgcagaccgaagccgtgaccctgcaggacgtgagaggccgggactaccagaacgccatgcgggtgtggtccaacatccctggactgaaaagcaagcacgcacctctgacccctaaagaagaggagtacctgcaggcccaggtgcggagcagaagcaagctggacgcccctaaggtggatctgctggtgaagaattgcctcctgcccctgagagagtacttcaagtatttcagccagaatagtctgcccctgggaggcagcggcggcggcgccctggtgacatttgaggacgtcgccgtgcggttcacccaggaggaatgggctctgctggatccttctcagaaaatcctgtaccgggacgtgatgagagagacataccggaatctgacctccgtgggcatcaactgggaatgttgggaccttgaagcctgcttcagaagcctgggaagaaacctgagagtgcaggtggtgaagagaaagtgcgagctgaccaacagcggcccctgcgccgagggcggcccaagcagcggcgcccctcctcccagcggcggcagcccagccggctccccaacctctaccgaggagggcacctctgagtccgccacccccgagagcggccctggcacctccaccgagcccagcgagggcagcgcacccggcagccctgccggcagccccacctccacagaggagggaaccagcaccgagcccagcgaaggcagcgccccaggcaccagcaccgagcctagtgagcaggagattaaacggatcaacaagatcagaagaagacttgtgaaagacagcaacaccaagaaggccggcaagacaggccccatgaaaaccctgctggttagagtgatgacacccgatctgagagagcggctggaaaacctgagaaagaagcctgaaaatatcccccagcccatcagcaatacatctagagccaacctgaataagctgctgaccgattacaccgaaatgaagaaggcgatcctgcatgtgtactgggaagagttccagaaggaccctgtgggcctgatgagccgggtggcccagcctgccagcaagaagatcgatcagaacaagctgaaacctgagatggacgagaagggcaacctgaccaccgccggctttgcctgctctcagtgtggccagcccctgttcgtgtacaagctggagcaggtgtctgagaagggcaaggcttacaccaactacttcggacggtgcaatgtggccgagcacgaaaagctgatcctgctggcccagctgaagcccgagaaggatagcgacgaagccgtgacatatagcctgggaaagtttgggcagagggccctggatttctacagcattcatgtgaccaaggagtccacccaccccgtgaagcccctggcccagatcgccggaaacagatacgcctccggacctgtgggaaaggccctgagcgacgcatgtatgggcacaatcgcctccttcctgtctaagtaccaggacatcatcatcgaacaccagaaggtggtgaagggcaaccagaagagactggagagcctgcgggagctggccggcaaggaaaacctggaataccctagcgtgaccctgccacctcagcctcacaccaaggagggcgttgatgcctacaacgaagtgatcgcccgggtgcgaatgtgggtgaacctgaacctgtggcagaagctgaagctaagcagagatgatgccaagcctctgctgagactgaagggattcccttcctttcctctggtcgagagacaggccaacgaagtggactggtgggacatggtgtgtaacgtgaagaagctgatcaacgagaaaaaggaggatggcaaggtgttttggcagaatctggctggctacaagagacaggaagccctgagaccatacctgagcagcgaggaagatcggaagaagggaaagaaattcgctcggtaccagctgggcgacctgctgctgcacctggaaaagaagcacggcgaggactggggaaaggtgtacgacgaggcctgggagcggattgacaagaaagtggaaggcctgagcaagcacatcaagctggaagaggaacggagaagcgaggacgcccagagcaaggccgccctgaccgactggctgcgggctaaggccagcttcgtgatcgagggcctgaaggaggccgacaaggacgagttctgcagatgcgagctgaagctgcagaagtggtacggggacctgcggggaaagcccttcgccatcgaagccgagaacagcatcctggacatcagcggcttcagcaagcagtacaactgtgccttcatctggcagaaggacggcgtgaagaagctgaacctgtacctgatcatcaactacttcaagggcggcaagctgcggttcaagaagatcaaacctgaagccttcgaagccaacagattctacaccgtgatcaacaaaaagagcggcgagatcgtgcccatggaggtgaacttcaacttcgacgaccccaacctgatcatcctgcctctggcctttggcaagagacagggcagagaattcatctggaacgacctgctgtccctggaaaccggcagcctgaagctggccaacggaagagtgatcgagaagacactgtacaacagaagaacccggcaggatgagcctgccctgttcgtggccctgaccttcgagcggcgggaggtcctggactcctccaatatcaaaccaatgaacctgatcggcgtggcaagaggcgaaaacatccccgccgtgatcgccctgaccgaccccgagggctgcccactgagccggtttaaggatagcctgggaaacccaacccacatcctgagaatcggcgagagctataaggagaagcagcggaccatccaggccaagaaggaggtggagcagcggagagccggcggctacagccggaagtacgccagcaaagccaagaatctggcagacgatatggtgagaaacaccgctagagatctgctgtactacgccgtgacccaggatgccatgctgatcttcgccaacctgagccggggcttcggccggcagggcaagcggaccttcatggccgagagacagtacacacggatggaggactggctgaccgccaagctggcctacgagggcctgagcaagacctacctgtccaagacactggcccagtacacctccaagacatgcagcaactgtgggtttaccatcaccagcgccgactacgacagggtgctggagaagctgaagaagacagcaacaggctggatgaccacaattaacggcaaggagctgaaggtggagggccagattacctactacaacagatacaagagacagaacgtagtcaaggacctgtccgtcgagctggatagactgagcgaagaatctgtgaacaacgacatctcctcctggacaaagggcagaagcggagaagctctgagcctcctgaagaaaagattctcccatagacccgtgcaggagaagttcgtgtgcctgaactgcggcttcgagacacacgcagccgagcaagccgccctgaacatcgccagatcctggctgttcctgcggagccaggagtacaagaaataccagacaaacaagacaaccggcaacaccgataagagagccttcgtcgagacctggcagtccttttaccggaagaagcttaaggaggtgtggaaacctgccgtgcggtctggcggatctggcggaggctccccccagggccacctgaccttcatggacgtggccatcgagttcagccaggaggagtggaagtgcctggaccccggccagagggccctgtacagggacgtgatgctggagaactacaggaacctggtgagcctgggcatctgcctgcccgacctgagcatcatcagcatgctgaagcagaggagggagcccctgaccctgcagagcgaggtgaagatcgtgaagaaccccgacggcagggagtgcggcggcccaagcagcggcgcccctcctcccagcggcggcagcccagccggctccccaacctctaccgaggagggcacctctgagtccgccacccccgagagcggccctggcacctccaccgagcccagcgagggcagcgcacccggcagccctgccggcagccccacctccacagaggagggaaccagcaccgagcccagcgaaggcagcgccccaggcaccagcaccgagcctagtgagcaggagattaaacggatcaacaagatcagaagaagacttgtgaaagacagcaacaccaagaaggccggcaagacaggccccatgaaaaccctgctggttagagtgatgacacccgatctgagagagcggctggaaaacctgagaaagaagcctgaaaatatcccccagcccatcagcaatacatctagagccaacctgaataagctgctgaccgattacaccgaaatgaagaaggcgatcctgcatgtgtactgggaagagttccagaaggaccctgtgggcctgatgagccgggtggcccagcctgccagcaagaagatcgatcagaacaagctgaaacctgagatggacgagaagggcaacctgaccaccgccggctttgcctgctctcagtgtggccagcccctgttcgtgtacaagctggagcaggtgtctgagaagggcaaggcttacaccaactacttcggacggtgcaatgtggccgagcacgaaaagctgatcctgctggcccagctgaagcccgagaaggatagcgacgaagccgtgacatatagcctgggaaagtttgggcagagggccctggatttctacagcattcatgtgaccaaggagtccacccaccccgtgaagcccctggcccagatcgccggaaacagatacgcctccggacctgtgggaaaggccctgagcgacgcatgtatgggcacaatcgcctccttcctgtctaagtaccaggacatcatcatcgaacaccagaaggtggtgaagggcaaccagaagagactggagagcctgcgggagctggccggcaaggaaaacctggaataccctagcgtgaccctgccacctcagcctcacaccaaggagggcgttgatgcctacaacgaagtgatcgcccgggtgcgaatgtgggtgaacctgaacctgtggcagaagctgaagctaagcagagatgatgccaagcctctgctgagactgaagggattcccttcctttcctctggtcgagagacaggccaacgaagtggactggtgggacatggtgtgtaacgtgaagaagctgatcaacgagaaaaaggaggatggcaaggtgttttggcagaatctggctggctacaagagacaggaagccctgagaccatacctgagcagcgaggaagatcggaagaagggaaagaaattcgctcggtaccagctgggcgacctgctgctgcacctggaaaagaagcacggcgaggactggggaaaggtgtacgacgaggcctgggagcggattgacaagaaagtggaaggcctgagcaagcacatcaagctggaagaggaacggagaagcgaggacgcccagagcaaggccgccctgaccgactggctgcgggctaaggccagcttcgtgatcgagggcctgaaggaggccgacaaggacgagttctgcagatgcgagctgaagctgcagaagtggtacggggacctgcggggaaagcccttcgccatcgaagccgagaacagcatcctggacatcagcggcttcagcaagcagtacaactgtgccttcatctggcagaaggacggcgtgaagaagctgaacctgtacctgatcatcaactacttcaagggcggcaagctgcggttcaagaagatcaaacctgaagccttcgaagccaacagattctacaccgtgatcaacaaaaagagcggcgagatcgtgcccatggaggtgaacttcaacttcgacgaccccaacctgatcatcctgcctctggcctttggcaagagacagggcagagaattcatctggaacgacctgctgtccctggaaaccggcagcctgaagctggccaacggaagagtgatcgagaagacactgtacaacagaagaacccggcaggatgagcctgccctgttcgtggccctgaccttcgagcggcgggaggtcctggactcctccaatatcaaaccaatgaacctgatcggcgtggcaagaggcgaaaacatccccgccgtgatcgccctgaccgaccccgagggctgcccactgagccggtttaaggatagcctgggaaacccaacccacatcctgagaatcggcgagagctataaggagaagcagcggaccatccaggccaagaaggaggtggagcagcggagagccggcggctacagccggaagtacgccagcaaagccaagaatctggcagacgatatggtgagaaacaccgctagagatctgctgtactacgccgtgacccaggatgccatgctgatcttcgccaacctgagccggggcttcggccggcagggcaagcggaccttcatggccgagagacagtacacacggatggaggactggctgaccgccaagctggcctacgagggcctgagcaagacctacctgtccaagacactggcccagtacacctccaagacatgcagcaactgtgggtttaccatcaccagcgccgactacgacagggtgctggagaagctgaagaagacagcaacaggctggatgaccacaattaacggcaaggagctgaaggtggagggccagattacctactacaacagatacaagagacagaacgtagtcaaggacctgtccgtcgagctggatagactgagcgaagaatctgtgaacaacgacatctcctcctggacaaagggcagaagcggagaagctctgagcctcctgaagaaaagattctcccatagacccgtgcaggagaagttcgtgtgcctgaactgcggcttcgagacacacgcagccgagcaagccgccctgaacatcgccagatcctggctgttcctgcggagccaggagtacaagaaataccagacaaacaagacaaccggcaacaccgataagagagccttcgtcgagacctggcagtccttttaccggaagaagcttaaggaggtgtggaaacctgccgtgcggtctggcggatctggcggaggctcctccccagggccacctgaccttcatggacgtggccatcgagttcagccaggaggagtggaagtgcctggaccccggccagagggccctgtacagggacgtgatgctggagaactacaggaacctggtgagcctgggcatctgcctgcccgacctgagcatcatcagcatgctgaagcagaggagggagcccctgaccctgcagagcgaggtgaagatcgtgaagaaccccgacggcagggagtgcggatctggctccggcagcggccccaagaaaaagagaaaagtctaagctgccttctgcggggcttgccttctggccatgcccttcttctctcccttgcacctgtacctcttggtctttgaataaagcctgagtaggaaggctagcaaaaaaaaaaaaaaaaaaaaaaaaaaaaaaaaaaaaaaaaaaaaaaaaaaaaaaaaaaaaaaaaaaaaaaaaaaaaaaaa

SEQ ID NO: 16075 - RNA, 9485 nt, synthetic construct
  source 1..9485: mol_type = other RNA
aggaaataagagagaaaagaagagtaagaagaaatataagagccaccatggcccctaagaagaagcgtaaagtgagccggatggaacgcctcgtctacgaggtgcggcagaagtgcagaaacatcgaggacatctgcatctcctgcggatctctgaacgtgaccctggagcacccactgttcatcggcggcatgtgccagaactgtaaaaactgttttctggagtgtgcctatcaatacgacgatgacggctaccagagctactgcaccatctgttgcggcggaagagaggtgctgatgtgtggaaataacaactgctgccggtgcttctgcgtggaatgcgtggacctgctggtgggccccggcgccgcccaggccgctattaaggaagatccttggaactgctacatgtgcggccacaagggcacatacggcctgctgagacggagagaggactggcctagcagactgcagatgttcttcgccaataaccacgaccaggagttcgacccccctaaggtgtaccctcccgtccccgccgagaagagaaagcccatccgggtcctgagcctgttcgatggcatcgccaccggtctgctggtgctgaaggacctgggcatccaggtggataggtacattgcctccgaggtgtgcgaggactccatcaccgtgggaatggtgcgtcatcagggcaagatcatgtacgtgggcgacgtgcggagcgtgacacagaagcatatccaggagtggggccctttcgacctggtgatcggcggcagcccttgcaatgacctgagcatcgtgaacccagcccggaagggcctgtacgagggaaccggcagactgttcttcgagttttacagactgctgcacgacgcccggcctaaggaaggcgacgaccggcccttcttttggctgttcgagaatgtggtggccatgggagtcagcgacaagcgggatattagccggttcctggagagcaaccccgtgatgatcgatgccaaggaagtgagcgccgcccaccgggccagatacttctggggcaatctgcctggcatgaacagacccctggccagcaccgtgaacgacaagctggagctgcaggagtgcctggagcacggccggatcgccaagttcagcaaggtgagaaccatcaccacccgaagcaacagcatcaaacaaggcaaggaccagcactttcctgtgttcatgaacgagaaggaggacatcctgtggtgtaccgagatggagagagtgttcgggttcccagtccactacacagatgtcagcaacatgtctagactggccagacagagactgctgggaagaagctggtccgtccctgtgatcagacacctgttcgcccctctgaaggagtacttcgcctgcgtgagcagcggcaacagcaacgccaacagccggggccccagcttctctagcggcctggtgccactgtccctgagagggagccacatgggccccatggagatctacaaaaccgtgagcgcctggaagcggcagcctgtgcgcgtgctgagcctgtttcggaatatcgataaagtcctgaaaagcctgggattcctggagagcggctctggctccggcggtggcaccctgaagtacgtggaggatgtgacaaacgtggtcagacgggatgtggagaagtggggccccttcgatctggtgtacggcagcacccaacccctgggcagctcttgtgaccggtgccctggctggtacatgtttcagttccaccggatcctgcagtacgccctgccgagacaggagtcccagcggccattcttttggattttcatggacaacttgctgctgaccgaggatgaccaggaaactaccactcggttcctgcagaccgaagccgtgaccctgcaggacgtgagaggccgggactaccagaacgccatgcgggtgtggtccaacatccctggactgaaaagcaagcacgcacctctgacccctaaagaagaggagtacctgcaggcccaggtgcggagcagaagcaagctggacgcccctaaggtggatctgctggtgaagaattgcctcctgcccctgagagagtacttcaagtatttcagccagaatagtctgcccctgggaggcagcggcggcggcgccctggtgacatttgaggacgtcgccgtgcggttcacccaggaggaatgggctctgctggatccttctcagaaaatcctgtaccgggacgtgatgagagagacataccggaatctgacctccgtgggcatcaactgggaatgttgggaccttgaagcctgcttcagaagcctgggaagaaacctgagagtgcaggtggtgaagagaaagtgcgagctgaccaacagcggcccctgcgccgagggcggcccaagcagcggcgcccctcctcccagcggcggcagcccagccggctccccaacctctaccgaggagggcacctctgagtccgccacccccgagagcggccctggcacctccaccgagcccagcgagggcagcgcacccggcagccctgccggcagccccacctccacagaggagggaaccagcaccgagcccagcgaaggcagcgccccaggcaccagcaccgagcctagtgagcaggagattaaacggatcaacaagatcagaagaagacttgtgaaagacagcaacaccaagaaggccggcaagacaggccccatgaaaaccctgctggttagagtgatgacacccgatctgagagagcggctggaaaacctgagaaagaagcctgaaaatatcccccagcccatcagcaatacatctagagccaacctgaataagctgctgaccgattacaccgaaatgaagaaggcgatcctgcatgtgtactgggaagagttccagaaggaccctgtgggcctgatgagccgggtggcccagcctgccagcaagaagatcgatcagaacaagctgaaacctgagatggacgagaagggcaacctgaccaccgccggctttgcctgctctcagtgtggccagcccctgttcgtgtacaagctggagcaggtgtctgagaagggcaaggcttacaccaactacttcggacggtgcaatgtggccgagcacgaaaagctgatcctgctggcccagctgaagcccgagaaggatagcgacgaagccgtgacatatagcctgggaaagtttgggcagagggccctggatttctacagcattcatgtgaccaaggagtccacccaccccgtgaagcccctggcccagatcgccggaaacagatacgcctccggacctgtgggaaaggccctgagcgacgcatgtatgggcacaatcgcctccttcctgtctaagtaccaggacatcatcatcgaacaccagaaggtggtgaagggcaaccagaagagactggagagcctgcgggagctggccggcaaggaaaacctggaataccctagcgtgaccctgccacctcagcctcacaccaaggagggcgttgatgcctacaacgaagtgatcgcccgggtgcgaatgtgggtgaacctgaacctgtggcagaagctgaagctaagcagagatgatgccaagcctctgctgagactgaagggattcccttcctttcctctggtcgagagacaggccaacgaagtggactggtgggacatggtgtgtaacgtgaagaagctgatcaacgagaaaaaggaggatggcaaggtgttttggcagaatctggctggctacaagagacaggaagccctgagaccatacctgagcagcgaggaagatcggaagaagggaaagaaattcgctcggtaccagctgggcgacctgctgctgcacctggaaaagaagcacggcgaggactggggaaaggtgtacgacgaggcctgggagcggattgacaagaaagtggaaggcctgagcaagcacatcaagctggaagaggaacggagaagcgaggacgcccagagcaaggccgccctgaccgactggctgcgggctaaggccagcttcgtgatcgagggcctgaaggaggccgacaaggacgagttctgcagatgcgagctgaagctgcagaagtggtacggggacctgcggggaaagcccttcgccatcgaagccgagaacagcatcctggacatcagcggcttcagcaagcagtacaactgtgccttcatctggcagaaggacggcgtgaagaagctgaacctgtacctgatcatcaactacttcaagggcggcaagctgcggttcaagaagatcaaacctgaagccttcgaagccaacagattctacaccgtgatcaacaaaaagagcggcgagatcgtgcccatggaggtgaacttcaacttcgacgaccccaacctgatcatcctgcctctggcctttggcaagagacagggcagagaattcatctggaacgacctgctgtccctggaaaccggcagcctgaagctggccaacggaagagtgatcgagaagacactgtacaacagaagaacccggcaggatgagcctgccctgttcgtggccctgaccttcgagcggcgggaggtcctggactcctccaatatcaaaccaatgaacctgatcggcgtggcaagaggcgaaaacatccccgccgtgatcgccctgaccgaccccgagggctgcccactgagccggtttaaggatagcctgggaaacccaacccacatcctgagaatcggcgagagctataaggagaagcagcggaccatccaggccaagaaggaggtggagcagcggagagccggcggctacagccggaagtacgccagcaaagccaagaatctggcagacgatatggtgagaaacaccgctagagatctgctgtactacgccgtgacccaggatgccatgctgatcttcgccaacctgagccggggcttcggccggcagggcaagcggaccttcatggccgagagacagtacacacggatggaggactggctgaccgccaagctggcctacgagggcctgagcaagacctacctgtccaagacactggcccagtacacctccaagacatgcagcaactgtgggtttaccatcaccagcgccgactacgacagggtgctggagaagctgaagaagacagcaacaggctggatgaccacaattaacggcaaggagctgaaggtggagggccagattacctactacaacagatacaagagacagaacgtagtcaaggacctgtccgtcgagctggatagactgagcgaagaatctgtgaacaacgacatctcctcctggacaaagggcagaagcggagaagctctgagcctcctgaagaaaagattctcccatagacccgtgcaggagaagttcgtgtgcctgaactgcggcttcgagacacacgcagccgagcaagccgccctgaacatcgccagatcctggctgttcctgcggagccaggagtacaagaaataccagacaaacaagacaaccggcaacaccgataagagagccttcgtcgagacctggcagtccttttaccggaagaagcttaaggaggtgtggaaacctgccgtgcggtctggcggatctggcggaggctccagcaaggcccccatcaccttcggcgacctggccatctacttcagccaggaggagtgggagtggctgagccccatccagaaggacctgtacgaggacgtgatgctggagaactacaggaacctggtgagcctgggcctgagcttcaggaggcccaacgtgatcaccctgctggagaagggcaaggccccctggatggtggagcccgtgaggaggaggagggcccccgacagcggcagcaagtgcggcggcccaagcagcggcgcccctcctcccagcggcggcagcccagccggctccccaacctctaccgaggagggcacctctgagtccgccacccccgagagcggccctggcacctccaccgagcccagcgagggcagcgcacccggcagccctgccggcagccccacctccacagaggagggaaccagcaccgagcccagcgaaggcagcgccccaggcaccagcaccgagcctagtgagcaggagattaaacggatcaacaagatcagaagaagacttgtgaaagacagcaacaccaagaaggccggcaagacaggccccatgaaaaccctgctggttagagtgatgacacccgatctgagagagcggctggaaaacctgagaaagaagcctgaaaatatcccccagcccatcagcaatacatctagagccaacctgaataagctgctgaccgattacaccgaaatgaagaaggcgatcctgcatgtgtactgggaagagttccagaaggaccctgtgggcctgatgagccgggtggcccagcctgccagcaagaagatcgatcagaacaagctgaaacctgagatggacgagaagggcaacctgaccaccgccggctttgcctgctctcagtgtggccagcccctgttcgtgtacaagctggagcaggtgtctgagaagggcaaggcttacaccaactacttcggacggtgcaatgtggccgagcacgaaaagctgatcctgctggcccagctgaagcccgagaaggatagcgacgaagccgtgacatatagcctgggaaagtttgggcagagggccctggatttctacagcattcatgtgaccaaggagtccacccaccccgtgaagcccctggcccagatcgccggaaacagatacgcctccggacctgtgggaaaggccctgagcgacgcatgtatgggcacaatcgcctccttcctgtctaagtaccaggacatcatcatcgaacaccagaaggtggtgaagggcaaccagaagagactggagagcctgcgggagctggccggcaaggaaaacctggaataccctagcgtgaccctgccacctcagcctcacaccaaggagggcgttgatgcctacaacgaagtgatcgcccgggtgcgaatgtgggtgaacctgaacctgtggcagaagctgaagctaagcagagatgatgccaagcctctgctgagactgaagggattcccttcctttcctctggtcgagagacaggccaacgaagtggactggtgggacatggtgtgtaacgtgaagaagctgatcaacgagaaaaaggaggatggcaaggtgttttggcagaatctggctggctacaagagacaggaagccctgagaccatacctgagcagcgaggaagatcggaagaagggaaagaaattcgctcggtaccagctgggcgacctgctgctgcacctggaaaagaagcacggcgaggactggggaaaggtgtacgacgaggcctgggagcggattgacaagaaagtggaaggcctgagcaagcacatcaagctggaagaggaacggagaagcgaggacgcccagagcaaggccgccctgaccgactggctgcgggctaaggccagcttcgtgatcgagggcctgaaggaggccgacaaggacgagttctgcagatgcgagctgaagctgcagaagtggtacggggacctgcggggaaagcccttcgccatcgaagccgagaacagcatcctggacatcagcggcttcagcaagcagtacaactgtgccttcatctggcagaaggacggcgtgaagaagctgaacctgtacctgatcatcaactacttcaagggcggcaagctgcggttcaagaagatcaaacctgaagccttcgaagccaacagattctacaccgtgatcaacaaaaagagcggcgagatcgtgcccatggaggtgaacttcaacttcgacgaccccaacctgatcatcctgcctctggcctttggcaagagacagggcagagaattcatctggaacgacctgctgtccctggaaaccggcagcctgaagctggccaacggaagagtgatcgagaagacactgtacaacagaagaacccggcaggatgagcctgccctgttcgtggccctgaccttcgagcggcgggaggtcctggactcctccaatatcaaaccaatgaacctgatcggcgtggcaagaggcgaaaacatccccgccgtgatcgccctgaccgaccccgagggctgcccactgagccggtttaaggatagcctgggaaacccaacccacatcctgagaatcggcgagagctataaggagaagcagcggaccatccaggccaagaaggaggtggagcagcggagagccggcggctacagccggaagtacgccagcaaagccaagaatctggcagacgatatggtgagaaacaccgctagagatctgctgtactacgccgtgacccaggatgccatgctgatcttcgccaacctgagccggggcttcggccggcagggcaagcggaccttcatggccgagagacagtacacacggatggaggactggctgaccgccaagctggcctacgagggcctgagcaagacctacctgtccaagacactggcccagtacacctccaagacatgcagcaactgtgggtttaccatcaccagcgccgactacgacagggtgctggagaagctgaagaagacagcaacaggctggatgaccacaattaacggcaaggagctgaaggtggagggccagattacctactacaacagatacaagagacagaacgtagtcaaggacctgtccgtcgagctggatagactgagcgaagaatctgtgaacaacgacatctcctcctggacaaagggcagaagcggagaagctctgagcctcctgaagaaaagattctcccatagacccgtgcaggagaagttcgtgtgcctgaactgcggcttcgagacacacgcagccgagcaagccgccctgaacatcgccagatcctggctgttcctgcggagccaggagtacaagaaataccagacaaacaagacaaccggcaacaccgataagagagccttcgtcgagacctggcagtccttttaccggaagaagcttaaggaggtgtggaaacctgccgtgcggtctggcggatctggcggaggctcctagcaaggcccccatcaccttcggcgacctggccatctacttcagccaggaggagtgggagtggctgagccccatccagaaggacctgtacgaggacgtgatgctggagaactacaggaacctggtgagcctgggcctgagcttcaggaggcccaacgtgatcaccctgctggagaagggcaaggccccctggatggtggagcccgtgaggaggaggagggcccccgacagcggcagcaagtgcggatctggctccggcagcggccccaagaaaaagagaaaagtctaagctgccttctgcggggcttgccttctggccatgcccttcttctctcccttgcacctgtacctcttggtctttgaataaagcctgagtaggaaggctagcaaaaaaaaaaaaaaaaaaaaaaaaaaaaaaaaaaaaaaaaaaaaaaaaaaaaaaaaaaaaaaaaaaaaaaaaaaaaaaaa

SEQ ID NO: 16076 - RNA, 9485 nt, synthetic construct
  source 1..9485: mol_type = other RNA
aggaaataagagagaaaagaagagtaagaagaaatataagagccaccatggcccctaagaagaagcgtaaagtgagccggatggaacgcctcgtctacgaggtgcggcagaagtgcagaaacatcgaggacatctgcatctcctgcggatctctgaacgtgaccctggagcacccactgttcatcggcggcatgtgccagaactgtaaaaactgttttctggagtgtgcctatcaatacgacgatgacggctaccagagctactgcaccatctgttgcggcggaagagaggtgctgatgtgtggaaataacaactgctgccggtgcttctgcgtggaatgcgtggacctgctggtgggccccggcgccgcccaggccgctattaaggaagatccttggaactgctacatgtgcggccacaagggcacatacggcctgctgagacggagagaggactggcctagcagactgcagatgttcttcgccaataaccacgaccaggagttcgacccccctaaggtgtaccctcccgtccccgccgagaagagaaagcccatccgggtcctgagcctgttcgatggcatcgccaccggtctgctggtgctgaaggacctgggcatccaggtggataggtacattgcctccgaggtgtgcgaggactccatcaccgtgggaatggtgcgtcatcagggcaagatcatgtacgtgggcgacgtgcggagcgtgacacagaagcatatccaggagtggggccctttcgacctggtgatcggcggcagcccttgcaatgacctgagcatcgtgaacccagcccggaagggcctgtacgagggaaccggcagactgttcttcgagttttacagactgctgcacgacgcccggcctaaggaaggcgacgaccggcccttcttttggctgttcgagaatgtggtggccatgggagtcagcgacaagcgggatattagccggttcctggagagcaaccccgtgatgatcgatgccaaggaagtgagcgccgcccaccgggccagatacttctggggcaatctgcctggcatgaacagacccctggccagcaccgtgaacgacaagctggagctgcaggagtgcctggagcacggccggatcgccaagttcagcaaggtgagaaccatcaccacccgaagcaacagcatcaaacaaggcaaggaccagcactttcctgtgttcatgaacgagaaggaggacatcctgtggtgtaccgagatggagagagtgttcgggttcccagtccactacacagatgtcagcaacatgtctagactggccagacagagactgctgggaagaagctggtccgtccctgtgatcagacacctgttcgcccctctgaaggagtacttcgcctgcgtgagcagcggcaacagcaacgccaacagccggggccccagcttctctagcggcctggtgccactgtccctgagagggagccacatgggccccatggagatctacaaaaccgtgagcgcctggaagcggcagcctgtgcgcgtgctgagcctgtttcggaatatcgataaagtcctgaaaagcctgggattcctggagagcggctctggctccggcggtggcaccctgaagtacgtggaggatgtgacaaacgtggtcagacgggatgtggagaagtggggccccttcgatctggtgtacggcagcacccaacccctgggcagctcttgtgaccggtgccctggctggtacatgtttcagttccaccggatcctgcagtacgccctgccgagacaggagtcccagcggccattcttttggattttcatggacaacttgctgctgaccgaggatgaccaggaaactaccactcggttcctgcagaccgaagccgtgaccctgcaggacgtgagaggccgggactaccagaacgccatgcgggtgtggtccaacatccctggactgaaaagcaagcacgcacctctgacccctaaagaagaggagtacctgcaggcccaggtgcggagcagaagcaagctggacgcccctaaggtggatctgctggtgaagaattgcctcctgcccctgagagagtacttcaagtatttcagccagaatagtctgcccctgggaggcagcggcggcggcgccctggtgacatttgaggacgtcgccgtgcggttcacccaggaggaatgggctctgctggatccttctcagaaaatcctgtaccgggacgtgatgagagagacataccggaatctgacctccgtgggcatcaactgggaatgttgggaccttgaagcctgcttcagaagcctgggaagaaacctgagagtgcaggtggtgaagagaaagtgcgagctgaccaacagcggcccctgcgccgagggcggcccaagcagcggcgcccctcctcccagcggcggcagcccagccggctccccaacctctaccgaggagggcacctctgagtccgccacccccgagagcggccctggcacctccaccgagcccagcgagggcagcgcacccggcagccctgccggcagccccacctccacagaggagggaaccagcaccgagcccagcgaaggcagcgccccaggcaccagcaccgagcctagtgagcaggagattaaacggatcaacaagatcagaagaagacttgtgaaagacagcaacaccaagaaggccggcaagacaggccccatgaaaaccctgctggttagagtgatgacacccgatctgagagagcggctggaaaacctgagaaagaagcctgaaaatatcccccagcccatcagcaatacatctagagccaacctgaataagctgctgaccgattacaccgaaatgaagaaggcgatcctgcatgtgtactgggaagagttccagaaggaccctgtgggcctgatgagccgggtggcccagcctgccagcaagaagatcgatcagaacaagctgaaacctgagatggacgagaagggcaacctgaccaccgccggctttgcctgctctcagtgtggccagcccctgttcgtgtacaagctggagcaggtgtctgagaagggcaaggcttacaccaactacttcggacggtgcaatgtggccgagcacgaaaagctgatcctgctggcccagctgaagcccgagaaggatagcgacgaagccgtgacatatagcctgggaaagtttgggcagagggccctggatttctacagcattcatgtgaccaaggagtccacccaccccgtgaagcccctggcccagatcgccggaaacagatacgcctccggacctgtgggaaaggccctgagcgacgcatgtatgggcacaatcgcctccttcctgtctaagtaccaggacatcatcatcgaacaccagaaggtggtgaagggcaaccagaagagactggagagcctgcgggagctggccggcaaggaaaacctggaataccctagcgtgaccctgccacctcagcctcacaccaaggagggcgttgatgcctacaacgaagtgatcgcccgggtgcgaatgtgggtgaacctgaacctgtggcagaagctgaagctaagcagagatgatgccaagcctctgctgagactgaagggattcccttcctttcctctggtcgagagacaggccaacgaagtggactggtgggacatggtgtgtaacgtgaagaagctgatcaacgagaaaaaggaggatggcaaggtgttttggcagaatctggctggctacaagagacaggaagccctgagaccatacctgagcagcgaggaagatcggaagaagggaaagaaattcgctcggtaccagctgggcgacctgctgctgcacctggaaaagaagcacggcgaggactggggaaaggtgtacgacgaggcctgggagcggattgacaagaaagtggaaggcctgagcaagcacatcaagctggaagaggaacggagaagcgaggacgcccagagcaaggccgccctgaccgactggctgcgggctaaggccagcttcgtgatcgagggcctgaaggaggccgacaaggacgagttctgcagatgcgagctgaagctgcagaagtggtacggggacctgcggggaaagcccttcgccatcgaagccgagaacagcatcctggacatcagcggcttcagcaagcagtacaactgtgccttcatctggcagaaggacggcgtgaagaagctgaacctgtacctgatcatcaactacttcaagggcggcaagctgcggttcaagaagatcaaacctgaagccttcgaagccaacagattctacaccgtgatcaacaaaaagagcggcgagatcgtgcccatggaggtgaacttcaacttcgacgaccccaacctgatcatcctgcctctggcctttggcaagagacagggcagagaattcatctggaacgacctgctgtccctggaaaccggcagcctgaagctggccaacggaagagtgatcgagaagacactgtacaacagaagaacccggcaggatgagcctgccctgttcgtggccctgaccttcgagcggcgggaggtcctggactcctccaatatcaaaccaatgaacctgatcggcgtggcaagaggcgaaaacatccccgccgtgatcgccctgaccgaccccgagggctgcccactgagccggtttaaggatagcctgggaaacccaacccacatcctgagaatcggcgagagctataaggagaagcagcggaccatccaggccaagaaggaggtggagcagcggagagccggcggctacagccggaagtacgccagcaaagccaagaatctggcagacgatatggtgagaaacaccgctagagatctgctgtactacgccgtgacccaggatgccatgctgatcttcgccaacctgagccggggcttcggccggcagggcaagcggaccttcatggccgagagacagtacacacggatggaggactggctgaccgccaagctggcctacgagggcctgagcaagacctacctgtccaagacactggcccagtacacctccaagacatgcagcaactgtgggtttaccatcaccagcgccgactacgacagggtgctggagaagctgaagaagacagcaacaggctggatgaccacaattaacggcaaggagctgaaggtggagggccagattacctactacaacagatacaagagacagaacgtagtcaaggacctgtccgtcgagctggatagactgagcgaagaatctgtgaacaacgacatctcctcctggacaaagggcagaagcggagaagctctgagcctcctgaagaaaagattctcccatagacccgtgcaggagaagttcgtgtgcctgaactgcggcttcgagacacacgcagccgagcaagccgccctgaacatcgccagatcctggctgttcctgcggagccaggagtacaagaaataccagacaaacaagacaaccggcaacaccgataagagagccttcgtcgagacctggcagtccttttaccggaagaagcttaaggaggtgtggaaacctgccgtgcggtctggcggatctggcggaggctccagcaaggccagcgtgaccttcggcgacctggccatctacttcagcagggaggagtgggagtggctgagccccatccagaaggacctgtacgaggacgtgatgctggagaactaccagaccctggtgagcctgggcctggtgtgcaggaggcccaacatcatcaccctgctggagaagggcaaggccccctggatggtggagcccagcaggaggaggaggggccccgagagcggcagcaagaggggcggcccaagcagcggcgcccctcctcccagcggcggcagcccagccggctccccaacctctaccgaggagggcacctctgagtccgccacccccgagagcggccctggcacctccaccgagcccagcgagggcagcgcacccggcagccctgccggcagccccacctccacagaggagggaaccagcaccgagcccagcgaaggcagcgccccaggcaccagcaccgagcctagtgagcaggagattaaacggatcaacaagatcagaagaagacttgtgaaagacagcaacaccaagaaggccggcaagacaggccccatgaaaaccctgctggttagagtgatgacacccgatctgagagagcggctggaaaacctgagaaagaagcctgaaaatatcccccagcccatcagcaatacatctagagccaacctgaataagctgctgaccgattacaccgaaatgaagaaggcgatcctgcatgtgtactgggaagagttccagaaggaccctgtgggcctgatgagccgggtggcccagcctgccagcaagaagatcgatcagaacaagctgaaacctgagatggacgagaagggcaacctgaccaccgccggctttgcctgctctcagtgtggccagcccctgttcgtgtacaagctggagcaggtgtctgagaagggcaaggcttacaccaactacttcggacggtgcaatgtggccgagcacgaaaagctgatcctgctggcccagctgaagcccgagaaggatagcgacgaagccgtgacatatagcctgggaaagtttgggcagagggccctggatttctacagcattcatgtgaccaaggagtccacccaccccgtgaagcccctggcccagatcgccggaaacagatacgcctccggacctgtgggaaaggccctgagcgacgcatgtatgggcacaatcgcctccttcctgtctaagtaccaggacatcatcatcgaacaccagaaggtggtgaagggcaaccagaagagactggagagcctgcgggagctggccggcaaggaaaacctggaataccctagcgtgaccctgccacctcagcctcacaccaaggagggcgttgatgcctacaacgaagtgatcgcccgggtgcgaatgtgggtgaacctgaacctgtggcagaagctgaagctaagcagagatgatgccaagcctctgctgagactgaagggattcccttcctttcctctggtcgagagacaggccaacgaagtggactggtgggacatggtgtgtaacgtgaagaagctgatcaacgagaaaaaggaggatggcaaggtgttttggcagaatctggctggctacaagagacaggaagccctgagaccatacctgagcagcgaggaagatcggaagaagggaaagaaattcgctcggtaccagctgggcgacctgctgctgcacctggaaaagaagcacggcgaggactggggaaaggtgtacgacgaggcctgggagcggattgacaagaaagtggaaggcctgagcaagcacatcaagctggaagaggaacggagaagcgaggacgcccagagcaaggccgccctgaccgactggctgcgggctaaggccagcttcgtgatcgagggcctgaaggaggccgacaaggacgagttctgcagatgcgagctgaagctgcagaagtggtacggggacctgcggggaaagcccttcgccatcgaagccgagaacagcatcctggacatcagcggcttcagcaagcagtacaactgtgccttcatctggcagaaggacggcgtgaagaagctgaacctgtacctgatcatcaactacttcaagggcggcaagctgcggttcaagaagatcaaacctgaagccttcgaagccaacagattctacaccgtgatcaacaaaaagagcggcgagatcgtgcccatggaggtgaacttcaacttcgacgaccccaacctgatcatcctgcctctggcctttggcaagagacagggcagagaattcatctggaacgacctgctgtccctggaaaccggcagcctgaagctggccaacggaagagtgatcgagaagacactgtacaacagaagaacccggcaggatgagcctgccctgttcgtggccctgaccttcgagcggcgggaggtcctggactcctccaatatcaaaccaatgaacctgatcggcgtggcaagaggcgaaaacatccccgccgtgatcgccctgaccgaccccgagggctgcccactgagccggtttaaggatagcctgggaaacccaacccacatcctgagaatcggcgagagctataaggagaagcagcggaccatccaggccaagaaggaggtggagcagcggagagccggcggctacagccggaagtacgccagcaaagccaagaatctggcagacgatatggtgagaaacaccgctagagatctgctgtactacgccgtgacccaggatgccatgctgatcttcgccaacctgagccggggcttcggccggcagggcaagcggaccttcatggccgagagacagtacacacggatggaggactggctgaccgccaagctggcctacgagggcctgagcaagacctacctgtccaagacactggcccagtacacctccaagacatgcagcaactgtgggtttaccatcaccagcgccgactacgacagggtgctggagaagctgaagaagacagcaacaggctggatgaccacaattaacggcaaggagctgaaggtggagggccagattacctactacaacagatacaagagacagaacgtagtcaaggacctgtccgtcgagctggatagactgagcgaagaatctgtgaacaacgacatctcctcctggacaaagggcagaagcggagaagctctgagcctcctgaagaaaagattctcccatagacccgtgcaggagaagttcgtgtgcctgaactgcggcttcgagacacacgcagccgagcaagccgccctgaacatcgccagatcctggctgttcctgcggagccaggagtacaagaaataccagacaaacaagacaaccggcaacaccgataagagagccttcgtcgagacctggcagtccttttaccggaagaagcttaaggaggtgtggaaacctgccgtgcggtctggcggatctggcggaggctcctagcaaggccagcgtgaccttcggcgacctggccatctacttcagcagggaggagtgggagtggctgagccccatccagaaggacctgtacgaggacgtgatgctggagaactaccagaccctggtgagcctgggcctggtgtgcaggaggcccaacatcatcaccctgctggagaagggcaaggccccctggatggtggagcccagcaggaggaggaggggccccgagagcggcagcaagaggggatctggctccggcagcggccccaagaaaaagagaaaagtctaagctgccttctgcggggcttgccttctggccatgcccttcttctctcccttgcacctgtacctcttggtctttgaataaagcctgagtaggaaggctagcaaaaaaaaaaaaaaaaaaaaaaaaaaaaaaaaaaaaaaaaaaaaaaaaaaaaaaaaaaaaaaaaaaaaaaaaaaaaaaaa

SEQ ID NO: 16077 - RNA, 9485 nt, synthetic construct
  source 1..9485: mol_type = other RNA
aggaaataagagagaaaagaagagtaagaagaaatataagagccaccatggcccctaagaagaagcgtaaagtgagccggatggaacgcctcgtctacgaggtgcggcagaagtgcagaaacatcgaggacatctgcatctcctgcggatctctgaacgtgaccctggagcacccactgttcatcggcggcatgtgccagaactgtaaaaactgttttctggagtgtgcctatcaatacgacgatgacggctaccagagctactgcaccatctgttgcggcggaagagaggtgctgatgtgtggaaataacaactgctgccggtgcttctgcgtggaatgcgtggacctgctggtgggccccggcgccgcccaggccgctattaaggaagatccttggaactgctacatgtgcggccacaagggcacatacggcctgctgagacggagagaggactggcctagcagactgcagatgttcttcgccaataaccacgaccaggagttcgacccccctaaggtgtaccctcccgtccccgccgagaagagaaagcccatccgggtcctgagcctgttcgatggcatcgccaccggtctgctggtgctgaaggacctgggcatccaggtggataggtacattgcctccgaggtgtgcgaggactccatcaccgtgggaatggtgcgtcatcagggcaagatcatgtacgtgggcgacgtgcggagcgtgacacagaagcatatccaggagtggggccctttcgacctggtgatcggcggcagcccttgcaatgacctgagcatcgtgaacccagcccggaagggcctgtacgagggaaccggcagactgttcttcgagttttacagactgctgcacgacgcccggcctaaggaaggcgacgaccggcccttcttttggctgttcgagaatgtggtggccatgggagtcagcgacaagcgggatattagccggttcctggagagcaaccccgtgatgatcgatgccaaggaagtgagcgccgcccaccgggccagatacttctggggcaatctgcctggcatgaacagacccctggccagcaccgtgaacgacaagctggagctgcaggagtgcctggagcacggccggatcgccaagttcagcaaggtgagaaccatcaccacccgaagcaacagcatcaaacaaggcaaggaccagcactttcctgtgttcatgaacgagaaggaggacatcctgtggtgtaccgagatggagagagtgttcgggttcccagtccactacacagatgtcagcaacatgtctagactggccagacagagactgctgggaagaagctggtccgtccctgtgatcagacacctgttcgcccctctgaaggagtacttcgcctgcgtgagcagcggcaacagcaacgccaacagccggggccccagcttctctagcggcctggtgccactgtccctgagagggagccacatgggccccatggagatctacaaaaccgtgagcgcctggaagcggcagcctgtgcgcgtgctgagcctgtttcggaatatcgataaagtcctgaaaagcctgggattcctggagagcggctctggctccggcggtggcaccctgaagtacgtggaggatgtgacaaacgtggtcagacgggatgtggagaagtggggccccttcgatctggtgtacggcagcacccaacccctgggcagctcttgtgaccggtgccctggctggtacatgtttcagttccaccggatcctgcagtacgccctgccgagacaggagtcccagcggccattcttttggattttcatggacaacttgctgctgaccgaggatgaccaggaaactaccactcggttcctgcagaccgaagccgtgaccctgcaggacgtgagaggccgggactaccagaacgccatgcgggtgtggtccaacatccctggactgaaaagcaagcacgcacctctgacccctaaagaagaggagtacctgcaggcccaggtgcggagcagaagcaagctggacgcccctaaggtggatctgctggtgaagaattgcctcctgcccctgagagagtacttcaagtatttcagccagaatagtctgcccctgggaggcagcggcggcggcgccctggtgacatttgaggacgtcgccgtgcggttcacccaggaggaatgggctctgctggatccttctcagaaaatcctgtaccgggacgtgatgagagagacataccggaatctgacctccgtgggcatcaactgggaatgttgggaccttgaagcctgcttcagaagcctgggaagaaacctgagagtgcaggtggtgaagagaaagtgcgagctgaccaacagcggcccctgcgccgagggcggcccaagcagcggcgcccctcctcccagcggcggcagcccagccggctccccaacctctaccgaggagggcacctctgagtccgccacccccgagagcggccctggcacctccaccgagcccagcgagggcagcgcacccggcagccctgccggcagccccacctccacagaggagggaaccagcaccgagcccagcgaaggcagcgccccaggcaccagcaccgagcctagtgagcaggagattaaacggatcaacaagatcagaagaagacttgtgaaagacagcaacaccaagaaggccggcaagacaggccccatgaaaaccctgctggttagagtgatgacacccgatctgagagagcggctggaaaacctgagaaagaagcctgaaaatatcccccagcccatcagcaatacatctagagccaacctgaataagctgctgaccgattacaccgaaatgaagaaggcgatcctgcatgtgtactgggaagagttccagaaggaccctgtgggcctgatgagccgggtggcccagcctgccagcaagaagatcgatcagaacaagctgaaacctgagatggacgagaagggcaacctgaccaccgccggctttgcctgctctcagtgtggccagcccctgttcgtgtacaagctggagcaggtgtctgagaagggcaaggcttacaccaactacttcggacggtgcaatgtggccgagcacgaaaagctgatcctgctggcccagctgaagcccgagaaggatagcgacgaagccgtgacatatagcctgggaaagtttgggcagagggccctggatttctacagcattcatgtgaccaaggagtccacccaccccgtgaagcccctggcccagatcgccggaaacagatacgcctccggacctgtgggaaaggccctgagcgacgcatgtatgggcacaatcgcctccttcctgtctaagtaccaggacatcatcatcgaacaccagaaggtggtgaagggcaaccagaagagactggagagcctgcgggagctggccggcaaggaaaacctggaataccctagcgtgaccctgccacctcagcctcacaccaaggagggcgttgatgcctacaacgaagtgatcgcccgggtgcgaatgtgggtgaacctgaacctgtggcagaagctgaagctaagcagagatgatgccaagcctctgctgagactgaagggattcccttcctttcctctggtcgagagacaggccaacgaagtggactggtgggacatggtgtgtaacgtgaagaagctgatcaacgagaaaaaggaggatggcaaggtgttttggcagaatctggctggctacaagagacaggaagccctgagaccatacctgagcagcgaggaagatcggaagaagggaaagaaattcgctcggtaccagctgggcgacctgctgctgcacctggaaaagaagcacggcgaggactggggaaaggtgtacgacgaggcctgggagcggattgacaagaaagtggaaggcctgagcaagcacatcaagctggaagaggaacggagaagcgaggacgcccagagcaaggccgccctgaccgactggctgcgggctaaggccagcttcgtgatcgagggcctgaaggaggccgacaaggacgagttctgcagatgcgagctgaagctgcagaagtggtacggggacctgcggggaaagcccttcgccatcgaagccgagaacagcatcctggacatcagcggcttcagcaagcagtacaactgtgccttcatctggcagaaggacggcgtgaagaagctgaacctgtacctgatcatcaactacttcaagggcggcaagctgcggttcaagaagatcaaacctgaagccttcgaagccaacagattctacaccgtgatcaacaaaaagagcggcgagatcgtgcccatggaggtgaacttcaacttcgacgaccccaacctgatcatcctgcctctggcctttggcaagagacagggcagagaattcatctggaacgacctgctgtccctggaaaccggcagcctgaagctggccaacggaagagtgatcgagaagacactgtacaacagaagaacccggcaggatgagcctgccctgttcgtggccctgaccttcgagcggcgggaggtcctggactcctccaatatcaaaccaatgaacctgatcggcgtggcaagaggcgaaaacatccccgccgtgatcgccctgaccgaccccgagggctgcccactgagccggtttaaggatagcctgggaaacccaacccacatcctgagaatcggcgagagctataaggagaagcagcggaccatccaggccaagaaggaggtggagcagcggagagccggcggctacagccggaagtacgccagcaaagccaagaatctggcagacgatatggtgagaaacaccgctagagatctgctgtactacgccgtgacccaggatgccatgctgatcttcgccaacctgagccggggcttcggccggcagggcaagcggaccttcatggccgagagacagtacacacggatggaggactggctgaccgccaagctggcctacgagggcctgagcaagacctacctgtccaagacactggcccagtacacctccaagacatgcagcaactgtgggtttaccatcaccagcgccgactacgacagggtgctggagaagctgaagaagacagcaacaggctggatgaccacaattaacggcaaggagctgaaggtggagggccagattacctactacaacagatacaagagacagaacgtagtcaaggacctgtccgtcgagctggatagactgagcgaagaatctgtgaacaacgacatctcctcctggacaaagggcagaagcggagaagctctgagcctcctgaagaaaagattctcccatagacccgtgcaggagaagttcgtgtgcctgaactgcggcttcgagacacacgcagccgagcaagccgccctgaacatcgccagatcctggctgttcctgcggagccaggagtacaagaaataccagacaaacaagacaaccggcaacaccgataagagagccttcgtcgagacctggcagtccttttaccggaagaagcttaaggaggtgtggaaacctgccgtgcggtctggcggatctggcggaggctccacccaggagagcctgaccctggaggacgtggccgtggagttcagctgggaggagtggcagctgctggacaccgcccagaaggacctgtacagggacgtgatggtggagaactacaaccacctggtgagcctgggctaccagaccagcaagcccgacgccctgagcaagctggcccacggccaggagccctggatgaccgacgccaagatccagaacaagaactgccccggcatcaggaaggtgggcggcccaagcagcggcgcccctcctcccagcggcggcagcccagccggctccccaacctctaccgaggagggcacctctgagtccgccacccccgagagcggccctggcacctccaccgagcccagcgagggcagcgcacccggcagccctgccggcagccccacctccacagaggagggaaccagcaccgagcccagcgaaggcagcgccccaggcaccagcaccgagcctagtgagcaggagattaaacggatcaacaagatcagaagaagacttgtgaaagacagcaacaccaagaaggccggcaagacaggccccatgaaaaccctgctggttagagtgatgacacccgatctgagagagcggctggaaaacctgagaaagaagcctgaaaatatcccccagcccatcagcaatacatctagagccaacctgaataagctgctgaccgattacaccgaaatgaagaaggcgatcctgcatgtgtactgggaagagttccagaaggaccctgtgggcctgatgagccgggtggcccagcctgccagcaagaagatcgatcagaacaagctgaaacctgagatggacgagaagggcaacctgaccaccgccggctttgcctgctctcagtgtggccagcccctgttcgtgtacaagctggagcaggtgtctgagaagggcaaggcttacaccaactacttcggacggtgcaatgtggccgagcacgaaaagctgatcctgctggcccagctgaagcccgagaaggatagcgacgaagccgtgacatatagcctgggaaagtttgggcagagggccctggatttctacagcattcatgtgaccaaggagtccacccaccccgtgaagcccctggcccagatcgccggaaacagatacgcctccggacctgtgggaaaggccctgagcgacgcatgtatgggcacaatcgcctccttcctgtctaagtaccaggacatcatcatcgaacaccagaaggtggtgaagggcaaccagaagagactggagagcctgcgggagctggccggcaaggaaaacctggaataccctagcgtgaccctgccacctcagcctcacaccaaggagggcgttgatgcctacaacgaagtgatcgcccgggtgcgaatgtgggtgaacctgaacctgtggcagaagctgaagctaagcagagatgatgccaagcctctgctgagactgaagggattcccttcctttcctctggtcgagagacaggccaacgaagtggactggtgggacatggtgtgtaacgtgaagaagctgatcaacgagaaaaaggaggatggcaaggtgttttggcagaatctggctggctacaagagacaggaagccctgagaccatacctgagcagcgaggaagatcggaagaagggaaagaaattcgctcggtaccagctgggcgacctgctgctgcacctggaaaagaagcacggcgaggactggggaaaggtgtacgacgaggcctgggagcggattgacaagaaagtggaaggcctgagcaagcacatcaagctggaagaggaacggagaagcgaggacgcccagagcaaggccgccctgaccgactggctgcgggctaaggccagcttcgtgatcgagggcctgaaggaggccgacaaggacgagttctgcagatgcgagctgaagctgcagaagtggtacggggacctgcggggaaagcccttcgccatcgaagccgagaacagcatcctggacatcagcggcttcagcaagcagtacaactgtgccttcatctggcagaaggacggcgtgaagaagctgaacctgtacctgatcatcaactacttcaagggcggcaagctgcggttcaagaagatcaaacctgaagccttcgaagccaacagattctacaccgtgatcaacaaaaagagcggcgagatcgtgcccatggaggtgaacttcaacttcgacgaccccaacctgatcatcctgcctctggcctttggcaagagacagggcagagaattcatctggaacgacctgctgtccctggaaaccggcagcctgaagctggccaacggaagagtgatcgagaagacactgtacaacagaagaacccggcaggatgagcctgccctgttcgtggccctgaccttcgagcggcgggaggtcctggactcctccaatatcaaaccaatgaacctgatcggcgtggcaagaggcgaaaacatccccgccgtgatcgccctgaccgaccccgagggctgcccactgagccggtttaaggatagcctgggaaacccaacccacatcctgagaatcggcgagagctataaggagaagcagcggaccatccaggccaagaaggaggtggagcagcggagagccggcggctacagccggaagtacgccagcaaagccaagaatctggcagacgatatggtgagaaacaccgctagagatctgctgtactacgccgtgacccaggatgccatgctgatcttcgccaacctgagccggggcttcggccggcagggcaagcggaccttcatggccgagagacagtacacacggatggaggactggctgaccgccaagctggcctacgagggcctgagcaagacctacctgtccaagacactggcccagtacacctccaagacatgcagcaactgtgggtttaccatcaccagcgccgactacgacagggtgctggagaagctgaagaagacagcaacaggctggatgaccacaattaacggcaaggagctgaaggtggagggccagattacctactacaacagatacaagagacagaacgtagtcaaggacctgtccgtcgagctggatagactgagcgaagaatctgtgaacaacgacatctcctcctggacaaagggcagaagcggagaagctctgagcctcctgaagaaaagattctcccatagacccgtgcaggagaagttcgtgtgcctgaactgcggcttcgagacacacgcagccgagcaagccgccctgaacatcgccagatcctggctgttcctgcggagccaggagtacaagaaataccagacaaacaagacaaccggcaacaccgataagagagccttcgtcgagacctggcagtccttttaccggaagaagcttaaggaggtgtggaaacctgccgtgcggtctggcggatctggcggaggctcctacccaggagagcctgaccctggaggacgtggccgtggagttcagctgggaggagtggcagctgctggacaccgcccagaaggacctgtacagggacgtgatggtggagaactacaaccacctggtgagcctgggctaccagaccagcaagcccgacgccctgagcaagctggcccacggccaggagccctggatgaccgacgccaagatccagaacaagaactgccccggcatcaggaaggtgggatctggctccggcagcggccccaagaaaaagagaaaagtctaagctgccttctgcggggcttgccttctggccatgcccttcttctctcccttgcacctgtacctcttggtctttgaataaagcctgagtaggaaggctagcaaaaaaaaaaaaaaaaaaaaaaaaaaaaaaaaaaaaaaaaaaaaaaaaaaaaaaaaaaaaaaaaaaaaaaaaaaaaaaaa

SEQ ID NO: 16078 - RNA, 9485 nt, synthetic construct
  source 1..9485: mol_type = other RNA
aggaaataagagagaaaagaagagtaagaagaaatataagagccaccatggcccctaagaagaagcgtaaagtgagccggatggaacgcctcgtctacgaggtgcggcagaagtgcagaaacatcgaggacatctgcatctcctgcggatctctgaacgtgaccctggagcacccactgttcatcggcggcatgtgccagaactgtaaaaactgttttctggagtgtgcctatcaatacgacgatgacggctaccagagctactgcaccatctgttgcggcggaagagaggtgctgatgtgtggaaataacaactgctgccggtgcttctgcgtggaatgcgtggacctgctggtgggccccggcgccgcccaggccgctattaaggaagatccttggaactgctacatgtgcggccacaagggcacatacggcctgctgagacggagagaggactggcctagcagactgcagatgttcttcgccaataaccacgaccaggagttcgacccccctaaggtgtaccctcccgtccccgccgagaagagaaagcccatccgggtcctgagcctgttcgatggcatcgccaccggtctgctggtgctgaaggacctgggcatccaggtggataggtacattgcctccgaggtgtgcgaggactccatcaccgtgggaatggtgcgtcatcagggcaagatcatgtacgtgggcgacgtgcggagcgtgacacagaagcatatccaggagtggggccctttcgacctggtgatcggcggcagcccttgcaatgacctgagcatcgtgaacccagcccggaagggcctgtacgagggaaccggcagactgttcttcgagttttacagactgctgcacgacgcccggcctaaggaaggcgacgaccggcccttcttttggctgttcgagaatgtggtggccatgggagtcagcgacaagcgggatattagccggttcctggagagcaaccccgtgatgatcgatgccaaggaagtgagcgccgcccaccgggccagatacttctggggcaatctgcctggcatgaacagacccctggccagcaccgtgaacgacaagctggagctgcaggagtgcctggagcacggccggatcgccaagttcagcaaggtgagaaccatcaccacccgaagcaacagcatcaaacaaggcaaggaccagcactttcctgtgttcatgaacgagaaggaggacatcctgtggtgtaccgagatggagagagtgttcgggttcccagtccactacacagatgtcagcaacatgtctagactggccagacagagactgctgggaagaagctggtccgtccctgtgatcagacacctgttcgcccctctgaaggagtacttcgcctgcgtgagcagcggcaacagcaacgccaacagccggggccccagcttctctagcggcctggtgccactgtccctgagagggagccacatgggccccatggagatctacaaaaccgtgagcgcctggaagcggcagcctgtgcgcgtgctgagcctgtttcggaatatcgataaagtcctgaaaagcctgggattcctggagagcggctctggctccggcggtggcaccctgaagtacgtggaggatgtgacaaacgtggtcagacgggatgtggagaagtggggccccttcgatctggtgtacggcagcacccaacccctgggcagctcttgtgaccggtgccctggctggtacatgtttcagttccaccggatcctgcagtacgccctgccgagacaggagtcccagcggccattcttttggattttcatggacaacttgctgctgaccgaggatgaccaggaaactaccactcggttcctgcagaccgaagccgtgaccctgcaggacgtgagaggccgggactaccagaacgccatgcgggtgtggtccaacatccctggactgaaaagcaagcacgcacctctgacccctaaagaagaggagtacctgcaggcccaggtgcggagcagaagcaagctggacgcccctaaggtggatctgctggtgaagaattgcctcctgcccctgagagagtacttcaagtatttcagccagaatagtctgcccctgggaggcagcggcggcggcgccctggtgacatttgaggacgtcgccgtgcggttcacccaggaggaatgggctctgctggatccttctcagaaaatcctgtaccgggacgtgatgagagagacataccggaatctgacctccgtgggcatcaactgggaatgttgggaccttgaagcctgcttcagaagcctgggaagaaacctgagagtgcaggtggtgaagagaaagtgcgagctgaccaacagcggcccctgcgccgagggcggcccaagcagcggcgcccctcctcccagcggcggcagcccagccggctccccaacctctaccgaggagggcacctctgagtccgccacccccgagagcggccctggcacctccaccgagcccagcgagggcagcgcacccggcagccctgccggcagccccacctccacagaggagggaaccagcaccgagcccagcgaaggcagcgccccaggcaccagcaccgagcctagtgagcaggagattaaacggatcaacaagatcagaagaagacttgtgaaagacagcaacaccaagaaggccggcaagacaggccccatgaaaaccctgctggttagagtgatgacacccgatctgagagagcggctggaaaacctgagaaagaagcctgaaaatatcccccagcccatcagcaatacatctagagccaacctgaataagctgctgaccgattacaccgaaatgaagaaggcgatcctgcatgtgtactgggaagagttccagaaggaccctgtgggcctgatgagccgggtggcccagcctgccagcaagaagatcgatcagaacaagctgaaacctgagatggacgagaagggcaacctgaccaccgccggctttgcctgctctcagtgtggccagcccctgttcgtgtacaagctggagcaggtgtctgagaagggcaaggcttacaccaactacttcggacggtgcaatgtggccgagcacgaaaagctgatcctgctggcccagctgaagcccgagaaggatagcgacgaagccgtgacatatagcctgggaaagtttgggcagagggccctggatttctacagcattcatgtgaccaaggagtccacccaccccgtgaagcccctggcccagatcgccggaaacagatacgcctccggacctgtgggaaaggccctgagcgacgcatgtatgggcacaatcgcctccttcctgtctaagtaccaggacatcatcatcgaacaccagaaggtggtgaagggcaaccagaagagactggagagcctgcgggagctggccggcaaggaaaacctggaataccctagcgtgaccctgccacctcagcctcacaccaaggagggcgttgatgcctacaacgaagtgatcgcccgggtgcgaatgtgggtgaacctgaacctgtggcagaagctgaagctaagcagagatgatgccaagcctctgctgagactgaagggattcccttcctttcctctggtcgagagacaggccaacgaagtggactggtgggacatggtgtgtaacgtgaagaagctgatcaacgagaaaaaggaggatggcaaggtgttttggcagaatctggctggctacaagagacaggaagccctgagaccatacctgagcagcgaggaagatcggaagaagggaaagaaattcgctcggtaccagctgggcgacctgctgctgcacctggaaaagaagcacggcgaggactggggaaaggtgtacgacgaggcctgggagcggattgacaagaaagtggaaggcctgagcaagcacatcaagctggaagaggaacggagaagcgaggacgcccagagcaaggccgccctgaccgactggctgcgggctaaggccagcttcgtgatcgagggcctgaaggaggccgacaaggacgagttctgcagatgcgagctgaagctgcagaagtggtacggggacctgcggggaaagcccttcgccatcgaagccgagaacagcatcctggacatcagcggcttcagcaagcagtacaactgtgccttcatctggcagaaggacggcgtgaagaagctgaacctgtacctgatcatcaactacttcaagggcggcaagctgcggttcaagaagatcaaacctgaagccttcgaagccaacagattctacaccgtgatcaacaaaaagagcggcgagatcgtgcccatggaggtgaacttcaacttcgacgaccccaacctgatcatcctgcctctggcctttggcaagagacagggcagagaattcatctggaacgacctgctgtccctggaaaccggcagcctgaagctggccaacggaagagtgatcgagaagacactgtacaacagaagaacccggcaggatgagcctgccctgttcgtggccctgaccttcgagcggcgggaggtcctggactcctccaatatcaaaccaatgaacctgatcggcgtggcaagaggcgaaaacatccccgccgtgatcgccctgaccgaccccgagggctgcccactgagccggtttaaggatagcctgggaaacccaacccacatcctgagaatcggcgagagctataaggagaagcagcggaccatccaggccaagaaggaggtggagcagcggagagccggcggctacagccggaagtacgccagcaaagccaagaatctggcagacgatatggtgagaaacaccgctagagatctgctgtactacgccgtgacccaggatgccatgctgatcttcgccaacctgagccggggcttcggccggcagggcaagcggaccttcatggccgagagacagtacacacggatggaggactggctgaccgccaagctggcctacgagggcctgagcaagacctacctgtccaagacactggcccagtacacctccaagacatgcagcaactgtgggtttaccatcaccagcgccgactacgacagggtgctggagaagctgaagaagacagcaacaggctggatgaccacaattaacggcaaggagctgaaggtggagggccagattacctactacaacagatacaagagacagaacgtagtcaaggacctgtccgtcgagctggatagactgagcgaagaatctgtgaacaacgacatctcctcctggacaaagggcagaagcggagaagctctgagcctcctgaagaaaagattctcccatagacccgtgcaggagaagttcgtgtgcctgaactgcggcttcgagacacacgcagccgagcaagccgccctgaacatcgccagatcctggctgttcctgcggagccaggagtacaagaaataccagacaaacaagacaaccggcaacaccgataagagagccttcgtcgagacctggcagtccttttaccggaagaagcttaaggaggtgtggaaacctgccgtgcggtctggcggatctggcggaggctccagccagggccccgtgaagttcgaggacgtggccatctacctgtggaaggaggagtgggagctgatggacagcacccagaagaggctgtacaggcaggtgatgctggagacctacgagaacgtgctgagcgtgggcaccccccacgacaagcccgccatgatcgtgcacctggagcagggcgagaccgcctggagccccgccctgcagaggcccggcaaggagaagggcaggctgcacggccacggcggcccaagcagcggcgcccctcctcccagcggcggcagcccagccggctccccaacctctaccgaggagggcacctctgagtccgccacccccgagagcggccctggcacctccaccgagcccagcgagggcagcgcacccggcagccctgccggcagccccacctccacagaggagggaaccagcaccgagcccagcgaaggcagcgccccaggcaccagcaccgagcctagtgagcaggagattaaacggatcaacaagatcagaagaagacttgtgaaagacagcaacaccaagaaggccggcaagacaggccccatgaaaaccctgctggttagagtgatgacacccgatctgagagagcggctggaaaacctgagaaagaagcctgaaaatatcccccagcccatcagcaatacatctagagccaacctgaataagctgctgaccgattacaccgaaatgaagaaggcgatcctgcatgtgtactgggaagagttccagaaggaccctgtgggcctgatgagccgggtggcccagcctgccagcaagaagatcgatcagaacaagctgaaacctgagatggacgagaagggcaacctgaccaccgccggctttgcctgctctcagtgtggccagcccctgttcgtgtacaagctggagcaggtgtctgagaagggcaaggcttacaccaactacttcggacggtgcaatgtggccgagcacgaaaagctgatcctgctggcccagctgaagcccgagaaggatagcgacgaagccgtgacatatagcctgggaaagtttgggcagagggccctggatttctacagcattcatgtgaccaaggagtccacccaccccgtgaagcccctggcccagatcgccggaaacagatacgcctccggacctgtgggaaaggccctgagcgacgcatgtatgggcacaatcgcctccttcctgtctaagtaccaggacatcatcatcgaacaccagaaggtggtgaagggcaaccagaagagactggagagcctgcgggagctggccggcaaggaaaacctggaataccctagcgtgaccctgccacctcagcctcacaccaaggagggcgttgatgcctacaacgaagtgatcgcccgggtgcgaatgtgggtgaacctgaacctgtggcagaagctgaagctaagcagagatgatgccaagcctctgctgagactgaagggattcccttcctttcctctggtcgagagacaggccaacgaagtggactggtgggacatggtgtgtaacgtgaagaagctgatcaacgagaaaaaggaggatggcaaggtgttttggcagaatctggctggctacaagagacaggaagccctgagaccatacctgagcagcgaggaagatcggaagaagggaaagaaattcgctcggtaccagctgggcgacctgctgctgcacctggaaaagaagcacggcgaggactggggaaaggtgtacgacgaggcctgggagcggattgacaagaaagtggaaggcctgagcaagcacatcaagctggaagaggaacggagaagcgaggacgcccagagcaaggccgccctgaccgactggctgcgggctaaggccagcttcgtgatcgagggcctgaaggaggccgacaaggacgagttctgcagatgcgagctgaagctgcagaagtggtacggggacctgcggggaaagcccttcgccatcgaagccgagaacagcatcctggacatcagcggcttcagcaagcagtacaactgtgccttcatctggcagaaggacggcgtgaagaagctgaacctgtacctgatcatcaactacttcaagggcggcaagctgcggttcaagaagatcaaacctgaagccttcgaagccaacagattctacaccgtgatcaacaaaaagagcggcgagatcgtgcccatggaggtgaacttcaacttcgacgaccccaacctgatcatcctgcctctggcctttggcaagagacagggcagagaattcatctggaacgacctgctgtccctggaaaccggcagcctgaagctggccaacggaagagtgatcgagaagacactgtacaacagaagaacccggcaggatgagcctgccctgttcgtggccctgaccttcgagcggcgggaggtcctggactcctccaatatcaaaccaatgaacctgatcggcgtggcaagaggcgaaaacatccccgccgtgatcgccctgaccgaccccgagggctgcccactgagccggtttaaggatagcctgggaaacccaacccacatcctgagaatcggcgagagctataaggagaagcagcggaccatccaggccaagaaggaggtggagcagcggagagccggcggctacagccggaagtacgccagcaaagccaagaatctggcagacgatatggtgagaaacaccgctagagatctgctgtactacgccgtgacccaggatgccatgctgatcttcgccaacctgagccggggcttcggccggcagggcaagcggaccttcatggccgagagacagtacacacggatggaggactggctgaccgccaagctggcctacgagggcctgagcaagacctacctgtccaagacactggcccagtacacctccaagacatgcagcaactgtgggtttaccatcaccagcgccgactacgacagggtgctggagaagctgaagaagacagcaacaggctggatgaccacaattaacggcaaggagctgaaggtggagggccagattacctactacaacagatacaagagacagaacgtagtcaaggacctgtccgtcgagctggatagactgagcgaagaatctgtgaacaacgacatctcctcctggacaaagggcagaagcggagaagctctgagcctcctgaagaaaagattctcccatagacccgtgcaggagaagttcgtgtgcctgaactgcggcttcgagacacacgcagccgagcaagccgccctgaacatcgccagatcctggctgttcctgcggagccaggagtacaagaaataccagacaaacaagacaaccggcaacaccgataagagagccttcgtcgagacctggcagtccttttaccggaagaagcttaaggaggtgtggaaacctgccgtgcggtctggcggatctggcggaggctcctagccagggccccgtgaagttcgaggacgtggccatctacctgtggaaggaggagtgggagctgatggacagcacccagaagaggctgtacaggcaggtgatgctggagacctacgagaacgtgctgagcgtgggcaccccccacgacaagcccgccatgatcgtgcacctggagcagggcgagaccgcctggagccccgccctgcagaggcccggcaaggagaagggcaggctgcacggccacggatctggctccggcagcggccccaagaaaaagagaaaagtctaagctgccttctgcggggcttgccttctggccatgcccttcttctctcccttgcacctgtacctcttggtctttgaataaagcctgagtaggaaggctagcaaaaaaaaaaaaaaaaaaaaaaaaaaaaaaaaaaaaaaaaaaaaaaaaaaaaaaaaaaaaaaaaaaaaaaaaaaaaaaaa

SEQ ID NO: 16079 - RNA, 9485 nt, synthetic construct
  source 1..9485: mol_type = other RNA
aggaaataagagagaaaagaagagtaagaagaaatataagagccaccatggcccctaagaagaagcgtaaagtgagccggatggaacgcctcgtctacgaggtgcggcagaagtgcagaaacatcgaggacatctgcatctcctgcggatctctgaacgtgaccctggagcacccactgttcatcggcggcatgtgccagaactgtaaaaactgttttctggagtgtgcctatcaatacgacgatgacggctaccagagctactgcaccatctgttgcggcggaagagaggtgctgatgtgtggaaataacaactgctgccggtgcttctgcgtggaatgcgtggacctgctggtgggccccggcgccgcccaggccgctattaaggaagatccttggaactgctacatgtgcggccacaagggcacatacggcctgctgagacggagagaggactggcctagcagactgcagatgttcttcgccaataaccacgaccaggagttcgacccccctaaggtgtaccctcccgtccccgccgagaagagaaagcccatccgggtcctgagcctgttcgatggcatcgccaccggtctgctggtgctgaaggacctgggcatccaggtggataggtacattgcctccgaggtgtgcgaggactccatcaccgtgggaatggtgcgtcatcagggcaagatcatgtacgtgggcgacgtgcggagcgtgacacagaagcatatccaggagtggggccctttcgacctggtgatcggcggcagcccttgcaatgacctgagcatcgtgaacccagcccggaagggcctgtacgagggaaccggcagactgttcttcgagttttacagactgctgcacgacgcccggcctaaggaaggcgacgaccggcccttcttttggctgttcgagaatgtggtggccatgggagtcagcgacaagcgggatattagccggttcctggagagcaaccccgtgatgatcgatgccaaggaagtgagcgccgcccaccgggccagatacttctggggcaatctgcctggcatgaacagacccctggccagcaccgtgaacgacaagctggagctgcaggagtgcctggagcacggccggatcgccaagttcagcaaggtgagaaccatcaccacccgaagcaacagcatcaaacaaggcaaggaccagcactttcctgtgttcatgaacgagaaggaggacatcctgtggtgtaccgagatggagagagtgttcgggttcccagtccactacacagatgtcagcaacatgtctagactggccagacagagactgctgggaagaagctggtccgtccctgtgatcagacacctgttcgcccctctgaaggagtacttcgcctgcgtgagcagcggcaacagcaacgccaacagccggggccccagcttctctagcggcctggtgccactgtccctgagagggagccacatgggccccatggagatctacaaaaccgtgagcgcctggaagcggcagcctgtgcgcgtgctgagcctgtttcggaatatcgataaagtcctgaaaagcctgggattcctggagagcggctctggctccggcggtggcaccctgaagtacgtggaggatgtgacaaacgtggtcagacgggatgtggagaagtggggccccttcgatctggtgtacggcagcacccaacccctgggcagctcttgtgaccggtgccctggctggtacatgtttcagttccaccggatcctgcagtacgccctgccgagacaggagtcccagcggccattcttttggattttcatggacaacttgctgctgaccgaggatgaccaggaaactaccactcggttcctgcagaccgaagccgtgaccctgcaggacgtgagaggccgggactaccagaacgccatgcgggtgtggtccaacatccctggactgaaaagcaagcacgcacctctgacccctaaagaagaggagtacctgcaggcccaggtgcggagcagaagcaagctggacgcccctaaggtggatctgctggtgaagaattgcctcctgcccctgagagagtacttcaagtatttcagccagaatagtctgcccctgggaggcagcggcggcggcgccctggtgacatttgaggacgtcgccgtgcggttcacccaggaggaatgggctctgctggatccttctcagaaaatcctgtaccgggacgtgatgagagagacataccggaatctgacctccgtgggcatcaactgggaatgttgggaccttgaagcctgcttcagaagcctgggaagaaacctgagagtgcaggtggtgaagagaaagtgcgagctgaccaacagcggcccctgcgccgagggcggcccaagcagcggcgcccctcctcccagcggcggcagcccagccggctccccaacctctaccgaggagggcacctctgagtccgccacccccgagagcggccctggcacctccaccgagcccagcgagggcagcgcacccggcagccctgccggcagccccacctccacagaggagggaaccagcaccgagcccagcgaaggcagcgccccaggcaccagcaccgagcctagtgagcaggagattaaacggatcaacaagatcagaagaagacttgtgaaagacagcaacaccaagaaggccggcaagacaggccccatgaaaaccctgctggttagagtgatgacacccgatctgagagagcggctggaaaacctgagaaagaagcctgaaaatatcccccagcccatcagcaatacatctagagccaacctgaataagctgctgaccgattacaccgaaatgaagaaggcgatcctgcatgtgtactgggaagagttccagaaggaccctgtgggcctgatgagccgggtggcccagcctgccagcaagaagatcgatcagaacaagctgaaacctgagatggacgagaagggcaacctgaccaccgccggctttgcctgctctcagtgtggccagcccctgttcgtgtacaagctggagcaggtgtctgagaagggcaaggcttacaccaactacttcggacggtgcaatgtggccgagcacgaaaagctgatcctgctggcccagctgaagcccgagaaggatagcgacgaagccgtgacatatagcctgggaaagtttgggcagagggccctggatttctacagcattcatgtgaccaaggagtccacccaccccgtgaagcccctggcccagatcgccggaaacagatacgcctccggacctgtgggaaaggccctgagcgacgcatgtatgggcacaatcgcctccttcctgtctaagtaccaggacatcatcatcgaacaccagaaggtggtgaagggcaaccagaagagactggagagcctgcgggagctggccggcaaggaaaacctggaataccctagcgtgaccctgccacctcagcctcacaccaaggagggcgttgatgcctacaacgaagtgatcgcccgggtgcgaatgtgggtgaacctgaacctgtggcagaagctgaagctaagcagagatgatgccaagcctctgctgagactgaagggattcccttcctttcctctggtcgagagacaggccaacgaagtggactggtgggacatggtgtgtaacgtgaagaagctgatcaacgagaaaaaggaggatggcaaggtgttttggcagaatctggctggctacaagagacaggaagccctgagaccatacctgagcagcgaggaagatcggaagaagggaaagaaattcgctcggtaccagctgggcgacctgctgctgcacctggaaaagaagcacggcgaggactggggaaaggtgtacgacgaggcctgggagcggattgacaagaaagtggaaggcctgagcaagcacatcaagctggaagaggaacggagaagcgaggacgcccagagcaaggccgccctgaccgactggctgcgggctaaggccagcttcgtgatcgagggcctgaaggaggccgacaaggacgagttctgcagatgcgagctgaagctgcagaagtggtacggggacctgcggggaaagcccttcgccatcgaagccgagaacagcatcctggacatcagcggcttcagcaagcagtacaactgtgccttcatctggcagaaggacggcgtgaagaagctgaacctgtacctgatcatcaactacttcaagggcggcaagctgcggttcaagaagatcaaacctgaagccttcgaagccaacagattctacaccgtgatcaacaaaaagagcggcgagatcgtgcccatggaggtgaacttcaacttcgacgaccccaacctgatcatcctgcctctggcctttggcaagagacagggcagagaattcatctggaacgacctgctgtccctggaaaccggcagcctgaagctggccaacggaagagtgatcgagaagacactgtacaacagaagaacccggcaggatgagcctgccctgttcgtggccctgaccttcgagcggcgggaggtcctggactcctccaatatcaaaccaatgaacctgatcggcgtggcaagaggcgaaaacatccccgccgtgatcgccctgaccgaccccgagggctgcccactgagccggtttaaggatagcctgggaaacccaacccacatcctgagaatcggcgagagctataaggagaagcagcggaccatccaggccaagaaggaggtggagcagcggagagccggcggctacagccggaagtacgccagcaaagccaagaatctggcagacgatatggtgagaaacaccgctagagatctgctgtactacgccgtgacccaggatgccatgctgatcttcgccaacctgagccggggcttcggccggcagggcaagcggaccttcatggccgagagacagtacacacggatggaggactggctgaccgccaagctggcctacgagggcctgagcaagacctacctgtccaagacactggcccagtacacctccaagacatgcagcaactgtgggtttaccatcaccagcgccgactacgacagggtgctggagaagctgaagaagacagcaacaggctggatgaccacaattaacggcaaggagctgaaggtggagggccagattacctactacaacagatacaagagacagaacgtagtcaaggacctgtccgtcgagctggatagactgagcgaagaatctgtgaacaacgacatctcctcctggacaaagggcagaagcggagaagctctgagcctcctgaagaaaagattctcccatagacccgtgcaggagaagttcgtgtgcctgaactgcggcttcgagacacacgcagccgagcaagccgccctgaacatcgccagatcctggctgttcctgcggagccaggagtacaagaaataccagacaaacaagacaaccggcaacaccgataagagagccttcgtcgagacctggcagtccttttaccggaagaagcttaaggaggtgtggaaacctgccgtgcggtctggcggatctggcggaggctccatgctgagccccgtgaccttcgaggacgtggccgtgtacttcaccgagggccagggcgccctgctggaccccaaccagagggccctgtacagggaggtgatgatggagaactacgagaacatggccagcctgggcttcctgttcatcaagcccgccctgatcagccagctggagcagggcgaggagctgtgggcccccgagagccagggcctggacgccgccgagatcagcgacaccagcgacggcggcccaagcagcggcgcccctcctcccagcggcggcagcccagccggctccccaacctctaccgaggagggcacctctgagtccgccacccccgagagcggccctggcacctccaccgagcccagcgagggcagcgcacccggcagccctgccggcagccccacctccacagaggagggaaccagcaccgagcccagcgaaggcagcgccccaggcaccagcaccgagcctagtgagcaggagattaaacggatcaacaagatcagaagaagacttgtgaaagacagcaacaccaagaaggccggcaagacaggccccatgaaaaccctgctggttagagtgatgacacccgatctgagagagcggctggaaaacctgagaaagaagcctgaaaatatcccccagcccatcagcaatacatctagagccaacctgaataagctgctgaccgattacaccgaaatgaagaaggcgatcctgcatgtgtactgggaagagttccagaaggaccctgtgggcctgatgagccgggtggcccagcctgccagcaagaagatcgatcagaacaagctgaaacctgagatggacgagaagggcaacctgaccaccgccggctttgcctgctctcagtgtggccagcccctgttcgtgtacaagctggagcaggtgtctgagaagggcaaggcttacaccaactacttcggacggtgcaatgtggccgagcacgaaaagctgatcctgctggcccagctgaagcccgagaaggatagcgacgaagccgtgacatatagcctgggaaagtttgggcagagggccctggatttctacagcattcatgtgaccaaggagtccacccaccccgtgaagcccctggcccagatcgccggaaacagatacgcctccggacctgtgggaaaggccctgagcgacgcatgtatgggcacaatcgcctccttcctgtctaagtaccaggacatcatcatcgaacaccagaaggtggtgaagggcaaccagaagagactggagagcctgcgggagctggccggcaaggaaaacctggaataccctagcgtgaccctgccacctcagcctcacaccaaggagggcgttgatgcctacaacgaagtgatcgcccgggtgcgaatgtgggtgaacctgaacctgtggcagaagctgaagctaagcagagatgatgccaagcctctgctgagactgaagggattcccttcctttcctctggtcgagagacaggccaacgaagtggactggtgggacatggtgtgtaacgtgaagaagctgatcaacgagaaaaaggaggatggcaaggtgttttggcagaatctggctggctacaagagacaggaagccctgagaccatacctgagcagcgaggaagatcggaagaagggaaagaaattcgctcggtaccagctgggcgacctgctgctgcacctggaaaagaagcacggcgaggactggggaaaggtgtacgacgaggcctgggagcggattgacaagaaagtggaaggcctgagcaagcacatcaagctggaagaggaacggagaagcgaggacgcccagagcaaggccgccctgaccgactggctgcgggctaaggccagcttcgtgatcgagggcctgaaggaggccgacaaggacgagttctgcagatgcgagctgaagctgcagaagtggtacggggacctgcggggaaagcccttcgccatcgaagccgagaacagcatcctggacatcagcggcttcagcaagcagtacaactgtgccttcatctggcagaaggacggcgtgaagaagctgaacctgtacctgatcatcaactacttcaagggcggcaagctgcggttcaagaagatcaaacctgaagccttcgaagccaacagattctacaccgtgatcaacaaaaagagcggcgagatcgtgcccatggaggtgaacttcaacttcgacgaccccaacctgatcatcctgcctctggcctttggcaagagacagggcagagaattcatctggaacgacctgctgtccctggaaaccggcagcctgaagctggccaacggaagagtgatcgagaagacactgtacaacagaagaacccggcaggatgagcctgccctgttcgtggccctgaccttcgagcggcgggaggtcctggactcctccaatatcaaaccaatgaacctgatcggcgtggcaagaggcgaaaacatccccgccgtgatcgccctgaccgaccccgagggctgcccactgagccggtttaaggatagcctgggaaacccaacccacatcctgagaatcggcgagagctataaggagaagcagcggaccatccaggccaagaaggaggtggagcagcggagagccggcggctacagccggaagtacgccagcaaagccaagaatctggcagacgatatggtgagaaacaccgctagagatctgctgtactacgccgtgacccaggatgccatgctgatcttcgccaacctgagccggggcttcggccggcagggcaagcggaccttcatggccgagagacagtacacacggatggaggactggctgaccgccaagctggcctacgagggcctgagcaagacctacctgtccaagacactggcccagtacacctccaagacatgcagcaactgtgggtttaccatcaccagcgccgactacgacagggtgctggagaagctgaagaagacagcaacaggctggatgaccacaattaacggcaaggagctgaaggtggagggccagattacctactacaacagatacaagagacagaacgtagtcaaggacctgtccgtcgagctggatagactgagcgaagaatctgtgaacaacgacatctcctcctggacaaagggcagaagcggagaagctctgagcctcctgaagaaaagattctcccatagacccgtgcaggagaagttcgtgtgcctgaactgcggcttcgagacacacgcagccgagcaagccgccctgaacatcgccagatcctggctgttcctgcggagccaggagtacaagaaataccagacaaacaagacaaccggcaacaccgataagagagccttcgtcgagacctggcagtccttttaccggaagaagcttaaggaggtgtggaaacctgccgtgcggtctggcggatctggcggaggctcctatgctgagccccgtgaccttcgaggacgtggccgtgtacttcaccgagggccagggcgccctgctggaccccaaccagagggccctgtacagggaggtgatgatggagaactacgagaacatggccagcctgggcttcctgttcatcaagcccgccctgatcagccagctggagcagggcgaggagctgtgggcccccgagagccagggcctggacgccgccgagatcagcgacaccagcgacggatctggctccggcagcggccccaagaaaaagagaaaagtctaagctgccttctgcggggcttgccttctggccatgcccttcttctctcccttgcacctgtacctcttggtctttgaataaagcctgagtaggaaggctagcaaaaaaaaaaaaaaaaaaaaaaaaaaaaaaaaaaaaaaaaaaaaaaaaaaaaaaaaaaaaaaaaaaaaaaaaaaaaaaaa

SEQ ID NO: 16080 - RNA, 9485 nt, synthetic construct
  source 1..9485: mol_type = other RNA
aggaaataagagagaaaagaagagtaagaagaaatataagagccaccatggcccctaagaagaagcgtaaagtgagccggatggaacgcctcgtctacgaggtgcggcagaagtgcagaaacatcgaggacatctgcatctcctgcggatctctgaacgtgaccctggagcacccactgttcatcggcggcatgtgccagaactgtaaaaactgttttctggagtgtgcctatcaatacgacgatgacggctaccagagctactgcaccatctgttgcggcggaagagaggtgctgatgtgtggaaataacaactgctgccggtgcttctgcgtggaatgcgtggacctgctggtgggccccggcgccgcccaggccgctattaaggaagatccttggaactgctacatgtgcggccacaagggcacatacggcctgctgagacggagagaggactggcctagcagactgcagatgttcttcgccaataaccacgaccaggagttcgacccccctaaggtgtaccctcccgtccccgccgagaagagaaagcccatccgggtcctgagcctgttcgatggcatcgccaccggtctgctggtgctgaaggacctgggcatccaggtggataggtacattgcctccgaggtgtgcgaggactccatcaccgtgggaatggtgcgtcatcagggcaagatcatgtacgtgggcgacgtgcggagcgtgacacagaagcatatccaggagtggggccctttcgacctggtgatcggcggcagcccttgcaatgacctgagcatcgtgaacccagcccggaagggcctgtacgagggaaccggcagactgttcttcgagttttacagactgctgcacgacgcccggcctaaggaaggcgacgaccggcccttcttttggctgttcgagaatgtggtggccatgggagtcagcgacaagcgggatattagccggttcctggagagcaaccccgtgatgatcgatgccaaggaagtgagcgccgcccaccgggccagatacttctggggcaatctgcctggcatgaacagacccctggccagcaccgtgaacgacaagctggagctgcaggagtgcctggagcacggccggatcgccaagttcagcaaggtgagaaccatcaccacccgaagcaacagcatcaaacaaggcaaggaccagcactttcctgtgttcatgaacgagaaggaggacatcctgtggtgtaccgagatggagagagtgttcgggttcccagtccactacacagatgtcagcaacatgtctagactggccagacagagactgctgggaagaagctggtccgtccctgtgatcagacacctgttcgcccctctgaaggagtacttcgcctgcgtgagcagcggcaacagcaacgccaacagccggggccccagcttctctagcggcctggtgccactgtccctgagagggagccacatgggccccatggagatctacaaaaccgtgagcgcctggaagcggcagcctgtgcgcgtgctgagcctgtttcggaatatcgataaagtcctgaaaagcctgggattcctggagagcggctctggctccggcggtggcaccctgaagtacgtggaggatgtgacaaacgtggtcagacgggatgtggagaagtggggccccttcgatctggtgtacggcagcacccaacccctgggcagctcttgtgaccggtgccctggctggtacatgtttcagttccaccggatcctgcagtacgccctgccgagacaggagtcccagcggccattcttttggattttcatggacaacttgctgctgaccgaggatgaccaggaaactaccactcggttcctgcagaccgaagccgtgaccctgcaggacgtgagaggccgggactaccagaacgccatgcgggtgtggtccaacatccctggactgaaaagcaagcacgcacctctgacccctaaagaagaggagtacctgcaggcccaggtgcggagcagaagcaagctggacgcccctaaggtggatctgctggtgaagaattgcctcctgcccctgagagagtacttcaagtatttcagccagaatagtctgcccctgggaggcagcggcggcggcgccctggtgacatttgaggacgtcgccgtgcggttcacccaggaggaatgggctctgctggatccttctcagaaaatcctgtaccgggacgtgatgagagagacataccggaatctgacctccgtgggcatcaactgggaatgttgggaccttgaagcctgcttcagaagcctgggaagaaacctgagagtgcaggtggtgaagagaaagtgcgagctgaccaacagcggcccctgcgccgagggcggcccaagcagcggcgcccctcctcccagcggcggcagcccagccggctccccaacctctaccgaggagggcacctctgagtccgccacccccgagagcggccctggcacctccaccgagcccagcgagggcagcgcacccggcagccctgccggcagccccacctccacagaggagggaaccagcaccgagcccagcgaaggcagcgccccaggcaccagcaccgagcctagtgagcaggagattaaacggatcaacaagatcagaagaagacttgtgaaagacagcaacaccaagaaggccggcaagacaggccccatgaaaaccctgctggttagagtgatgacacccgatctgagagagcggctggaaaacctgagaaagaagcctgaaaatatcccccagcccatcagcaatacatctagagccaacctgaataagctgctgaccgattacaccgaaatgaagaaggcgatcctgcatgtgtactgggaagagttccagaaggaccctgtgggcctgatgagccgggtggcccagcctgccagcaagaagatcgatcagaacaagctgaaacctgagatggacgagaagggcaacctgaccaccgccggctttgcctgctctcagtgtggccagcccctgttcgtgtacaagctggagcaggtgtctgagaagggcaaggcttacaccaactacttcggacggtgcaatgtggccgagcacgaaaagctgatcctgctggcccagctgaagcccgagaaggatagcgacgaagccgtgacatatagcctgggaaagtttgggcagagggccctggatttctacagcattcatgtgaccaaggagtccacccaccccgtgaagcccctggcccagatcgccggaaacagatacgcctccggacctgtgggaaaggccctgagcgacgcatgtatgggcacaatcgcctccttcctgtctaagtaccaggacatcatcatcgaacaccagaaggtggtgaagggcaaccagaagagactggagagcctgcgggagctggccggcaaggaaaacctggaataccctagcgtgaccctgccacctcagcctcacaccaaggagggcgttgatgcctacaacgaagtgatcgcccgggtgcgaatgtgggtgaacctgaacctgtggcagaagctgaagctaagcagagatgatgccaagcctctgctgagactgaagggattcccttcctttcctctggtcgagagacaggccaacgaagtggactggtgggacatggtgtgtaacgtgaagaagctgatcaacgagaaaaaggaggatggcaaggtgttttggcagaatctggctggctacaagagacaggaagccctgagaccatacctgagcagcgaggaagatcggaagaagggaaagaaattcgctcggtaccagctgggcgacctgctgctgcacctggaaaagaagcacggcgaggactggggaaaggtgtacgacgaggcctgggagcggattgacaagaaagtggaaggcctgagcaagcacatcaagctggaagaggaacggagaagcgaggacgcccagagcaaggccgccctgaccgactggctgcgggctaaggccagcttcgtgatcgagggcctgaaggaggccgacaaggacgagttctgcagatgcgagctgaagctgcagaagtggtacggggacctgcggggaaagcccttcgccatcgaagccgagaacagcatcctggacatcagcggcttcagcaagcagtacaactgtgccttcatctggcagaaggacggcgtgaagaagctgaacctgtacctgatcatcaactacttcaagggcggcaagctgcggttcaagaagatcaaacctgaagccttcgaagccaacagattctacaccgtgatcaacaaaaagagcggcgagatcgtgcccatggaggtgaacttcaacttcgacgaccccaacctgatcatcctgcctctggcctttggcaagagacagggcagagaattcatctggaacgacctgctgtccctggaaaccggcagcctgaagctggccaacggaagagtgatcgagaagacactgtacaacagaagaacccggcaggatgagcctgccctgttcgtggccctgaccttcgagcggcgggaggtcctggactcctccaatatcaaaccaatgaacctgatcggcgtggcaagaggcgaaaacatccccgccgtgatcgccctgaccgaccccgagggctgcccactgagccggtttaaggatagcctgggaaacccaacccacatcctgagaatcggcgagagctataaggagaagcagcggaccatccaggccaagaaggaggtggagcagcggagagccggcggctacagccggaagtacgccagcaaagccaagaatctggcagacgatatggtgagaaacaccgctagagatctgctgtactacgccgtgacccaggatgccatgctgatcttcgccaacctgagccggggcttcggccggcagggcaagcggaccttcatggccgagagacagtacacacggatggaggactggctgaccgccaagctggcctacgagggcctgagcaagacctacctgtccaagacactggcccagtacacctccaagacatgcagcaactgtgggtttaccatcaccagcgccgactacgacagggtgctggagaagctgaagaagacagcaacaggctggatgaccacaattaacggcaaggagctgaaggtggagggccagattacctactacaacagatacaagagacagaacgtagtcaaggacctgtccgtcgagctggatagactgagcgaagaatctgtgaacaacgacatctcctcctggacaaagggcagaagcggagaagctctgagcctcctgaagaaaagattctcccatagacccgtgcaggagaagttcgtgtgcctgaactgcggcttcgagacacacgcagccgagcaagccgccctgaacatcgccagatcctggctgttcctgcggagccaggagtacaagaaataccagacaaacaagacaaccggcaacaccgataagagagccttcgtcgagacctggcagtccttttaccggaagaagcttaaggaggtgtggaaacctgccgtgcggtctggcggatctggcggaggctccatgatgaccttcagggacgtggccatcgacttcagccaggaggagtggaagtggctgcagcccgcccagagggacctgtacaggtgcgtgatgctggagaactacggccacctggtgagcctgggcctgagcatcagcaagcccgacgtggtgagcctgctggagcagggcaaggagccctggctgggcaagaagggcatcagcgagagcagcggcgagatcaaggacttcagccccaagaacggcggcccaagcagcggcgcccctcctcccagcggcggcagcccagccggctccccaacctctaccgaggagggcacctctgagtccgccacccccgagagcggccctggcacctccaccgagcccagcgagggcagcgcacccggcagccctgccggcagccccacctccacagaggagggaaccagcaccgagcccagcgaaggcagcgccccaggcaccagcaccgagcctagtgagcaggagattaaacggatcaacaagatcagaagaagacttgtgaaagacagcaacaccaagaaggccggcaagacaggccccatgaaaaccctgctggttagagtgatgacacccgatctgagagagcggctggaaaacctgagaaagaagcctgaaaatatcccccagcccatcagcaatacatctagagccaacctgaataagctgctgaccgattacaccgaaatgaagaaggcgatcctgcatgtgtactgggaagagttccagaaggaccctgtgggcctgatgagccgggtggcccagcctgccagcaagaagatcgatcagaacaagctgaaacctgagatggacgagaagggcaacctgaccaccgccggctttgcctgctctcagtgtggccagcccctgttcgtgtacaagctggagcaggtgtctgagaagggcaaggcttacaccaactacttcggacggtgcaatgtggccgagcacgaaaagctgatcctgctggcccagctgaagcccgagaaggatagcgacgaagccgtgacatatagcctgggaaagtttgggcagagggccctggatttctacagcattcatgtgaccaaggagtccacccaccccgtgaagcccctggcccagatcgccggaaacagatacgcctccggacctgtgggaaaggccctgagcgacgcatgtatgggcacaatcgcctccttcctgtctaagtaccaggacatcatcatcgaacaccagaaggtggtgaagggcaaccagaagagactggagagcctgcgggagctggccggcaaggaaaacctggaataccctagcgtgaccctgccacctcagcctcacaccaaggagggcgttgatgcctacaacgaagtgatcgcccgggtgcgaatgtgggtgaacctgaacctgtggcagaagctgaagctaagcagagatgatgccaagcctctgctgagactgaagggattcccttcctttcctctggtcgagagacaggccaacgaagtggactggtgggacatggtgtgtaacgtgaagaagctgatcaacgagaaaaaggaggatggcaaggtgttttggcagaatctggctggctacaagagacaggaagccctgagaccatacctgagcagcgaggaagatcggaagaagggaaagaaattcgctcggtaccagctgggcgacctgctgctgcacctggaaaagaagcacggcgaggactggggaaaggtgtacgacgaggcctgggagcggattgacaagaaagtggaaggcctgagcaagcacatcaagctggaagaggaacggagaagcgaggacgcccagagcaaggccgccctgaccgactggctgcgggctaaggccagcttcgtgatcgagggcctgaaggaggccgacaaggacgagttctgcagatgcgagctgaagctgcagaagtggtacggggacctgcggggaaagcccttcgccatcgaagccgagaacagcatcctggacatcagcggcttcagcaagcagtacaactgtgccttcatctggcagaaggacggcgtgaagaagctgaacctgtacctgatcatcaactacttcaagggcggcaagctgcggttcaagaagatcaaacctgaagccttcgaagccaacagattctacaccgtgatcaacaaaaagagcggcgagatcgtgcccatggaggtgaacttcaacttcgacgaccccaacctgatcatcctgcctctggcctttggcaagagacagggcagagaattcatctggaacgacctgctgtccctggaaaccggcagcctgaagctggccaacggaagagtgatcgagaagacactgtacaacagaagaacccggcaggatgagcctgccctgttcgtggccctgaccttcgagcggcgggaggtcctggactcctccaatatcaaaccaatgaacctgatcggcgtggcaagaggcgaaaacatccccgccgtgatcgccctgaccgaccccgagggctgcccactgagccggtttaaggatagcctgggaaacccaacccacatcctgagaatcggcgagagctataaggagaagcagcggaccatccaggccaagaaggaggtggagcagcggagagccggcggctacagccggaagtacgccagcaaagccaagaatctggcagacgatatggtgagaaacaccgctagagatctgctgtactacgccgtgacccaggatgccatgctgatcttcgccaacctgagccggggcttcggccggcagggcaagcggaccttcatggccgagagacagtacacacggatggaggactggctgaccgccaagctggcctacgagggcctgagcaagacctacctgtccaagacactggcccagtacacctccaagacatgcagcaactgtgggtttaccatcaccagcgccgactacgacagggtgctggagaagctgaagaagacagcaacaggctggatgaccacaattaacggcaaggagctgaaggtggagggccagattacctactacaacagatacaagagacagaacgtagtcaaggacctgtccgtcgagctggatagactgagcgaagaatctgtgaacaacgacatctcctcctggacaaagggcagaagcggagaagctctgagcctcctgaagaaaagattctcccatagacccgtgcaggagaagttcgtgtgcctgaactgcggcttcgagacacacgcagccgagcaagccgccctgaacatcgccagatcctggctgttcctgcggagccaggagtacaagaaataccagacaaacaagacaaccggcaacaccgataagagagccttcgtcgagacctggcagtccttttaccggaagaagcttaaggaggtgtggaaacctgccgtgcggtctggcggatctggcggaggctcctatgatgaccttcagggacgtggccatcgacttcagccaggaggagtggaagtggctgcagcccgcccagagggacctgtacaggtgcgtgatgctggagaactacggccacctggtgagcctgggcctgagcatcagcaagcccgacgtggtgagcctgctggagcagggcaaggagccctggctgggcaagaagggcatcagcgagagcagcggcgagatcaaggacttcagccccaagaacggatctggctccggcagcggccccaagaaaaagagaaaagtctaagctgccttctgcggggcttgccttctggccatgcccttcttctctcccttgcacctgtacctcttggtctttgaataaagcctgagtaggaaggctagcaaaaaaaaaaaaaaaaaaaaaaaaaaaaaaaaaaaaaaaaaaaaaaaaaaaaaaaaaaaaaaaaaaaaaaaaaaaaaaaa

SEQ ID NO: 16081 - RNA, 9485 nt, synthetic construct
  source 1..9485: mol_type = other RNA
aggaaataagagagaaaagaagagtaagaagaaatataagagccaccatggcccctaagaagaagcgtaaagtgagccggatggaacgcctcgtctacgaggtgcggcagaagtgcagaaacatcgaggacatctgcatctcctgcggatctctgaacgtgaccctggagcacccactgttcatcggcggcatgtgccagaactgtaaaaactgttttctggagtgtgcctatcaatacgacgatgacggctaccagagctactgcaccatctgttgcggcggaagagaggtgctgatgtgtggaaataacaactgctgccggtgcttctgcgtggaatgcgtggacctgctggtgggccccggcgccgcccaggccgctattaaggaagatccttggaactgctacatgtgcggccacaagggcacatacggcctgctgagacggagagaggactggcctagcagactgcagatgttcttcgccaataaccacgaccaggagttcgacccccctaaggtgtaccctcccgtccccgccgagaagagaaagcccatccgggtcctgagcctgttcgatggcatcgccaccggtctgctggtgctgaaggacctgggcatccaggtggataggtacattgcctccgaggtgtgcgaggactccatcaccgtgggaatggtgcgtcatcagggcaagatcatgtacgtgggcgacgtgcggagcgtgacacagaagcatatccaggagtggggccctttcgacctggtgatcggcggcagcccttgcaatgacctgagcatcgtgaacccagcccggaagggcctgtacgagggaaccggcagactgttcttcgagttttacagactgctgcacgacgcccggcctaaggaaggcgacgaccggcccttcttttggctgttcgagaatgtggtggccatgggagtcagcgacaagcgggatattagccggttcctggagagcaaccccgtgatgatcgatgccaaggaagtgagcgccgcccaccgggccagatacttctggggcaatctgcctggcatgaacagacccctggccagcaccgtgaacgacaagctggagctgcaggagtgcctggagcacggccggatcgccaagttcagcaaggtgagaaccatcaccacccgaagcaacagcatcaaacaaggcaaggaccagcactttcctgtgttcatgaacgagaaggaggacatcctgtggtgtaccgagatggagagagtgttcgggttcccagtccactacacagatgtcagcaacatgtctagactggccagacagagactgctgggaagaagctggtccgtccctgtgatcagacacctgttcgcccctctgaaggagtacttcgcctgcgtgagcagcggcaacagcaacgccaacagccggggccccagcttctctagcggcctggtgccactgtccctgagagggagccacatgggccccatggagatctacaaaaccgtgagcgcctggaagcggcagcctgtgcgcgtgctgagcctgtttcggaatatcgataaagtcctgaaaagcctgggattcctggagagcggctctggctccggcggtggcaccctgaagtacgtggaggatgtgacaaacgtggtcagacgggatgtggagaagtggggccccttcgatctggtgtacggcagcacccaacccctgggcagctcttgtgaccggtgccctggctggtacatgtttcagttccaccggatcctgcagtacgccctgccgagacaggagtcccagcggccattcttttggattttcatggacaacttgctgctgaccgaggatgaccaggaaactaccactcggttcctgcagaccgaagccgtgaccctgcaggacgtgagaggccgggactaccagaacgccatgcgggtgtggtccaacatccctggactgaaaagcaagcacgcacctctgacccctaaagaagaggagtacctgcaggcccaggtgcggagcagaagcaagctggacgcccctaaggtggatctgctggtgaagaattgcctcctgcccctgagagagtacttcaagtatttcagccagaatagtctgcccctgggaggcagcggcggcggcgccctggtgacatttgaggacgtcgccgtgcggttcacccaggaggaatgggctctgctggatccttctcagaaaatcctgtaccgggacgtgatgagagagacataccggaatctgacctccgtgggcatcaactgggaatgttgggaccttgaagcctgcttcagaagcctgggaagaaacctgagagtgcaggtggtgaagagaaagtgcgagctgaccaacagcggcccctgcgccgagggcggcccaagcagcggcgcccctcctcccagcggcggcagcccagccggctccccaacctctaccgaggagggcacctctgagtccgccacccccgagagcggccctggcacctccaccgagcccagcgagggcagcgcacccggcagccctgccggcagccccacctccacagaggagggaaccagcaccgagcccagcgaaggcagcgccccaggcaccagcaccgagcctagtgagcaggagattaaacggatcaacaagatcagaagaagacttgtgaaagacagcaacaccaagaaggccggcaagacaggccccatgaaaaccctgctggttagagtgatgacacccgatctgagagagcggctggaaaacctgagaaagaagcctgaaaatatcccccagcccatcagcaatacatctagagccaacctgaataagctgctgaccgattacaccgaaatgaagaaggcgatcctgcatgtgtactgggaagagttccagaaggaccctgtgggcctgatgagccgggtggcccagcctgccagcaagaagatcgatcagaacaagctgaaacctgagatggacgagaagggcaacctgaccaccgccggctttgcctgctctcagtgtggccagcccctgttcgtgtacaagctggagcaggtgtctgagaagggcaaggcttacaccaactacttcggacggtgcaatgtggccgagcacgaaaagctgatcctgctggcccagctgaagcccgagaaggatagcgacgaagccgtgacatatagcctgggaaagtttgggcagagggccctggatttctacagcattcatgtgaccaaggagtccacccaccccgtgaagcccctggcccagatcgccggaaacagatacgcctccggacctgtgggaaaggccctgagcgacgcatgtatgggcacaatcgcctccttcctgtctaagtaccaggacatcatcatcgaacaccagaaggtggtgaagggcaaccagaagagactggagagcctgcgggagctggccggcaaggaaaacctggaataccctagcgtgaccctgccacctcagcctcacaccaaggagggcgttgatgcctacaacgaagtgatcgcccgggtgcgaatgtgggtgaacctgaacctgtggcagaagctgaagctaagcagagatgatgccaagcctctgctgagactgaagggattcccttcctttcctctggtcgagagacaggccaacgaagtggactggtgggacatggtgtgtaacgtgaagaagctgatcaacgagaaaaaggaggatggcaaggtgttttggcagaatctggctggctacaagagacaggaagccctgagaccatacctgagcagcgaggaagatcggaagaagggaaagaaattcgctcggtaccagctgggcgacctgctgctgcacctggaaaagaagcacggcgaggactggggaaaggtgtacgacgaggcctgggagcggattgacaagaaagtggaaggcctgagcaagcacatcaagctggaagaggaacggagaagcgaggacgcccagagcaaggccgccctgaccgactggctgcgggctaaggccagcttcgtgatcgagggcctgaaggaggccgacaaggacgagttctgcagatgcgagctgaagctgcagaagtggtacggggacctgcggggaaagcccttcgccatcgaagccgagaacagcatcctggacatcagcggcttcagcaagcagtacaactgtgccttcatctggcagaaggacggcgtgaagaagctgaacctgtacctgatcatcaactacttcaagggcggcaagctgcggttcaagaagatcaaacctgaagccttcgaagccaacagattctacaccgtgatcaacaaaaagagcggcgagatcgtgcccatggaggtgaacttcaacttcgacgaccccaacctgatcatcctgcctctggcctttggcaagagacagggcagagaattcatctggaacgacctgctgtccctggaaaccggcagcctgaagctggccaacggaagagtgatcgagaagacactgtacaacagaagaacccggcaggatgagcctgccctgttcgtggccctgaccttcgagcggcgggaggtcctggactcctccaatatcaaaccaatgaacctgatcggcgtggcaagaggcgaaaacatccccgccgtgatcgccctgaccgaccccgagggctgcccactgagccggtttaaggatagcctgggaaacccaacccacatcctgagaatcggcgagagctataaggagaagcagcggaccatccaggccaagaaggaggtggagcagcggagagccggcggctacagccggaagtacgccagcaaagccaagaatctggcagacgatatggtgagaaacaccgctagagatctgctgtactacgccgtgacccaggatgccatgctgatcttcgccaacctgagccggggcttcggccggcagggcaagcggaccttcatggccgagagacagtacacacggatggaggactggctgaccgccaagctggcctacgagggcctgagcaagacctacctgtccaagacactggcccagtacacctccaagacatgcagcaactgtgggtttaccatcaccagcgccgactacgacagggtgctggagaagctgaagaagacagcaacaggctggatgaccacaattaacggcaaggagctgaaggtggagggccagattacctactacaacagatacaagagacagaacgtagtcaaggacctgtccgtcgagctggatagactgagcgaagaatctgtgaacaacgacatctcctcctggacaaagggcagaagcggagaagctctgagcctcctgaagaaaagattctcccatagacccgtgcaggagaagttcgtgtgcctgaactgcggcttcgagacacacgcagccgagcaagccgccctgaacatcgccagatcctggctgttcctgcggagccaggagtacaagaaataccagacaaacaagacaaccggcaacaccgataagagagccttcgtcgagacctggcagtccttttaccggaagaagcttaaggaggtgtggaaacctgccgtgcggtctggcggatctggcggaggctccgccgtgacccagctgaccttcgaggacgtggccgtgtacttcaccagggaggagtggaggtgcctgacccccgcccagaggaccctgtacagggacgtgatgctggacacctacaggaacctggtgagcgtgggcgtgagcccccccagcatgagcgtgatcctgcccctggagttccaggaggagccctgggtggcccagagccacgtgaccaccctgggcggcctgaacggctgggagggcggcggcccaagcagcggcgcccctcctcccagcggcggcagcccagccggctccccaacctctaccgaggagggcacctctgagtccgccacccccgagagcggccctggcacctccaccgagcccagcgagggcagcgcacccggcagccctgccggcagccccacctccacagaggagggaaccagcaccgagcccagcgaaggcagcgccccaggcaccagcaccgagcctagtgagcaggagattaaacggatcaacaagatcagaagaagacttgtgaaagacagcaacaccaagaaggccggcaagacaggccccatgaaaaccctgctggttagagtgatgacacccgatctgagagagcggctggaaaacctgagaaagaagcctgaaaatatcccccagcccatcagcaatacatctagagccaacctgaataagctgctgaccgattacaccgaaatgaagaaggcgatcctgcatgtgtactgggaagagttccagaaggaccctgtgggcctgatgagccgggtggcccagcctgccagcaagaagatcgatcagaacaagctgaaacctgagatggacgagaagggcaacctgaccaccgccggctttgcctgctctcagtgtggccagcccctgttcgtgtacaagctggagcaggtgtctgagaagggcaaggcttacaccaactacttcggacggtgcaatgtggccgagcacgaaaagctgatcctgctggcccagctgaagcccgagaaggatagcgacgaagccgtgacatatagcctgggaaagtttgggcagagggccctggatttctacagcattcatgtgaccaaggagtccacccaccccgtgaagcccctggcccagatcgccggaaacagatacgcctccggacctgtgggaaaggccctgagcgacgcatgtatgggcacaatcgcctccttcctgtctaagtaccaggacatcatcatcgaacaccagaaggtggtgaagggcaaccagaagagactggagagcctgcgggagctggccggcaaggaaaacctggaataccctagcgtgaccctgccacctcagcctcacaccaaggagggcgttgatgcctacaacgaagtgatcgcccgggtgcgaatgtgggtgaacctgaacctgtggcagaagctgaagctaagcagagatgatgccaagcctctgctgagactgaagggattcccttcctttcctctggtcgagagacaggccaacgaagtggactggtgggacatggtgtgtaacgtgaagaagctgatcaacgagaaaaaggaggatggcaaggtgttttggcagaatctggctggctacaagagacaggaagccctgagaccatacctgagcagcgaggaagatcggaagaagggaaagaaattcgctcggtaccagctgggcgacctgctgctgcacctggaaaagaagcacggcgaggactggggaaaggtgtacgacgaggcctgggagcggattgacaagaaagtggaaggcctgagcaagcacatcaagctggaagaggaacggagaagcgaggacgcccagagcaaggccgccctgaccgactggctgcgggctaaggccagcttcgtgatcgagggcctgaaggaggccgacaaggacgagttctgcagatgcgagctgaagctgcagaagtggtacggggacctgcggggaaagcccttcgccatcgaagccgagaacagcatcctggacatcagcggcttcagcaagcagtacaactgtgccttcatctggcagaaggacggcgtgaagaagctgaacctgtacctgatcatcaactacttcaagggcggcaagctgcggttcaagaagatcaaacctgaagccttcgaagccaacagattctacaccgtgatcaacaaaaagagcggcgagatcgtgcccatggaggtgaacttcaacttcgacgaccccaacctgatcatcctgcctctggcctttggcaagagacagggcagagaattcatctggaacgacctgctgtccctggaaaccggcagcctgaagctggccaacggaagagtgatcgagaagacactgtacaacagaagaacccggcaggatgagcctgccctgttcgtggccctgaccttcgagcggcgggaggtcctggactcctccaatatcaaaccaatgaacctgatcggcgtggcaagaggcgaaaacatccccgccgtgatcgccctgaccgaccccgagggctgcccactgagccggtttaaggatagcctgggaaacccaacccacatcctgagaatcggcgagagctataaggagaagcagcggaccatccaggccaagaaggaggtggagcagcggagagccggcggctacagccggaagtacgccagcaaagccaagaatctggcagacgatatggtgagaaacaccgctagagatctgctgtactacgccgtgacccaggatgccatgctgatcttcgccaacctgagccggggcttcggccggcagggcaagcggaccttcatggccgagagacagtacacacggatggaggactggctgaccgccaagctggcctacgagggcctgagcaagacctacctgtccaagacactggcccagtacacctccaagacatgcagcaactgtgggtttaccatcaccagcgccgactacgacagggtgctggagaagctgaagaagacagcaacaggctggatgaccacaattaacggcaaggagctgaaggtggagggccagattacctactacaacagatacaagagacagaacgtagtcaaggacctgtccgtcgagctggatagactgagcgaagaatctgtgaacaacgacatctcctcctggacaaagggcagaagcggagaagctctgagcctcctgaagaaaagattctcccatagacccgtgcaggagaagttcgtgtgcctgaactgcggcttcgagacacacgcagccgagcaagccgccctgaacatcgccagatcctggctgttcctgcggagccaggagtacaagaaataccagacaaacaagacaaccggcaacaccgataagagagccttcgtcgagacctggcagtccttttaccggaagaagcttaaggaggtgtggaaacctgccgtgcggtctggcggatctggcggaggctcctgccgtgacccagctgaccttcgaggacgtggccgtgtacttcaccagggaggagtggaggtgcctgacccccgcccagaggaccctgtacagggacgtgatgctggacacctacaggaacctggtgagcgtgggcgtgagcccccccagcatgagcgtgatcctgcccctggagttccaggaggagccctgggtggcccagagccacgtgaccaccctgggcggcctgaacggctgggagggcggatctggctccggcagcggccccaagaaaaagagaaaagtctaagctgccttctgcggggcttgccttctggccatgcccttcttctctcccttgcacctgtacctcttggtctttgaataaagcctgagtaggaaggctagcaaaaaaaaaaaaaaaaaaaaaaaaaaaaaaaaaaaaaaaaaaaaaaaaaaaaaaaaaaaaaaaaaaaaaaaaaaaaaaaa

SEQ ID NO: 16082 - RNA, 9485 nt, synthetic construct
  source 1..9485: mol_type = other RNA
aggaaataagagagaaaagaagagtaagaagaaatataagagccaccatggcccctaagaagaagcgtaaagtgagccggatggaacgcctcgtctacgaggtgcggcagaagtgcagaaacatcgaggacatctgcatctcctgcggatctctgaacgtgaccctggagcacccactgttcatcggcggcatgtgccagaactgtaaaaactgttttctggagtgtgcctatcaatacgacgatgacggctaccagagctactgcaccatctgttgcggcggaagagaggtgctgatgtgtggaaataacaactgctgccggtgcttctgcgtggaatgcgtggacctgctggtgggccccggcgccgcccaggccgctattaaggaagatccttggaactgctacatgtgcggccacaagggcacatacggcctgctgagacggagagaggactggcctagcagactgcagatgttcttcgccaataaccacgaccaggagttcgacccccctaaggtgtaccctcccgtccccgccgagaagagaaagcccatccgggtcctgagcctgttcgatggcatcgccaccggtctgctggtgctgaaggacctgggcatccaggtggataggtacattgcctccgaggtgtgcgaggactccatcaccgtgggaatggtgcgtcatcagggcaagatcatgtacgtgggcgacgtgcggagcgtgacacagaagcatatccaggagtggggccctttcgacctggtgatcggcggcagcccttgcaatgacctgagcatcgtgaacccagcccggaagggcctgtacgagggaaccggcagactgttcttcgagttttacagactgctgcacgacgcccggcctaaggaaggcgacgaccggcccttcttttggctgttcgagaatgtggtggccatgggagtcagcgacaagcgggatattagccggttcctggagagcaaccccgtgatgatcgatgccaaggaagtgagcgccgcccaccgggccagatacttctggggcaatctgcctggcatgaacagacccctggccagcaccgtgaacgacaagctggagctgcaggagtgcctggagcacggccggatcgccaagttcagcaaggtgagaaccatcaccacccgaagcaacagcatcaaacaaggcaaggaccagcactttcctgtgttcatgaacgagaaggaggacatcctgtggtgtaccgagatggagagagtgttcgggttcccagtccactacacagatgtcagcaacatgtctagactggccagacagagactgctgggaagaagctggtccgtccctgtgatcagacacctgttcgcccctctgaaggagtacttcgcctgcgtgagcagcggcaacagcaacgccaacagccggggccccagcttctctagcggcctggtgccactgtccctgagagggagccacatgggccccatggagatctacaaaaccgtgagcgcctggaagcggcagcctgtgcgcgtgctgagcctgtttcggaatatcgataaagtcctgaaaagcctgggattcctggagagcggctctggctccggcggtggcaccctgaagtacgtggaggatgtgacaaacgtggtcagacgggatgtggagaagtggggccccttcgatctggtgtacggcagcacccaacccctgggcagctcttgtgaccggtgccctggctggtacatgtttcagttccaccggatcctgcagtacgccctgccgagacaggagtcccagcggccattcttttggattttcatggacaacttgctgctgaccgaggatgaccaggaaactaccactcggttcctgcagaccgaagccgtgaccctgcaggacgtgagaggccgggactaccagaacgccatgcgggtgtggtccaacatccctggactgaaaagcaagcacgcacctctgacccctaaagaagaggagtacctgcaggcccaggtgcggagcagaagcaagctggacgcccctaaggtggatctgctggtgaagaattgcctcctgcccctgagagagtacttcaagtatttcagccagaatagtctgcccctgggaggcagcggcggcggcgccctggtgacatttgaggacgtcgccgtgcggttcacccaggaggaatgggctctgctggatccttctcagaaaatcctgtaccgggacgtgatgagagagacataccggaatctgacctccgtgggcatcaactgggaatgttgggaccttgaagcctgcttcagaagcctgggaagaaacctgagagtgcaggtggtgaagagaaagtgcgagctgaccaacagcggcccctgcgccgagggcggcccaagcagcggcgcccctcctcccagcggcggcagcccagccggctccccaacctctaccgaggagggcacctctgagtccgccacccccgagagcggccctggcacctccaccgagcccagcgagggcagcgcacccggcagccctgccggcagccccacctccacagaggagggaaccagcaccgagcccagcgaaggcagcgccccaggcaccagcaccgagcctagtgagcaggagattaaacggatcaacaagatcagaagaagacttgtgaaagacagcaacaccaagaaggccggcaagacaggccccatgaaaaccctgctggttagagtgatgacacccgatctgagagagcggctggaaaacctgagaaagaagcctgaaaatatcccccagcccatcagcaatacatctagagccaacctgaataagctgctgaccgattacaccgaaatgaagaaggcgatcctgcatgtgtactgggaagagttccagaaggaccctgtgggcctgatgagccgggtggcccagcctgccagcaagaagatcgatcagaacaagctgaaacctgagatggacgagaagggcaacctgaccaccgccggctttgcctgctctcagtgtggccagcccctgttcgtgtacaagctggagcaggtgtctgagaagggcaaggcttacaccaactacttcggacggtgcaatgtggccgagcacgaaaagctgatcctgctggcccagctgaagcccgagaaggatagcgacgaagccgtgacatatagcctgggaaagtttgggcagagggccctggatttctacagcattcatgtgaccaaggagtccacccaccccgtgaagcccctggcccagatcgccggaaacagatacgcctccggacctgtgggaaaggccctgagcgacgcatgtatgggcacaatcgcctccttcctgtctaagtaccaggacatcatcatcgaacaccagaaggtggtgaagggcaaccagaagagactggagagcctgcgggagctggccggcaaggaaaacctggaataccctagcgtgaccctgccacctcagcctcacaccaaggagggcgttgatgcctacaacgaagtgatcgcccgggtgcgaatgtgggtgaacctgaacctgtggcagaagctgaagctaagcagagatgatgccaagcctctgctgagactgaagggattcccttcctttcctctggtcgagagacaggccaacgaagtggactggtgggacatggtgtgtaacgtgaagaagctgatcaacgagaaaaaggaggatggcaaggtgttttggcagaatctggctggctacaagagacaggaagccctgagaccatacctgagcagcgaggaagatcggaagaagggaaagaaattcgctcggtaccagctgggcgacctgctgctgcacctggaaaagaagcacggcgaggactggggaaaggtgtacgacgaggcctgggagcggattgacaagaaagtggaaggcctgagcaagcacatcaagctggaagaggaacggagaagcgaggacgcccagagcaaggccgccctgaccgactggctgcgggctaaggccagcttcgtgatcgagggcctgaaggaggccgacaaggacgagttctgcagatgcgagctgaagctgcagaagtggtacggggacctgcggggaaagcccttcgccatcgaagccgagaacagcatcctggacatcagcggcttcagcaagcagtacaactgtgccttcatctggcagaaggacggcgtgaagaagctgaacctgtacctgatcatcaactacttcaagggcggcaagctgcggttcaagaagatcaaacctgaagccttcgaagccaacagattctacaccgtgatcaacaaaaagagcggcgagatcgtgcccatggaggtgaacttcaacttcgacgaccccaacctgatcatcctgcctctggcctttggcaagagacagggcagagaattcatctggaacgacctgctgtccctggaaaccggcagcctgaagctggccaacggaagagtgatcgagaagacactgtacaacagaagaacccggcaggatgagcctgccctgttcgtggccctgaccttcgagcggcgggaggtcctggactcctccaatatcaaaccaatgaacctgatcggcgtggcaagaggcgaaaacatccccgccgtgatcgccctgaccgaccccgagggctgcccactgagccggtttaaggatagcctgggaaacccaacccacatcctgagaatcggcgagagctataaggagaagcagcggaccatccaggccaagaaggaggtggagcagcggagagccggcggctacagccggaagtacgccagcaaagccaagaatctggcagacgatatggtgagaaacaccgctagagatctgctgtactacgccgtgacccaggatgccatgctgatcttcgccaacctgagccggggcttcggccggcagggcaagcggaccttcatggccgagagacagtacacacggatggaggactggctgaccgccaagctggcctacgagggcctgagcaagacctacctgtccaagacactggcccagtacacctccaagacatgcagcaactgtgggtttaccatcaccagcgccgactacgacagggtgctggagaagctgaagaagacagcaacaggctggatgaccacaattaacggcaaggagctgaaggtggagggccagattacctactacaacagatacaagagacagaacgtagtcaaggacctgtccgtcgagctggatagactgagcgaagaatctgtgaacaacgacatctcctcctggacaaagggcagaagcggagaagctctgagcctcctgaagaaaagattctcccatagacccgtgcaggagaagttcgtgtgcctgaactgcggcttcgagacacacgcagccgagcaagccgccctgaacatcgccagatcctggctgttcctgcggagccaggagtacaagaaataccagacaaacaagacaaccggcaacaccgataagagagccttcgtcgagacctggcagtccttttaccggaagaagcttaaggaggtgtggaaacctgccgtgcggtctggcggatctggcggaggctccgccctgaggagcgtgatgttcagcgacatcagcatcgacttcagccccgaggagtgggagtacctggacctggagcagaagaacctgtacagggacgtgatgctggagaactacagcaacctggtgagcctgggctgcttcatcagcaagcccgtggtgatcagcctgctggagcagggcaaggagccctggaaggtggtgaggaagaggaggcagtaccccgacctggagaccaagtacgagggcggcccaagcagcggcgcccctcctcccagcggcggcagcccagccggctccccaacctctaccgaggagggcacctctgagtccgccacccccgagagcggccctggcacctccaccgagcccagcgagggcagcgcacccggcagccctgccggcagccccacctccacagaggagggaaccagcaccgagcccagcgaaggcagcgccccaggcaccagcaccgagcctagtgagcaggagattaaacggatcaacaagatcagaagaagacttgtgaaagacagcaacaccaagaaggccggcaagacaggccccatgaaaaccctgctggttagagtgatgacacccgatctgagagagcggctggaaaacctgagaaagaagcctgaaaatatcccccagcccatcagcaatacatctagagccaacctgaataagctgctgaccgattacaccgaaatgaagaaggcgatcctgcatgtgtactgggaagagttccagaaggaccctgtgggcctgatgagccgggtggcccagcctgccagcaagaagatcgatcagaacaagctgaaacctgagatggacgagaagggcaacctgaccaccgccggctttgcctgctctcagtgtggccagcccctgttcgtgtacaagctggagcaggtgtctgagaagggcaaggcttacaccaactacttcggacggtgcaatgtggccgagcacgaaaagctgatcctgctggcccagctgaagcccgagaaggatagcgacgaagccgtgacatatagcctgggaaagtttgggcagagggccctggatttctacagcattcatgtgaccaaggagtccacccaccccgtgaagcccctggcccagatcgccggaaacagatacgcctccggacctgtgggaaaggccctgagcgacgcatgtatgggcacaatcgcctccttcctgtctaagtaccaggacatcatcatcgaacaccagaaggtggtgaagggcaaccagaagagactggagagcctgcgggagctggccggcaaggaaaacctggaataccctagcgtgaccctgccacctcagcctcacaccaaggagggcgttgatgcctacaacgaagtgatcgcccgggtgcgaatgtgggtgaacctgaacctgtggcagaagctgaagctaagcagagatgatgccaagcctctgctgagactgaagggattcccttcctttcctctggtcgagagacaggccaacgaagtggactggtgggacatggtgtgtaacgtgaagaagctgatcaacgagaaaaaggaggatggcaaggtgttttggcagaatctggctggctacaagagacaggaagccctgagaccatacctgagcagcgaggaagatcggaagaagggaaagaaattcgctcggtaccagctgggcgacctgctgctgcacctggaaaagaagcacggcgaggactggggaaaggtgtacgacgaggcctgggagcggattgacaagaaagtggaaggcctgagcaagcacatcaagctggaagaggaacggagaagcgaggacgcccagagcaaggccgccctgaccgactggctgcgggctaaggccagcttcgtgatcgagggcctgaaggaggccgacaaggacgagttctgcagatgcgagctgaagctgcagaagtggtacggggacctgcggggaaagcccttcgccatcgaagccgagaacagcatcctggacatcagcggcttcagcaagcagtacaactgtgccttcatctggcagaaggacggcgtgaagaagctgaacctgtacctgatcatcaactacttcaagggcggcaagctgcggttcaagaagatcaaacctgaagccttcgaagccaacagattctacaccgtgatcaacaaaaagagcggcgagatcgtgcccatggaggtgaacttcaacttcgacgaccccaacctgatcatcctgcctctggcctttggcaagagacagggcagagaattcatctggaacgacctgctgtccctggaaaccggcagcctgaagctggccaacggaagagtgatcgagaagacactgtacaacagaagaacccggcaggatgagcctgccctgttcgtggccctgaccttcgagcggcgggaggtcctggactcctccaatatcaaaccaatgaacctgatcggcgtggcaagaggcgaaaacatccccgccgtgatcgccctgaccgaccccgagggctgcccactgagccggtttaaggatagcctgggaaacccaacccacatcctgagaatcggcgagagctataaggagaagcagcggaccatccaggccaagaaggaggtggagcagcggagagccggcggctacagccggaagtacgccagcaaagccaagaatctggcagacgatatggtgagaaacaccgctagagatctgctgtactacgccgtgacccaggatgccatgctgatcttcgccaacctgagccggggcttcggccggcagggcaagcggaccttcatggccgagagacagtacacacggatggaggactggctgaccgccaagctggcctacgagggcctgagcaagacctacctgtccaagacactggcccagtacacctccaagacatgcagcaactgtgggtttaccatcaccagcgccgactacgacagggtgctggagaagctgaagaagacagcaacaggctggatgaccacaattaacggcaaggagctgaaggtggagggccagattacctactacaacagatacaagagacagaacgtagtcaaggacctgtccgtcgagctggatagactgagcgaagaatctgtgaacaacgacatctcctcctggacaaagggcagaagcggagaagctctgagcctcctgaagaaaagattctcccatagacccgtgcaggagaagttcgtgtgcctgaactgcggcttcgagacacacgcagccgagcaagccgccctgaacatcgccagatcctggctgttcctgcggagccaggagtacaagaaataccagacaaacaagacaaccggcaacaccgataagagagccttcgtcgagacctggcagtccttttaccggaagaagcttaaggaggtgtggaaacctgccgtgcggtctggcggatctggcggaggctcctgccctgaggagcgtgatgttcagcgacatcagcatcgacttcagccccgaggagtgggagtacctggacctggagcagaagaacctgtacagggacgtgatgctggagaactacagcaacctggtgagcctgggctgcttcatcagcaagcccgtggtgatcagcctgctggagcagggcaaggagccctggaaggtggtgaggaagaggaggcagtaccccgacctggagaccaagtacgagggatctggctccggcagcggccccaagaaaaagagaaaagtctaagctgccttctgcggggcttgccttctggccatgcccttcttctctcccttgcacctgtacctcttggtctttgaataaagcctgagtaggaaggctagcaaaaaaaaaaaaaaaaaaaaaaaaaaaaaaaaaaaaaaaaaaaaaaaaaaaaaaaaaaaaaaaaaaaaaaaaaaaaaaaa

SEQ ID NO: 16083 - RNA, 9485 nt, synthetic construct
  source 1..9485: mol_type = other RNA
aggaaataagagagaaaagaagagtaagaagaaatataagagccaccatggcccctaagaagaagcgtaaagtgagccggatggaacgcctcgtctacgaggtgcggcagaagtgcagaaacatcgaggacatctgcatctcctgcggatctctgaacgtgaccctggagcacccactgttcatcggcggcatgtgccagaactgtaaaaactgttttctggagtgtgcctatcaatacgacgatgacggctaccagagctactgcaccatctgttgcggcggaagagaggtgctgatgtgtggaaataacaactgctgccggtgcttctgcgtggaatgcgtggacctgctggtgggccccggcgccgcccaggccgctattaaggaagatccttggaactgctacatgtgcggccacaagggcacatacggcctgctgagacggagagaggactggcctagcagactgcagatgttcttcgccaataaccacgaccaggagttcgacccccctaaggtgtaccctcccgtccccgccgagaagagaaagcccatccgggtcctgagcctgttcgatggcatcgccaccggtctgctggtgctgaaggacctgggcatccaggtggataggtacattgcctccgaggtgtgcgaggactccatcaccgtgggaatggtgcgtcatcagggcaagatcatgtacgtgggcgacgtgcggagcgtgacacagaagcatatccaggagtggggccctttcgacctggtgatcggcggcagcccttgcaatgacctgagcatcgtgaacccagcccggaagggcctgtacgagggaaccggcagactgttcttcgagttttacagactgctgcacgacgcccggcctaaggaaggcgacgaccggcccttcttttggctgttcgagaatgtggtggccatgggagtcagcgacaagcgggatattagccggttcctggagagcaaccccgtgatgatcgatgccaaggaagtgagcgccgcccaccgggccagatacttctggggcaatctgcctggcatgaacagacccctggccagcaccgtgaacgacaagctggagctgcaggagtgcctggagcacggccggatcgccaagttcagcaaggtgagaaccatcaccacccgaagcaacagcatcaaacaaggcaaggaccagcactttcctgtgttcatgaacgagaaggaggacatcctgtggtgtaccgagatggagagagtgttcgggttcccagtccactacacagatgtcagcaacatgtctagactggccagacagagactgctgggaagaagctggtccgtccctgtgatcagacacctgttcgcccctctgaaggagtacttcgcctgcgtgagcagcggcaacagcaacgccaacagccggggccccagcttctctagcggcctggtgccactgtccctgagagggagccacatgggccccatggagatctacaaaaccgtgagcgcctggaagcggcagcctgtgcgcgtgctgagcctgtttcggaatatcgataaagtcctgaaaagcctgggattcctggagagcggctctggctccggcggtggcaccctgaagtacgtggaggatgtgacaaacgtggtcagacgggatgtggagaagtggggccccttcgatctggtgtacggcagcacccaacccctgggcagctcttgtgaccggtgccctggctggtacatgtttcagttccaccggatcctgcagtacgccctgccgagacaggagtcccagcggccattcttttggattttcatggacaacttgctgctgaccgaggatgaccaggaaactaccactcggttcctgcagaccgaagccgtgaccctgcaggacgtgagaggccgggactaccagaacgccatgcgggtgtggtccaacatccctggactgaaaagcaagcacgcacctctgacccctaaagaagaggagtacctgcaggcccaggtgcggagcagaagcaagctggacgcccctaaggtggatctgctggtgaagaattgcctcctgcccctgagagagtacttcaagtatttcagccagaatagtctgcccctgggaggcagcggcggcggcgccctggtgacatttgaggacgtcgccgtgcggttcacccaggaggaatgggctctgctggatccttctcagaaaatcctgtaccgggacgtgatgagagagacataccggaatctgacctccgtgggcatcaactgggaatgttgggaccttgaagcctgcttcagaagcctgggaagaaacctgagagtgcaggtggtgaagagaaagtgcgagctgaccaacagcggcccctgcgccgagggcggcccaagcagcggcgcccctcctcccagcggcggcagcccagccggctccccaacctctaccgaggagggcacctctgagtccgccacccccgagagcggccctggcacctccaccgagcccagcgagggcagcgcacccggcagccctgccggcagccccacctccacagaggagggaaccagcaccgagcccagcgaaggcagcgccccaggcaccagcaccgagcctagtgagcaggagattaaacggatcaacaagatcagaagaagacttgtgaaagacagcaacaccaagaaggccggcaagacaggccccatgaaaaccctgctggttagagtgatgacacccgatctgagagagcggctggaaaacctgagaaagaagcctgaaaatatcccccagcccatcagcaatacatctagagccaacctgaataagctgctgaccgattacaccgaaatgaagaaggcgatcctgcatgtgtactgggaagagttccagaaggaccctgtgggcctgatgagccgggtggcccagcctgccagcaagaagatcgatcagaacaagctgaaacctgagatggacgagaagggcaacctgaccaccgccggctttgcctgctctcagtgtggccagcccctgttcgtgtacaagctggagcaggtgtctgagaagggcaaggcttacaccaactacttcggacggtgcaatgtggccgagcacgaaaagctgatcctgctggcccagctgaagcccgagaaggatagcgacgaagccgtgacatatagcctgggaaagtttgggcagagggccctggatttctacagcattcatgtgaccaaggagtccacccaccccgtgaagcccctggcccagatcgccggaaacagatacgcctccggacctgtgggaaaggccctgagcgacgcatgtatgggcacaatcgcctccttcctgtctaagtaccaggacatcatcatcgaacaccagaaggtggtgaagggcaaccagaagagactggagagcctgcgggagctggccggcaaggaaaacctggaataccctagcgtgaccctgccacctcagcctcacaccaaggagggcgttgatgcctacaacgaagtgatcgcccgggtgcgaatgtgggtgaacctgaacctgtggcagaagctgaagctaagcagagatgatgccaagcctctgctgagactgaagggattcccttcctttcctctggtcgagagacaggccaacgaagtggactggtgggacatggtgtgtaacgtgaagaagctgatcaacgagaaaaaggaggatggcaaggtgttttggcagaatctggctggctacaagagacaggaagccctgagaccatacctgagcagcgaggaagatcggaagaagggaaagaaattcgctcggtaccagctgggcgacctgctgctgcacctggaaaagaagcacggcgaggactggggaaaggtgtacgacgaggcctgggagcggattgacaagaaagtggaaggcctgagcaagcacatcaagctggaagaggaacggagaagcgaggacgcccagagcaaggccgccctgaccgactggctgcgggctaaggccagcttcgtgatcgagggcctgaaggaggccgacaaggacgagttctgcagatgcgagctgaagctgcagaagtggtacggggacctgcggggaaagcccttcgccatcgaagccgagaacagcatcctggacatcagcggcttcagcaagcagtacaactgtgccttcatctggcagaaggacggcgtgaagaagctgaacctgtacctgatcatcaactacttcaagggcggcaagctgcggttcaagaagatcaaacctgaagccttcgaagccaacagattctacaccgtgatcaacaaaaagagcggcgagatcgtgcccatggaggtgaacttcaacttcgacgaccccaacctgatcatcctgcctctggcctttggcaagagacagggcagagaattcatctggaacgacctgctgtccctggaaaccggcagcctgaagctggccaacggaagagtgatcgagaagacactgtacaacagaagaacccggcaggatgagcctgccctgttcgtggccctgaccttcgagcggcgggaggtcctggactcctccaatatcaaaccaatgaacctgatcggcgtggcaagaggcgaaaacatccccgccgtgatcgccctgaccgaccccgagggctgcccactgagccggtttaaggatagcctgggaaacccaacccacatcctgagaatcggcgagagctataaggagaagcagcggaccatccaggccaagaaggaggtggagcagcggagagccggcggctacagccggaagtacgccagcaaagccaagaatctggcagacgatatggtgagaaacaccgctagagatctgctgtactacgccgtgacccaggatgccatgctgatcttcgccaacctgagccggggcttcggccggcagggcaagcggaccttcatggccgagagacagtacacacggatggaggactggctgaccgccaagctggcctacgagggcctgagcaagacctacctgtccaagacactggcccagtacacctccaagacatgcagcaactgtgggtttaccatcaccagcgccgactacgacagggtgctggagaagctgaagaagacagcaacaggctggatgaccacaattaacggcaaggagctgaaggtggagggccagattacctactacaacagatacaagagacagaacgtagtcaaggacctgtccgtcgagctggatagactgagcgaagaatctgtgaacaacgacatctcctcctggacaaagggcagaagcggagaagctctgagcctcctgaagaaaagattctcccatagacccgtgcaggagaagttcgtgtgcctgaactgcggcttcgagacacacgcagccgagcaagccgccctgaacatcgccagatcctggctgttcctgcggagccaggagtacaagaaataccagacaaacaagacaaccggcaacaccgataagagagccttcgtcgagacctggcagtccttttaccggaagaagcttaaggaggtgtggaaacctgccgtgcggtctggcggatctggcggaggctccgccgagatcaccctgatgaaccaggcccaggacagcaggagcatcctgttccaggagagcgtgaccttcgaggacgtggccgtgaacttcaccaacagggagtggcagtgcctgacctacgcccagaggcacctgtacaaggacgtgatgctggagaactacggcaacatggtgagcctgggcttccccttccccaagccccccctgatcagccacctggagagggaggtggacccctgcgtgggcggcccaagcagcggcgcccctcctcccagcggcggcagcccagccggctccccaacctctaccgaggagggcacctctgagtccgccacccccgagagcggccctggcacctccaccgagcccagcgagggcagcgcacccggcagccctgccggcagccccacctccacagaggagggaaccagcaccgagcccagcgaaggcagcgccccaggcaccagcaccgagcctagtgagcaggagattaaacggatcaacaagatcagaagaagacttgtgaaagacagcaacaccaagaaggccggcaagacaggccccatgaaaaccctgctggttagagtgatgacacccgatctgagagagcggctggaaaacctgagaaagaagcctgaaaatatcccccagcccatcagcaatacatctagagccaacctgaataagctgctgaccgattacaccgaaatgaagaaggcgatcctgcatgtgtactgggaagagttccagaaggaccctgtgggcctgatgagccgggtggcccagcctgccagcaagaagatcgatcagaacaagctgaaacctgagatggacgagaagggcaacctgaccaccgccggctttgcctgctctcagtgtggccagcccctgttcgtgtacaagctggagcaggtgtctgagaagggcaaggcttacaccaactacttcggacggtgcaatgtggccgagcacgaaaagctgatcctgctggcccagctgaagcccgagaaggatagcgacgaagccgtgacatatagcctgggaaagtttgggcagagggccctggatttctacagcattcatgtgaccaaggagtccacccaccccgtgaagcccctggcccagatcgccggaaacagatacgcctccggacctgtgggaaaggccctgagcgacgcatgtatgggcacaatcgcctccttcctgtctaagtaccaggacatcatcatcgaacaccagaaggtggtgaagggcaaccagaagagactggagagcctgcgggagctggccggcaaggaaaacctggaataccctagcgtgaccctgccacctcagcctcacaccaaggagggcgttgatgcctacaacgaagtgatcgcccgggtgcgaatgtgggtgaacctgaacctgtggcagaagctgaagctaagcagagatgatgccaagcctctgctgagactgaagggattcccttcctttcctctggtcgagagacaggccaacgaagtggactggtgggacatggtgtgtaacgtgaagaagctgatcaacgagaaaaaggaggatggcaaggtgttttggcagaatctggctggctacaagagacaggaagccctgagaccatacctgagcagcgaggaagatcggaagaagggaaagaaattcgctcggtaccagctgggcgacctgctgctgcacctggaaaagaagcacggcgaggactggggaaaggtgtacgacgaggcctgggagcggattgacaagaaagtggaaggcctgagcaagcacatcaagctggaagaggaacggagaagcgaggacgcccagagcaaggccgccctgaccgactggctgcgggctaaggccagcttcgtgatcgagggcctgaaggaggccgacaaggacgagttctgcagatgcgagctgaagctgcagaagtggtacggggacctgcggggaaagcccttcgccatcgaagccgagaacagcatcctggacatcagcggcttcagcaagcagtacaactgtgccttcatctggcagaaggacggcgtgaagaagctgaacctgtacctgatcatcaactacttcaagggcggcaagctgcggttcaagaagatcaaacctgaagccttcgaagccaacagattctacaccgtgatcaacaaaaagagcggcgagatcgtgcccatggaggtgaacttcaacttcgacgaccccaacctgatcatcctgcctctggcctttggcaagagacagggcagagaattcatctggaacgacctgctgtccctggaaaccggcagcctgaagctggccaacggaagagtgatcgagaagacactgtacaacagaagaacccggcaggatgagcctgccctgttcgtggccctgaccttcgagcggcgggaggtcctggactcctccaatatcaaaccaatgaacctgatcggcgtggcaagaggcgaaaacatccccgccgtgatcgccctgaccgaccccgagggctgcccactgagccggtttaaggatagcctgggaaacccaacccacatcctgagaatcggcgagagctataaggagaagcagcggaccatccaggccaagaaggaggtggagcagcggagagccggcggctacagccggaagtacgccagcaaagccaagaatctggcagacgatatggtgagaaacaccgctagagatctgctgtactacgccgtgacccaggatgccatgctgatcttcgccaacctgagccggggcttcggccggcagggcaagcggaccttcatggccgagagacagtacacacggatggaggactggctgaccgccaagctggcctacgagggcctgagcaagacctacctgtccaagacactggcccagtacacctccaagacatgcagcaactgtgggtttaccatcaccagcgccgactacgacagggtgctggagaagctgaagaagacagcaacaggctggatgaccacaattaacggcaaggagctgaaggtggagggccagattacctactacaacagatacaagagacagaacgtagtcaaggacctgtccgtcgagctggatagactgagcgaagaatctgtgaacaacgacatctcctcctggacaaagggcagaagcggagaagctctgagcctcctgaagaaaagattctcccatagacccgtgcaggagaagttcgtgtgcctgaactgcggcttcgagacacacgcagccgagcaagccgccctgaacatcgccagatcctggctgttcctgcggagccaggagtacaagaaataccagacaaacaagacaaccggcaacaccgataagagagccttcgtcgagacctggcagtccttttaccggaagaagcttaaggaggtgtggaaacctgccgtgcggtctggcggatctggcggaggctcctgccgagatcaccctgatgaaccaggcccaggacagcaggagcatcctgttccaggagagcgtgaccttcgaggacgtggccgtgaacttcaccaacagggagtggcagtgcctgacctacgcccagaggcacctgtacaaggacgtgatgctggagaactacggcaacatggtgagcctgggcttccccttccccaagccccccctgatcagccacctggagagggaggtggacccctgcgtgggatctggctccggcagcggccccaagaaaaagagaaaagtctaagctgccttctgcggggcttgccttctggccatgcccttcttctctcccttgcacctgtacctcttggtctttgaataaagcctgagtaggaaggctagcaaaaaaaaaaaaaaaaaaaaaaaaaaaaaaaaaaaaaaaaaaaaaaaaaaaaaaaaaaaaaaaaaaaaaaaaaaaaaaaa

SEQ ID NO: 16084 - RNA, 9485 nt, synthetic construct
  source 1..9485: mol_type = other RNA
aggaaataagagagaaaagaagagtaagaagaaatataagagccaccatggcccctaagaagaagcgtaaagtgagccggatggaacgcctcgtctacgaggtgcggcagaagtgcagaaacatcgaggacatctgcatctcctgcggatctctgaacgtgaccctggagcacccactgttcatcggcggcatgtgccagaactgtaaaaactgttttctggagtgtgcctatcaatacgacgatgacggctaccagagctactgcaccatctgttgcggcggaagagaggtgctgatgtgtggaaataacaactgctgccggtgcttctgcgtggaatgcgtggacctgctggtgggccccggcgccgcccaggccgctattaaggaagatccttggaactgctacatgtgcggccacaagggcacatacggcctgctgagacggagagaggactggcctagcagactgcagatgttcttcgccaataaccacgaccaggagttcgacccccctaaggtgtaccctcccgtccccgccgagaagagaaagcccatccgggtcctgagcctgttcgatggcatcgccaccggtctgctggtgctgaaggacctgggcatccaggtggataggtacattgcctccgaggtgtgcgaggactccatcaccgtgggaatggtgcgtcatcagggcaagatcatgtacgtgggcgacgtgcggagcgtgacacagaagcatatccaggagtggggccctttcgacctggtgatcggcggcagcccttgcaatgacctgagcatcgtgaacccagcccggaagggcctgtacgagggaaccggcagactgttcttcgagttttacagactgctgcacgacgcccggcctaaggaaggcgacgaccggcccttcttttggctgttcgagaatgtggtggccatgggagtcagcgacaagcgggatattagccggttcctggagagcaaccccgtgatgatcgatgccaaggaagtgagcgccgcccaccgggccagatacttctggggcaatctgcctggcatgaacagacccctggccagcaccgtgaacgacaagctggagctgcaggagtgcctggagcacggccggatcgccaagttcagcaaggtgagaaccatcaccacccgaagcaacagcatcaaacaaggcaaggaccagcactttcctgtgttcatgaacgagaaggaggacatcctgtggtgtaccgagatggagagagtgttcgggttcccagtccactacacagatgtcagcaacatgtctagactggccagacagagactgctgggaagaagctggtccgtccctgtgatcagacacctgttcgcccctctgaaggagtacttcgcctgcgtgagcagcggcaacagcaacgccaacagccggggccccagcttctctagcggcctggtgccactgtccctgagagggagccacatgggccccatggagatctacaaaaccgtgagcgcctggaagcggcagcctgtgcgcgtgctgagcctgtttcggaatatcgataaagtcctgaaaagcctgggattcctggagagcggctctggctccggcggtggcaccctgaagtacgtggaggatgtgacaaacgtggtcagacgggatgtggagaagtggggccccttcgatctggtgtacggcagcacccaacccctgggcagctcttgtgaccggtgccctggctggtacatgtttcagttccaccggatcctgcagtacgccctgccgagacaggagtcccagcggccattcttttggattttcatggacaacttgctgctgaccgaggatgaccaggaaactaccactcggttcctgcagaccgaagccgtgaccctgcaggacgtgagaggccgggactaccagaacgccatgcgggtgtggtccaacatccctggactgaaaagcaagcacgcacctctgacccctaaagaagaggagtacctgcaggcccaggtgcggagcagaagcaagctggacgcccctaaggtggatctgctggtgaagaattgcctcctgcccctgagagagtacttcaagtatttcagccagaatagtctgcccctgggaggcagcggcggcggcgccctggtgacatttgaggacgtcgccgtgcggttcacccaggaggaatgggctctgctggatccttctcagaaaatcctgtaccgggacgtgatgagagagacataccggaatctgacctccgtgggcatcaactgggaatgttgggaccttgaagcctgcttcagaagcctgggaagaaacctgagagtgcaggtggtgaagagaaagtgcgagctgaccaacagcggcccctgcgccgagggcggcccaagcagcggcgcccctcctcccagcggcggcagcccagccggctccccaacctctaccgaggagggcacctctgagtccgccacccccgagagcggccctggcacctccaccgagcccagcgagggcagcgcacccggcagccctgccggcagccccacctccacagaggagggaaccagcaccgagcccagcgaaggcagcgccccaggcaccagcaccgagcctagtgagcaggagattaaacggatcaacaagatcagaagaagacttgtgaaagacagcaacaccaagaaggccggcaagacaggccccatgaaaaccctgctggttagagtgatgacacccgatctgagagagcggctggaaaacctgagaaagaagcctgaaaatatcccccagcccatcagcaatacatctagagccaacctgaataagctgctgaccgattacaccgaaatgaagaaggcgatcctgcatgtgtactgggaagagttccagaaggaccctgtgggcctgatgagccgggtggcccagcctgccagcaagaagatcgatcagaacaagctgaaacctgagatggacgagaagggcaacctgaccaccgccggctttgcctgctctcagtgtggccagcccctgttcgtgtacaagctggagcaggtgtctgagaagggcaaggcttacaccaactacttcggacggtgcaatgtggccgagcacgaaaagctgatcctgctggcccagctgaagcccgagaaggatagcgacgaagccgtgacatatagcctgggaaagtttgggcagagggccctggatttctacagcattcatgtgaccaaggagtccacccaccccgtgaagcccctggcccagatcgccggaaacagatacgcctccggacctgtgggaaaggccctgagcgacgcatgtatgggcacaatcgcctccttcctgtctaagtaccaggacatcatcatcgaacaccagaaggtggtgaagggcaaccagaagagactggagagcctgcgggagctggccggcaaggaaaacctggaataccctagcgtgaccctgccacctcagcctcacaccaaggagggcgttgatgcctacaacgaagtgatcgcccgggtgcgaatgtgggtgaacctgaacctgtggcagaagctgaagctaagcagagatgatgccaagcctctgctgagactgaagggattcccttcctttcctctggtcgagagacaggccaacgaagtggactggtgggacatggtgtgtaacgtgaagaagctgatcaacgagaaaaaggaggatggcaaggtgttttggcagaatctggctggctacaagagacaggaagccctgagaccatacctgagcagcgaggaagatcggaagaagggaaagaaattcgctcggtaccagctgggcgacctgctgctgcacctggaaaagaagcacggcgaggactggggaaaggtgtacgacgaggcctgggagcggattgacaagaaagtggaaggcctgagcaagcacatcaagctggaagaggaacggagaagcgaggacgcccagagcaaggccgccctgaccgactggctgcgggctaaggccagcttcgtgatcgagggcctgaaggaggccgacaaggacgagttctgcagatgcgagctgaagctgcagaagtggtacggggacctgcggggaaagcccttcgccatcgaagccgagaacagcatcctggacatcagcggcttcagcaagcagtacaactgtgccttcatctggcagaaggacggcgtgaagaagctgaacctgtacctgatcatcaactacttcaagggcggcaagctgcggttcaagaagatcaaacctgaagccttcgaagccaacagattctacaccgtgatcaacaaaaagagcggcgagatcgtgcccatggaggtgaacttcaacttcgacgaccccaacctgatcatcctgcctctggcctttggcaagagacagggcagagaattcatctggaacgacctgctgtccctggaaaccggcagcctgaagctggccaacggaagagtgatcgagaagacactgtacaacagaagaacccggcaggatgagcctgccctgttcgtggccctgaccttcgagcggcgggaggtcctggactcctccaatatcaaaccaatgaacctgatcggcgtggcaagaggcgaaaacatccccgccgtgatcgccctgaccgaccccgagggctgcccactgagccggtttaaggatagcctgggaaacccaacccacatcctgagaatcggcgagagctataaggagaagcagcggaccatccaggccaagaaggaggtggagcagcggagagccggcggctacagccggaagtacgccagcaaagccaagaatctggcagacgatatggtgagaaacaccgctagagatctgctgtactacgccgtgacccaggatgccatgctgatcttcgccaacctgagccggggcttcggccggcagggcaagcggaccttcatggccgagagacagtacacacggatggaggactggctgaccgccaagctggcctacgagggcctgagcaagacctacctgtccaagacactggcccagtacacctccaagacatgcagcaactgtgggtttaccatcaccagcgccgactacgacagggtgctggagaagctgaagaagacagcaacaggctggatgaccacaattaacggcaaggagctgaaggtggagggccagattacctactacaacagatacaagagacagaacgtagtcaaggacctgtccgtcgagctggatagactgagcgaagaatctgtgaacaacgacatctcctcctggacaaagggcagaagcggagaagctctgagcctcctgaagaaaagattctcccatagacccgtgcaggagaagttcgtgtgcctgaactgcggcttcgagacacacgcagccgagcaagccgccctgaacatcgccagatcctggctgttcctgcggagccaggagtacaagaaataccagacaaacaagacaaccggcaacaccgataagagagccttcgtcgagacctggcagtccttttaccggaagaagcttaaggaggtgtggaaacctgccgtgcggtctggcggatctggcggaggctccaggcccagggccgtgaagttcgccgacgtggccgtgtacttcagcaccgaggagtggggctgcctgaggcccgcccagagggccctgtacagggacgtgatgagggagacctacggccacctgggcgccctgggctgcgccggccccaagcccgccctgatcagctggctggagaggaacaccgacgactgggagcccgccgccctggacccccaggagtgccccaggggcgtggccgtgcagggcggcccaagcagcggcgcccctcctcccagcggcggcagcccagccggctccccaacctctaccgaggagggcacctctgagtccgccacccccgagagcggccctggcacctccaccgagcccagcgagggcagcgcacccggcagccctgccggcagccccacctccacagaggagggaaccagcaccgagcccagcgaaggcagcgccccaggcaccagcaccgagcctagtgagcaggagattaaacggatcaacaagatcagaagaagacttgtgaaagacagcaacaccaagaaggccggcaagacaggccccatgaaaaccctgctggttagagtgatgacacccgatctgagagagcggctggaaaacctgagaaagaagcctgaaaatatcccccagcccatcagcaatacatctagagccaacctgaataagctgctgaccgattacaccgaaatgaagaaggcgatcctgcatgtgtactgggaagagttccagaaggaccctgtgggcctgatgagccgggtggcccagcctgccagcaagaagatcgatcagaacaagctgaaacctgagatggacgagaagggcaacctgaccaccgccggctttgcctgctctcagtgtggccagcccctgttcgtgtacaagctggagcaggtgtctgagaagggcaaggcttacaccaactacttcggacggtgcaatgtggccgagcacgaaaagctgatcctgctggcccagctgaagcccgagaaggatagcgacgaagccgtgacatatagcctgggaaagtttgggcagagggccctggatttctacagcattcatgtgaccaaggagtccacccaccccgtgaagcccctggcccagatcgccggaaacagatacgcctccggacctgtgggaaaggccctgagcgacgcatgtatgggcacaatcgcctccttcctgtctaagtaccaggacatcatcatcgaacaccagaaggtggtgaagggcaaccagaagagactggagagcctgcgggagctggccggcaaggaaaacctggaataccctagcgtgaccctgccacctcagcctcacaccaaggagggcgttgatgcctacaacgaagtgatcgcccgggtgcgaatgtgggtgaacctgaacctgtggcagaagctgaagctaagcagagatgatgccaagcctctgctgagactgaagggattcccttcctttcctctggtcgagagacaggccaacgaagtggactggtgggacatggtgtgtaacgtgaagaagctgatcaacgagaaaaaggaggatggcaaggtgttttggcagaatctggctggctacaagagacaggaagccctgagaccatacctgagcagcgaggaagatcggaagaagggaaagaaattcgctcggtaccagctgggcgacctgctgctgcacctggaaaagaagcacggcgaggactggggaaaggtgtacgacgaggcctgggagcggattgacaagaaagtggaaggcctgagcaagcacatcaagctggaagaggaacggagaagcgaggacgcccagagcaaggccgccctgaccgactggctgcgggctaaggccagcttcgtgatcgagggcctgaaggaggccgacaaggacgagttctgcagatgcgagctgaagctgcagaagtggtacggggacctgcggggaaagcccttcgccatcgaagccgagaacagcatcctggacatcagcggcttcagcaagcagtacaactgtgccttcatctggcagaaggacggcgtgaagaagctgaacctgtacctgatcatcaactacttcaagggcggcaagctgcggttcaagaagatcaaacctgaagccttcgaagccaacagattctacaccgtgatcaacaaaaagagcggcgagatcgtgcccatggaggtgaacttcaacttcgacgaccccaacctgatcatcctgcctctggcctttggcaagagacagggcagagaattcatctggaacgacctgctgtccctggaaaccggcagcctgaagctggccaacggaagagtgatcgagaagacactgtacaacagaagaacccggcaggatgagcctgccctgttcgtggccctgaccttcgagcggcgggaggtcctggactcctccaatatcaaaccaatgaacctgatcggcgtggcaagaggcgaaaacatccccgccgtgatcgccctgaccgaccccgagggctgcccactgagccggtttaaggatagcctgggaaacccaacccacatcctgagaatcggcgagagctataaggagaagcagcggaccatccaggccaagaaggaggtggagcagcggagagccggcggctacagccggaagtacgccagcaaagccaagaatctggcagacgatatggtgagaaacaccgctagagatctgctgtactacgccgtgacccaggatgccatgctgatcttcgccaacctgagccggggcttcggccggcagggcaagcggaccttcatggccgagagacagtacacacggatggaggactggctgaccgccaagctggcctacgagggcctgagcaagacctacctgtccaagacactggcccagtacacctccaagacatgcagcaactgtgggtttaccatcaccagcgccgactacgacagggtgctggagaagctgaagaagacagcaacaggctggatgaccacaattaacggcaaggagctgaaggtggagggccagattacctactacaacagatacaagagacagaacgtagtcaaggacctgtccgtcgagctggatagactgagcgaagaatctgtgaacaacgacatctcctcctggacaaagggcagaagcggagaagctctgagcctcctgaagaaaagattctcccatagacccgtgcaggagaagttcgtgtgcctgaactgcggcttcgagacacacgcagccgagcaagccgccctgaacatcgccagatcctggctgttcctgcggagccaggagtacaagaaataccagacaaacaagacaaccggcaacaccgataagagagccttcgtcgagacctggcagtccttttaccggaagaagcttaaggaggtgtggaaacctgccgtgcggtctggcggatctggcggaggctcctaggcccagggccgtgaagttcgccgacgtggccgtgtacttcagcaccgaggagtggggctgcctgaggcccgcccagagggccctgtacagggacgtgatgagggagacctacggccacctgggcgccctgggctgcgccggccccaagcccgccctgatcagctggctggagaggaacaccgacgactgggagcccgccgccctggacccccaggagtgccccaggggcgtggccgtgcagggatctggctccggcagcggccccaagaaaaagagaaaagtctaagctgccttctgcggggcttgccttctggccatgcccttcttctctcccttgcacctgtacctcttggtctttgaataaagcctgagtaggaaggctagcaaaaaaaaaaaaaaaaaaaaaaaaaaaaaaaaaaaaaaaaaaaaaaaaaaaaaaaaaaaaaaaaaaaaaaaaaaaaaaaa

SEQ ID NO: 16085 - RNA, 9485 nt, synthetic construct
  source 1..9485: mol_type = other RNA
aggaaataagagagaaaagaagagtaagaagaaatataagagccaccatggcccctaagaagaagcgtaaagtgagccggatggaacgcctcgtctacgaggtgcggcagaagtgcagaaacatcgaggacatctgcatctcctgcggatctctgaacgtgaccctggagcacccactgttcatcggcggcatgtgccagaactgtaaaaactgttttctggagtgtgcctatcaatacgacgatgacggctaccagagctactgcaccatctgttgcggcggaagagaggtgctgatgtgtggaaataacaactgctgccggtgcttctgcgtggaatgcgtggacctgctggtgggccccggcgccgcccaggccgctattaaggaagatccttggaactgctacatgtgcggccacaagggcacatacggcctgctgagacggagagaggactggcctagcagactgcagatgttcttcgccaataaccacgaccaggagttcgacccccctaaggtgtaccctcccgtccccgccgagaagagaaagcccatccgggtcctgagcctgttcgatggcatcgccaccggtctgctggtgctgaaggacctgggcatccaggtggataggtacattgcctccgaggtgtgcgaggactccatcaccgtgggaatggtgcgtcatcagggcaagatcatgtacgtgggcgacgtgcggagcgtgacacagaagcatatccaggagtggggccctttcgacctggtgatcggcggcagcccttgcaatgacctgagcatcgtgaacccagcccggaagggcctgtacgagggaaccggcagactgttcttcgagttttacagactgctgcacgacgcccggcctaaggaaggcgacgaccggcccttcttttggctgttcgagaatgtggtggccatgggagtcagcgacaagcgggatattagccggttcctggagagcaaccccgtgatgatcgatgccaaggaagtgagcgccgcccaccgggccagatacttctggggcaatctgcctggcatgaacagacccctggccagcaccgtgaacgacaagctggagctgcaggagtgcctggagcacggccggatcgccaagttcagcaaggtgagaaccatcaccacccgaagcaacagcatcaaacaaggcaaggaccagcactttcctgtgttcatgaacgagaaggaggacatcctgtggtgtaccgagatggagagagtgttcgggttcccagtccactacacagatgtcagcaacatgtctagactggccagacagagactgctgggaagaagctggtccgtccctgtgatcagacacctgttcgcccctctgaaggagtacttcgcctgcgtgagcagcggcaacagcaacgccaacagccggggccccagcttctctagcggcctggtgccactgtccctgagagggagccacatgggccccatggagatctacaaaaccgtgagcgcctggaagcggcagcctgtgcgcgtgctgagcctgtttcggaatatcgataaagtcctgaaaagcctgggattcctggagagcggctctggctccggcggtggcaccctgaagtacgtggaggatgtgacaaacgtggtcagacgggatgtggagaagtggggccccttcgatctggtgtacggcagcacccaacccctgggcagctcttgtgaccggtgccctggctggtacatgtttcagttccaccggatcctgcagtacgccctgccgagacaggagtcccagcggccattcttttggattttcatggacaacttgctgctgaccgaggatgaccaggaaactaccactcggttcctgcagaccgaagccgtgaccctgcaggacgtgagaggccgggactaccagaacgccatgcgggtgtggtccaacatccctggactgaaaagcaagcacgcacctctgacccctaaagaagaggagtacctgcaggcccaggtgcggagcagaagcaagctggacgcccctaaggtggatctgctggtgaagaattgcctcctgcccctgagagagtacttcaagtatttcagccagaatagtctgcccctgggaggcagcggcggcggcgccctggtgacatttgaggacgtcgccgtgcggttcacccaggaggaatgggctctgctggatccttctcagaaaatcctgtaccgggacgtgatgagagagacataccggaatctgacctccgtgggcatcaactgggaatgttgggaccttgaagcctgcttcagaagcctgggaagaaacctgagagtgcaggtggtgaagagaaagtgcgagctgaccaacagcggcccctgcgccgagggcggcccaagcagcggcgcccctcctcccagcggcggcagcccagccggctccccaacctctaccgaggagggcacctctgagtccgccacccccgagagcggccctggcacctccaccgagcccagcgagggcagcgcacccggcagccctgccggcagccccacctccacagaggagggaaccagcaccgagcccagcgaaggcagcgccccaggcaccagcaccgagcctagtgagcaggagattaaacggatcaacaagatcagaagaagacttgtgaaagacagcaacaccaagaaggccggcaagacaggccccatgaaaaccctgctggttagagtgatgacacccgatctgagagagcggctggaaaacctgagaaagaagcctgaaaatatcccccagcccatcagcaatacatctagagccaacctgaataagctgctgaccgattacaccgaaatgaagaaggcgatcctgcatgtgtactgggaagagttccagaaggaccctgtgggcctgatgagccgggtggcccagcctgccagcaagaagatcgatcagaacaagctgaaacctgagatggacgagaagggcaacctgaccaccgccggctttgcctgctctcagtgtggccagcccctgttcgtgtacaagctggagcaggtgtctgagaagggcaaggcttacaccaactacttcggacggtgcaatgtggccgagcacgaaaagctgatcctgctggcccagctgaagcccgagaaggatagcgacgaagccgtgacatatagcctgggaaagtttgggcagagggccctggatttctacagcattcatgtgaccaaggagtccacccaccccgtgaagcccctggcccagatcgccggaaacagatacgcctccggacctgtgggaaaggccctgagcgacgcatgtatgggcacaatcgcctccttcctgtctaagtaccaggacatcatcatcgaacaccagaaggtggtgaagggcaaccagaagagactggagagcctgcgggagctggccggcaaggaaaacctggaataccctagcgtgaccctgccacctcagcctcacaccaaggagggcgttgatgcctacaacgaagtgatcgcccgggtgcgaatgtgggtgaacctgaacctgtggcagaagctgaagctaagcagagatgatgccaagcctctgctgagactgaagggattcccttcctttcctctggtcgagagacaggccaacgaagtggactggtgggacatggtgtgtaacgtgaagaagctgatcaacgagaaaaaggaggatggcaaggtgttttggcagaatctggctggctacaagagacaggaagccctgagaccatacctgagcagcgaggaagatcggaagaagggaaagaaattcgctcggtaccagctgggcgacctgctgctgcacctggaaaagaagcacggcgaggactggggaaaggtgtacgacgaggcctgggagcggattgacaagaaagtggaaggcctgagcaagcacatcaagctggaagaggaacggagaagcgaggacgcccagagcaaggccgccctgaccgactggctgcgggctaaggccagcttcgtgatcgagggcctgaaggaggccgacaaggacgagttctgcagatgcgagctgaagctgcagaagtggtacggggacctgcggggaaagcccttcgccatcgaagccgagaacagcatcctggacatcagcggcttcagcaagcagtacaactgtgccttcatctggcagaaggacggcgtgaagaagctgaacctgtacctgatcatcaactacttcaagggcggcaagctgcggttcaagaagatcaaacctgaagccttcgaagccaacagattctacaccgtgatcaacaaaaagagcggcgagatcgtgcccatggaggtgaacttcaacttcgacgaccccaacctgatcatcctgcctctggcctttggcaagagacagggcagagaattcatctggaacgacctgctgtccctggaaaccggcagcctgaagctggccaacggaagagtgatcgagaagacactgtacaacagaagaacccggcaggatgagcctgccctgttcgtggccctgaccttcgagcggcgggaggtcctggactcctccaatatcaaaccaatgaacctgatcggcgtggcaagaggcgaaaacatccccgccgtgatcgccctgaccgaccccgagggctgcccactgagccggtttaaggatagcctgggaaacccaacccacatcctgagaatcggcgagagctataaggagaagcagcggaccatccaggccaagaaggaggtggagcagcggagagccggcggctacagccggaagtacgccagcaaagccaagaatctggcagacgatatggtgagaaacaccgctagagatctgctgtactacgccgtgacccaggatgccatgctgatcttcgccaacctgagccggggcttcggccggcagggcaagcggaccttcatggccgagagacagtacacacggatggaggactggctgaccgccaagctggcctacgagggcctgagcaagacctacctgtccaagacactggcccagtacacctccaagacatgcagcaactgtgggtttaccatcaccagcgccgactacgacagggtgctggagaagctgaagaagacagcaacaggctggatgaccacaattaacggcaaggagctgaaggtggagggccagattacctactacaacagatacaagagacagaacgtagtcaaggacctgtccgtcgagctggatagactgagcgaagaatctgtgaacaacgacatctcctcctggacaaagggcagaagcggagaagctctgagcctcctgaagaaaagattctcccatagacccgtgcaggagaagttcgtgtgcctgaactgcggcttcgagacacacgcagccgagcaagccgccctgaacatcgccagatcctggctgttcctgcggagccaggagtacaagaaataccagacaaacaagacaaccggcaacaccgataagagagccttcgtcgagacctggcagtccttttaccggaagaagcttaaggaggtgtggaaacctgccgtgcggtctggcggatctggcggaggctccggccaggagagcgtgagcttcaaggacgtgaccgtggacttcacctgggacgagtggctgcagctgaccggcatgcagaggaccctgtacagggacgtgatgctggagaactacagccacctggtgagcgtgggctgctgcatcaccaagcccgaggtgatcttcaagctggagcagggcgaggagccctggcccagggagggcgagctgcccggcaggagggaccccgacaggagccaggagggcggcccaagcagcggcgcccctcctcccagcggcggcagcccagccggctccccaacctctaccgaggagggcacctctgagtccgccacccccgagagcggccctggcacctccaccgagcccagcgagggcagcgcacccggcagccctgccggcagccccacctccacagaggagggaaccagcaccgagcccagcgaaggcagcgccccaggcaccagcaccgagcctagtgagcaggagattaaacggatcaacaagatcagaagaagacttgtgaaagacagcaacaccaagaaggccggcaagacaggccccatgaaaaccctgctggttagagtgatgacacccgatctgagagagcggctggaaaacctgagaaagaagcctgaaaatatcccccagcccatcagcaatacatctagagccaacctgaataagctgctgaccgattacaccgaaatgaagaaggcgatcctgcatgtgtactgggaagagttccagaaggaccctgtgggcctgatgagccgggtggcccagcctgccagcaagaagatcgatcagaacaagctgaaacctgagatggacgagaagggcaacctgaccaccgccggctttgcctgctctcagtgtggccagcccctgttcgtgtacaagctggagcaggtgtctgagaagggcaaggcttacaccaactacttcggacggtgcaatgtggccgagcacgaaaagctgatcctgctggcccagctgaagcccgagaaggatagcgacgaagccgtgacatatagcctgggaaagtttgggcagagggccctggatttctacagcattcatgtgaccaaggagtccacccaccccgtgaagcccctggcccagatcgccggaaacagatacgcctccggacctgtgggaaaggccctgagcgacgcatgtatgggcacaatcgcctccttcctgtctaagtaccaggacatcatcatcgaacaccagaaggtggtgaagggcaaccagaagagactggagagcctgcgggagctggccggcaaggaaaacctggaataccctagcgtgaccctgccacctcagcctcacaccaaggagggcgttgatgcctacaacgaagtgatcgcccgggtgcgaatgtgggtgaacctgaacctgtggcagaagctgaagctaagcagagatgatgccaagcctctgctgagactgaagggattcccttcctttcctctggtcgagagacaggccaacgaagtggactggtgggacatggtgtgtaacgtgaagaagctgatcaacgagaaaaaggaggatggcaaggtgttttggcagaatctggctggctacaagagacaggaagccctgagaccatacctgagcagcgaggaagatcggaagaagggaaagaaattcgctcggtaccagctgggcgacctgctgctgcacctggaaaagaagcacggcgaggactggggaaaggtgtacgacgaggcctgggagcggattgacaagaaagtggaaggcctgagcaagcacatcaagctggaagaggaacggagaagcgaggacgcccagagcaaggccgccctgaccgactggctgcgggctaaggccagcttcgtgatcgagggcctgaaggaggccgacaaggacgagttctgcagatgcgagctgaagctgcagaagtggtacggggacctgcggggaaagcccttcgccatcgaagccgagaacagcatcctggacatcagcggcttcagcaagcagtacaactgtgccttcatctggcagaaggacggcgtgaagaagctgaacctgtacctgatcatcaactacttcaagggcggcaagctgcggttcaagaagatcaaacctgaagccttcgaagccaacagattctacaccgtgatcaacaaaaagagcggcgagatcgtgcccatggaggtgaacttcaacttcgacgaccccaacctgatcatcctgcctctggcctttggcaagagacagggcagagaattcatctggaacgacctgctgtccctggaaaccggcagcctgaagctggccaacggaagagtgatcgagaagacactgtacaacagaagaacccggcaggatgagcctgccctgttcgtggccctgaccttcgagcggcgggaggtcctggactcctccaatatcaaaccaatgaacctgatcggcgtggcaagaggcgaaaacatccccgccgtgatcgccctgaccgaccccgagggctgcccactgagccggtttaaggatagcctgggaaacccaacccacatcctgagaatcggcgagagctataaggagaagcagcggaccatccaggccaagaaggaggtggagcagcggagagccggcggctacagccggaagtacgccagcaaagccaagaatctggcagacgatatggtgagaaacaccgctagagatctgctgtactacgccgtgacccaggatgccatgctgatcttcgccaacctgagccggggcttcggccggcagggcaagcggaccttcatggccgagagacagtacacacggatggaggactggctgaccgccaagctggcctacgagggcctgagcaagacctacctgtccaagacactggcccagtacacctccaagacatgcagcaactgtgggtttaccatcaccagcgccgactacgacagggtgctggagaagctgaagaagacagcaacaggctggatgaccacaattaacggcaaggagctgaaggtggagggccagattacctactacaacagatacaagagacagaacgtagtcaaggacctgtccgtcgagctggatagactgagcgaagaatctgtgaacaacgacatctcctcctggacaaagggcagaagcggagaagctctgagcctcctgaagaaaagattctcccatagacccgtgcaggagaagttcgtgtgcctgaactgcggcttcgagacacacgcagccgagcaagccgccctgaacatcgccagatcctggctgttcctgcggagccaggagtacaagaaataccagacaaacaagacaaccggcaacaccgataagagagccttcgtcgagacctggcagtccttttaccggaagaagcttaaggaggtgtggaaacctgccgtgcggtctggcggatctggcggaggctcctggccaggagagcgtgagcttcaaggacgtgaccgtggacttcacctgggacgagtggctgcagctgaccggcatgcagaggaccctgtacagggacgtgatgctggagaactacagccacctggtgagcgtgggctgctgcatcaccaagcccgaggtgatcttcaagctggagcagggcgaggagccctggcccagggagggcgagctgcccggcaggagggaccccgacaggagccaggagggatctggctccggcagcggccccaagaaaaagagaaaagtctaagctgccttctgcggggcttgccttctggccatgcccttcttctctcccttgcacctgtacctcttggtctttgaataaagcctgagtaggaaggctagcaaaaaaaaaaaaaaaaaaaaaaaaaaaaaaaaaaaaaaaaaaaaaaaaaaaaaaaaaaaaaaaaaaaaaaaaaaaaaaaa

SEQ ID NO: 16086 - RNA, 9485 nt, synthetic construct
  source 1..9485: mol_type = other RNA
aggaaataagagagaaaagaagagtaagaagaaatataagagccaccatggcccctaagaagaagcgtaaagtgagccggatggaacgcctcgtctacgaggtgcggcagaagtgcagaaacatcgaggacatctgcatctcctgcggatctctgaacgtgaccctggagcacccactgttcatcggcggcatgtgccagaactgtaaaaactgttttctggagtgtgcctatcaatacgacgatgacggctaccagagctactgcaccatctgttgcggcggaagagaggtgctgatgtgtggaaataacaactgctgccggtgcttctgcgtggaatgcgtggacctgctggtgggccccggcgccgcccaggccgctattaaggaagatccttggaactgctacatgtgcggccacaagggcacatacggcctgctgagacggagagaggactggcctagcagactgcagatgttcttcgccaataaccacgaccaggagttcgacccccctaaggtgtaccctcccgtccccgccgagaagagaaagcccatccgggtcctgagcctgttcgatggcatcgccaccggtctgctggtgctgaaggacctgggcatccaggtggataggtacattgcctccgaggtgtgcgaggactccatcaccgtgggaatggtgcgtcatcagggcaagatcatgtacgtgggcgacgtgcggagcgtgacacagaagcatatccaggagtggggccctttcgacctggtgatcggcggcagcccttgcaatgacctgagcatcgtgaacccagcccggaagggcctgtacgagggaaccggcagactgttcttcgagttttacagactgctgcacgacgcccggcctaaggaaggcgacgaccggcccttcttttggctgttcgagaatgtggtggccatgggagtcagcgacaagcgggatattagccggttcctggagagcaaccccgtgatgatcgatgccaaggaagtgagcgccgcccaccgggccagatacttctggggcaatctgcctggcatgaacagacccctggccagcaccgtgaacgacaagctggagctgcaggagtgcctggagcacggccggatcgccaagttcagcaaggtgagaaccatcaccacccgaagcaacagcatcaaacaaggcaaggaccagcactttcctgtgttcatgaacgagaaggaggacatcctgtggtgtaccgagatggagagagtgttcgggttcccagtccactacacagatgtcagcaacatgtctagactggccagacagagactgctgggaagaagctggtccgtccctgtgatcagacacctgttcgcccctctgaaggagtacttcgcctgcgtgagcagcggcaacagcaacgccaacagccggggccccagcttctctagcggcctggtgccactgtccctgagagggagccacatgggccccatggagatctacaaaaccgtgagcgcctggaagcggcagcctgtgcgcgtgctgagcctgtttcggaatatcgataaagtcctgaaaagcctgggattcctggagagcggctctggctccggcggtggcaccctgaagtacgtggaggatgtgacaaacgtggtcagacgggatgtggagaagtggggccccttcgatctggtgtacggcagcacccaacccctgggcagctcttgtgaccggtgccctggctggtacatgtttcagttccaccggatcctgcagtacgccctgccgagacaggagtcccagcggccattcttttggattttcatggacaacttgctgctgaccgaggatgaccaggaaactaccactcggttcctgcagaccgaagccgtgaccctgcaggacgtgagaggccgggactaccagaacgccatgcgggtgtggtccaacatccctggactgaaaagcaagcacgcacctctgacccctaaagaagaggagtacctgcaggcccaggtgcggagcagaagcaagctggacgcccctaaggtggatctgctggtgaagaattgcctcctgcccctgagagagtacttcaagtatttcagccagaatagtctgcccctgggaggcagcggcggcggcgccctggtgacatttgaggacgtcgccgtgcggttcacccaggaggaatgggctctgctggatccttctcagaaaatcctgtaccgggacgtgatgagagagacataccggaatctgacctccgtgggcatcaactgggaatgttgggaccttgaagcctgcttcagaagcctgggaagaaacctgagagtgcaggtggtgaagagaaagtgcgagctgaccaacagcggcccctgcgccgagggcggcccaagcagcggcgcccctcctcccagcggcggcagcccagccggctccccaacctctaccgaggagggcacctctgagtccgccacccccgagagcggccctggcacctccaccgagcccagcgagggcagcgcacccggcagccctgccggcagccccacctccacagaggagggaaccagcaccgagcccagcgaaggcagcgccccaggcaccagcaccgagcctagtgagcaggagattaaacggatcaacaagatcagaagaagacttgtgaaagacagcaacaccaagaaggccggcaagacaggccccatgaaaaccctgctggttagagtgatgacacccgatctgagagagcggctggaaaacctgagaaagaagcctgaaaatatcccccagcccatcagcaatacatctagagccaacctgaataagctgctgaccgattacaccgaaatgaagaaggcgatcctgcatgtgtactgggaagagttccagaaggaccctgtgggcctgatgagccgggtggcccagcctgccagcaagaagatcgatcagaacaagctgaaacctgagatggacgagaagggcaacctgaccaccgccggctttgcctgctctcagtgtggccagcccctgttcgtgtacaagctggagcaggtgtctgagaagggcaaggcttacaccaactacttcggacggtgcaatgtggccgagcacgaaaagctgatcctgctggcccagctgaagcccgagaaggatagcgacgaagccgtgacatatagcctgggaaagtttgggcagagggccctggatttctacagcattcatgtgaccaaggagtccacccaccccgtgaagcccctggcccagatcgccggaaacagatacgcctccggacctgtgggaaaggccctgagcgacgcatgtatgggcacaatcgcctccttcctgtctaagtaccaggacatcatcatcgaacaccagaaggtggtgaagggcaaccagaagagactggagagcctgcgggagctggccggcaaggaaaacctggaataccctagcgtgaccctgccacctcagcctcacaccaaggagggcgttgatgcctacaacgaagtgatcgcccgggtgcgaatgtgggtgaacctgaacctgtggcagaagctgaagctaagcagagatgatgccaagcctctgctgagactgaagggattcccttcctttcctctggtcgagagacaggccaacgaagtggactggtgggacatggtgtgtaacgtgaagaagctgatcaacgagaaaaaggaggatggcaaggtgttttggcagaatctggctggctacaagagacaggaagccctgagaccatacctgagcagcgaggaagatcggaagaagggaaagaaattcgctcggtaccagctgggcgacctgctgctgcacctggaaaagaagcacggcgaggactggggaaaggtgtacgacgaggcctgggagcggattgacaagaaagtggaaggcctgagcaagcacatcaagctggaagaggaacggagaagcgaggacgcccagagcaaggccgccctgaccgactggctgcgggctaaggccagcttcgtgatcgagggcctgaaggaggccgacaaggacgagttctgcagatgcgagctgaagctgcagaagtggtacggggacctgcggggaaagcccttcgccatcgaagccgagaacagcatcctggacatcagcggcttcagcaagcagtacaactgtgccttcatctggcagaaggacggcgtgaagaagctgaacctgtacctgatcatcaactacttcaagggcggcaagctgcggttcaagaagatcaaacctgaagccttcgaagccaacagattctacaccgtgatcaacaaaaagagcggcgagatcgtgcccatggaggtgaacttcaacttcgacgaccccaacctgatcatcctgcctctggcctttggcaagagacagggcagagaattcatctggaacgacctgctgtccctggaaaccggcagcctgaagctggccaacggaagagtgatcgagaagacactgtacaacagaagaacccggcaggatgagcctgccctgttcgtggccctgaccttcgagcggcgggaggtcctggactcctccaatatcaaaccaatgaacctgatcggcgtggcaagaggcgaaaacatccccgccgtgatcgccctgaccgaccccgagggctgcccactgagccggtttaaggatagcctgggaaacccaacccacatcctgagaatcggcgagagctataaggagaagcagcggaccatccaggccaagaaggaggtggagcagcggagagccggcggctacagccggaagtacgccagcaaagccaagaatctggcagacgatatggtgagaaacaccgctagagatctgctgtactacgccgtgacccaggatgccatgctgatcttcgccaacctgagccggggcttcggccggcagggcaagcggaccttcatggccgagagacagtacacacggatggaggactggctgaccgccaagctggcctacgagggcctgagcaagacctacctgtccaagacactggcccagtacacctccaagacatgcagcaactgtgggtttaccatcaccagcgccgactacgacagggtgctggagaagctgaagaagacagcaacaggctggatgaccacaattaacggcaaggagctgaaggtggagggccagattacctactacaacagatacaagagacagaacgtagtcaaggacctgtccgtcgagctggatagactgagcgaagaatctgtgaacaacgacatctcctcctggacaaagggcagaagcggagaagctctgagcctcctgaagaaaagattctcccatagacccgtgcaggagaagttcgtgtgcctgaactgcggcttcgagacacacgcagccgagcaagccgccctgaacatcgccagatcctggctgttcctgcggagccaggagtacaagaaataccagacaaacaagacaaccggcaacaccgataagagagccttcgtcgagacctggcagtccttttaccggaagaagcttaaggaggtgtggaaacctgccgtgcggtctggcggatctggcggaggctcccaggacgccgtgaccttcaaggacgtggccatctacttcagccccgaggagtgggtgaggctgagcgccggccagagggagctgtaccaggaggtgatgctggacaactacgagctggtgaccagcctggacagggagtgcaagctgctgtacaagatggaccccgaggaggagccctgcgagggcgtgccctgcaggggcgtggacagcggcgccctggacaacagcagcaccagcgcctgcggcggcccaagcagcggcgcccctcctcccagcggcggcagcccagccggctccccaacctctaccgaggagggcacctctgagtccgccacccccgagagcggccctggcacctccaccgagcccagcgagggcagcgcacccggcagccctgccggcagccccacctccacagaggagggaaccagcaccgagcccagcgaaggcagcgccccaggcaccagcaccgagcctagtgagcaggagattaaacggatcaacaagatcagaagaagacttgtgaaagacagcaacaccaagaaggccggcaagacaggccccatgaaaaccctgctggttagagtgatgacacccgatctgagagagcggctggaaaacctgagaaagaagcctgaaaatatcccccagcccatcagcaatacatctagagccaacctgaataagctgctgaccgattacaccgaaatgaagaaggcgatcctgcatgtgtactgggaagagttccagaaggaccctgtgggcctgatgagccgggtggcccagcctgccagcaagaagatcgatcagaacaagctgaaacctgagatggacgagaagggcaacctgaccaccgccggctttgcctgctctcagtgtggccagcccctgttcgtgtacaagctggagcaggtgtctgagaagggcaaggcttacaccaactacttcggacggtgcaatgtggccgagcacgaaaagctgatcctgctggcccagctgaagcccgagaaggatagcgacgaagccgtgacatatagcctgggaaagtttgggcagagggccctggatttctacagcattcatgtgaccaaggagtccacccaccccgtgaagcccctggcccagatcgccggaaacagatacgcctccggacctgtgggaaaggccctgagcgacgcatgtatgggcacaatcgcctccttcctgtctaagtaccaggacatcatcatcgaacaccagaaggtggtgaagggcaaccagaagagactggagagcctgcgggagctggccggcaaggaaaacctggaataccctagcgtgaccctgccacctcagcctcacaccaaggagggcgttgatgcctacaacgaagtgatcgcccgggtgcgaatgtgggtgaacctgaacctgtggcagaagctgaagctaagcagagatgatgccaagcctctgctgagactgaagggattcccttcctttcctctggtcgagagacaggccaacgaagtggactggtgggacatggtgtgtaacgtgaagaagctgatcaacgagaaaaaggaggatggcaaggtgttttggcagaatctggctggctacaagagacaggaagccctgagaccatacctgagcagcgaggaagatcggaagaagggaaagaaattcgctcggtaccagctgggcgacctgctgctgcacctggaaaagaagcacggcgaggactggggaaaggtgtacgacgaggcctgggagcggattgacaagaaagtggaaggcctgagcaagcacatcaagctggaagaggaacggagaagcgaggacgcccagagcaaggccgccctgaccgactggctgcgggctaaggccagcttcgtgatcgagggcctgaaggaggccgacaaggacgagttctgcagatgcgagctgaagctgcagaagtggtacggggacctgcggggaaagcccttcgccatcgaagccgagaacagcatcctggacatcagcggcttcagcaagcagtacaactgtgccttcatctggcagaaggacggcgtgaagaagctgaacctgtacctgatcatcaactacttcaagggcggcaagctgcggttcaagaagatcaaacctgaagccttcgaagccaacagattctacaccgtgatcaacaaaaagagcggcgagatcgtgcccatggaggtgaacttcaacttcgacgaccccaacctgatcatcctgcctctggcctttggcaagagacagggcagagaattcatctggaacgacctgctgtccctggaaaccggcagcctgaagctggccaacggaagagtgatcgagaagacactgtacaacagaagaacccggcaggatgagcctgccctgttcgtggccctgaccttcgagcggcgggaggtcctggactcctccaatatcaaaccaatgaacctgatcggcgtggcaagaggcgaaaacatccccgccgtgatcgccctgaccgaccccgagggctgcccactgagccggtttaaggatagcctgggaaacccaacccacatcctgagaatcggcgagagctataaggagaagcagcggaccatccaggccaagaaggaggtggagcagcggagagccggcggctacagccggaagtacgccagcaaagccaagaatctggcagacgatatggtgagaaacaccgctagagatctgctgtactacgccgtgacccaggatgccatgctgatcttcgccaacctgagccggggcttcggccggcagggcaagcggaccttcatggccgagagacagtacacacggatggaggactggctgaccgccaagctggcctacgagggcctgagcaagacctacctgtccaagacactggcccagtacacctccaagacatgcagcaactgtgggtttaccatcaccagcgccgactacgacagggtgctggagaagctgaagaagacagcaacaggctggatgaccacaattaacggcaaggagctgaaggtggagggccagattacctactacaacagatacaagagacagaacgtagtcaaggacctgtccgtcgagctggatagactgagcgaagaatctgtgaacaacgacatctcctcctggacaaagggcagaagcggagaagctctgagcctcctgaagaaaagattctcccatagacccgtgcaggagaagttcgtgtgcctgaactgcggcttcgagacacacgcagccgagcaagccgccctgaacatcgccagatcctggctgttcctgcggagccaggagtacaagaaataccagacaaacaagacaaccggcaacaccgataagagagccttcgtcgagacctggcagtccttttaccggaagaagcttaaggaggtgtggaaacctgccgtgcggtctggcggatctggcggaggctcctcaggacgccgtgaccttcaaggacgtggccatctacttcagccccgaggagtgggtgaggctgagcgccggccagagggagctgtaccaggaggtgatgctggacaactacgagctggtgaccagcctggacagggagtgcaagctgctgtacaagatggaccccgaggaggagccctgcgagggcgtgccctgcaggggcgtggacagcggcgccctggacaacagcagcaccagcgcctgcggatctggctccggcagcggccccaagaaaaagagaaaagtctaagctgccttctgcggggcttgccttctggccatgcccttcttctctcccttgcacctgtacctcttggtctttgaataaagcctgagtaggaaggctagcaaaaaaaaaaaaaaaaaaaaaaaaaaaaaaaaaaaaaaaaaaaaaaaaaaaaaaaaaaaaaaaaaaaaaaaaaaaaaaaa

SEQ ID NO: 16087 - RNA, 9485 nt, synthetic construct
  source 1..9485: mol_type = other RNA
aggaaataagagagaaaagaagagtaagaagaaatataagagccaccatggcccctaagaagaagcgtaaagtgagccggatggaacgcctcgtctacgaggtgcggcagaagtgcagaaacatcgaggacatctgcatctcctgcggatctctgaacgtgaccctggagcacccactgttcatcggcggcatgtgccagaactgtaaaaactgttttctggagtgtgcctatcaatacgacgatgacggctaccagagctactgcaccatctgttgcggcggaagagaggtgctgatgtgtggaaataacaactgctgccggtgcttctgcgtggaatgcgtggacctgctggtgggccccggcgccgcccaggccgctattaaggaagatccttggaactgctacatgtgcggccacaagggcacatacggcctgctgagacggagagaggactggcctagcagactgcagatgttcttcgccaataaccacgaccaggagttcgacccccctaaggtgtaccctcccgtccccgccgagaagagaaagcccatccgggtcctgagcctgttcgatggcatcgccaccggtctgctggtgctgaaggacctgggcatccaggtggataggtacattgcctccgaggtgtgcgaggactccatcaccgtgggaatggtgcgtcatcagggcaagatcatgtacgtgggcgacgtgcggagcgtgacacagaagcatatccaggagtggggccctttcgacctggtgatcggcggcagcccttgcaatgacctgagcatcgtgaacccagcccggaagggcctgtacgagggaaccggcagactgttcttcgagttttacagactgctgcacgacgcccggcctaaggaaggcgacgaccggcccttcttttggctgttcgagaatgtggtggccatgggagtcagcgacaagcgggatattagccggttcctggagagcaaccccgtgatgatcgatgccaaggaagtgagcgccgcccaccgggccagatacttctggggcaatctgcctggcatgaacagacccctggccagcaccgtgaacgacaagctggagctgcaggagtgcctggagcacggccggatcgccaagttcagcaaggtgagaaccatcaccacccgaagcaacagcatcaaacaaggcaaggaccagcactttcctgtgttcatgaacgagaaggaggacatcctgtggtgtaccgagatggagagagtgttcgggttcccagtccactacacagatgtcagcaacatgtctagactggccagacagagactgctgggaagaagctggtccgtccctgtgatcagacacctgttcgcccctctgaaggagtacttcgcctgcgtgagcagcggcaacagcaacgccaacagccggggccccagcttctctagcggcctggtgccactgtccctgagagggagccacatgggccccatggagatctacaaaaccgtgagcgcctggaagcggcagcctgtgcgcgtgctgagcctgtttcggaatatcgataaagtcctgaaaagcctgggattcctggagagcggctctggctccggcggtggcaccctgaagtacgtggaggatgtgacaaacgtggtcagacgggatgtggagaagtggggccccttcgatctggtgtacggcagcacccaacccctgggcagctcttgtgaccggtgccctggctggtacatgtttcagttccaccggatcctgcagtacgccctgccgagacaggagtcccagcggccattcttttggattttcatggacaacttgctgctgaccgaggatgaccaggaaactaccactcggttcctgcagaccgaagccgtgaccctgcaggacgtgagaggccgggactaccagaacgccatgcgggtgtggtccaacatccctggactgaaaagcaagcacgcacctctgacccctaaagaagaggagtacctgcaggcccaggtgcggagcagaagcaagctggacgcccctaaggtggatctgctggtgaagaattgcctcctgcccctgagagagtacttcaagtatttcagccagaatagtctgcccctgggaggcagcggcggcggcgccctggtgacatttgaggacgtcgccgtgcggttcacccaggaggaatgggctctgctggatccttctcagaaaatcctgtaccgggacgtgatgagagagacataccggaatctgacctccgtgggcatcaactgggaatgttgggaccttgaagcctgcttcagaagcctgggaagaaacctgagagtgcaggtggtgaagagaaagtgcgagctgaccaacagcggcccctgcgccgagggcggcccaagcagcggcgcccctcctcccagcggcggcagcccagccggctccccaacctctaccgaggagggcacctctgagtccgccacccccgagagcggccctggcacctccaccgagcccagcgagggcagcgcacccggcagccctgccggcagccccacctccacagaggagggaaccagcaccgagcccagcgaaggcagcgccccaggcaccagcaccgagcctagtgagcaggagattaaacggatcaacaagatcagaagaagacttgtgaaagacagcaacaccaagaaggccggcaagacaggccccatgaaaaccctgctggttagagtgatgacacccgatctgagagagcggctggaaaacctgagaaagaagcctgaaaatatcccccagcccatcagcaatacatctagagccaacctgaataagctgctgaccgattacaccgaaatgaagaaggcgatcctgcatgtgtactgggaagagttccagaaggaccctgtgggcctgatgagccgggtggcccagcctgccagcaagaagatcgatcagaacaagctgaaacctgagatggacgagaagggcaacctgaccaccgccggctttgcctgctctcagtgtggccagcccctgttcgtgtacaagctggagcaggtgtctgagaagggcaaggcttacaccaactacttcggacggtgcaatgtggccgagcacgaaaagctgatcctgctggcccagctgaagcccgagaaggatagcgacgaagccgtgacatatagcctgggaaagtttgggcagagggccctggatttctacagcattcatgtgaccaaggagtccacccaccccgtgaagcccctggcccagatcgccggaaacagatacgcctccggacctgtgggaaaggccctgagcgacgcatgtatgggcacaatcgcctccttcctgtctaagtaccaggacatcatcatcgaacaccagaaggtggtgaagggcaaccagaagagactggagagcctgcgggagctggccggcaaggaaaacctggaataccctagcgtgaccctgccacctcagcctcacaccaaggagggcgttgatgcctacaacgaagtgatcgcccgggtgcgaatgtgggtgaacctgaacctgtggcagaagctgaagctaagcagagatgatgccaagcctctgctgagactgaagggattcccttcctttcctctggtcgagagacaggccaacgaagtggactggtgggacatggtgtgtaacgtgaagaagctgatcaacgagaaaaaggaggatggcaaggtgttttggcagaatctggctggctacaagagacaggaagccctgagaccatacctgagcagcgaggaagatcggaagaagggaaagaaattcgctcggtaccagctgggcgacctgctgctgcacctggaaaagaagcacggcgaggactggggaaaggtgtacgacgaggcctgggagcggattgacaagaaagtggaaggcctgagcaagcacatcaagctggaagaggaacggagaagcgaggacgcccagagcaaggccgccctgaccgactggctgcgggctaaggccagcttcgtgatcgagggcctgaaggaggccgacaaggacgagttctgcagatgcgagctgaagctgcagaagtggtacggggacctgcggggaaagcccttcgccatcgaagccgagaacagcatcctggacatcagcggcttcagcaagcagtacaactgtgccttcatctggcagaaggacggcgtgaagaagctgaacctgtacctgatcatcaactacttcaagggcggcaagctgcggttcaagaagatcaaacctgaagccttcgaagccaacagattctacaccgtgatcaacaaaaagagcggcgagatcgtgcccatggaggtgaacttcaacttcgacgaccccaacctgatcatcctgcctctggcctttggcaagagacagggcagagaattcatctggaacgacctgctgtccctggaaaccggcagcctgaagctggccaacggaagagtgatcgagaagacactgtacaacagaagaacccggcaggatgagcctgccctgttcgtggccctgaccttcgagcggcgggaggtcctggactcctccaatatcaaaccaatgaacctgatcggcgtggcaagaggcgaaaacatccccgccgtgatcgccctgaccgaccccgagggctgcccactgagccggtttaaggatagcctgggaaacccaacccacatcctgagaatcggcgagagctataaggagaagcagcggaccatccaggccaagaaggaggtggagcagcggagagccggcggctacagccggaagtacgccagcaaagccaagaatctggcagacgatatggtgagaaacaccgctagagatctgctgtactacgccgtgacccaggatgccatgctgatcttcgccaacctgagccggggcttcggccggcagggcaagcggaccttcatggccgagagacagtacacacggatggaggactggctgaccgccaagctggcctacgagggcctgagcaagacctacctgtccaagacactggcccagtacacctccaagacatgcagcaactgtgggtttaccatcaccagcgccgactacgacagggtgctggagaagctgaagaagacagcaacaggctggatgaccacaattaacggcaaggagctgaaggtggagggccagattacctactacaacagatacaagagacagaacgtagtcaaggacctgtccgtcgagctggatagactgagcgaagaatctgtgaacaacgacatctcctcctggacaaagggcagaagcggagaagctctgagcctcctgaagaaaagattctcccatagacccgtgcaggagaagttcgtgtgcctgaactgcggcttcgagacacacgcagccgagcaagccgccctgaacatcgccagatcctggctgttcctgcggagccaggagtacaagaaataccagacaaacaagacaaccggcaacaccgataagagagccttcgtcgagacctggcagtccttttaccggaagaagcttaaggaggtgtggaaacctgccgtgcggtctggcggatctggcggaggctccatggacagcgtggccttcgaggacgtggccgtgaacttcacccaggaggagtggagcctgctggaccccagccagaagaacctgtacagggaggtgatgcaggagaccctgaggaacctggccagcatcggcgagaagtggaaggaccagtacatcgaggaccagtacaagaaccccaggaacaacctgaggagcctgctgggcgagagggtggacgagaacaccgaggagaaccactgcggcggcggcccaagcagcggcgcccctcctcccagcggcggcagcccagccggctccccaacctctaccgaggagggcacctctgagtccgccacccccgagagcggccctggcacctccaccgagcccagcgagggcagcgcacccggcagccctgccggcagccccacctccacagaggagggaaccagcaccgagcccagcgaaggcagcgccccaggcaccagcaccgagcctagtgagcaggagattaaacggatcaacaagatcagaagaagacttgtgaaagacagcaacaccaagaaggccggcaagacaggccccatgaaaaccctgctggttagagtgatgacacccgatctgagagagcggctggaaaacctgagaaagaagcctgaaaatatcccccagcccatcagcaatacatctagagccaacctgaataagctgctgaccgattacaccgaaatgaagaaggcgatcctgcatgtgtactgggaagagttccagaaggaccctgtgggcctgatgagccgggtggcccagcctgccagcaagaagatcgatcagaacaagctgaaacctgagatggacgagaagggcaacctgaccaccgccggctttgcctgctctcagtgtggccagcccctgttcgtgtacaagctggagcaggtgtctgagaagggcaaggcttacaccaactacttcggacggtgcaatgtggccgagcacgaaaagctgatcctgctggcccagctgaagcccgagaaggatagcgacgaagccgtgacatatagcctgggaaagtttgggcagagggccctggatttctacagcattcatgtgaccaaggagtccacccaccccgtgaagcccctggcccagatcgccggaaacagatacgcctccggacctgtgggaaaggccctgagcgacgcatgtatgggcacaatcgcctccttcctgtctaagtaccaggacatcatcatcgaacaccagaaggtggtgaagggcaaccagaagagactggagagcctgcgggagctggccggcaaggaaaacctggaataccctagcgtgaccctgccacctcagcctcacaccaaggagggcgttgatgcctacaacgaagtgatcgcccgggtgcgaatgtgggtgaacctgaacctgtggcagaagctgaagctaagcagagatgatgccaagcctctgctgagactgaagggattcccttcctttcctctggtcgagagacaggccaacgaagtggactggtgggacatggtgtgtaacgtgaagaagctgatcaacgagaaaaaggaggatggcaaggtgttttggcagaatctggctggctacaagagacaggaagccctgagaccatacctgagcagcgaggaagatcggaagaagggaaagaaattcgctcggtaccagctgggcgacctgctgctgcacctggaaaagaagcacggcgaggactggggaaaggtgtacgacgaggcctgggagcggattgacaagaaagtggaaggcctgagcaagcacatcaagctggaagaggaacggagaagcgaggacgcccagagcaaggccgccctgaccgactggctgcgggctaaggccagcttcgtgatcgagggcctgaaggaggccgacaaggacgagttctgcagatgcgagctgaagctgcagaagtggtacggggacctgcggggaaagcccttcgccatcgaagccgagaacagcatcctggacatcagcggcttcagcaagcagtacaactgtgccttcatctggcagaaggacggcgtgaagaagctgaacctgtacctgatcatcaactacttcaagggcggcaagctgcggttcaagaagatcaaacctgaagccttcgaagccaacagattctacaccgtgatcaacaaaaagagcggcgagatcgtgcccatggaggtgaacttcaacttcgacgaccccaacctgatcatcctgcctctggcctttggcaagagacagggcagagaattcatctggaacgacctgctgtccctggaaaccggcagcctgaagctggccaacggaagagtgatcgagaagacactgtacaacagaagaacccggcaggatgagcctgccctgttcgtggccctgaccttcgagcggcgggaggtcctggactcctccaatatcaaaccaatgaacctgatcggcgtggcaagaggcgaaaacatccccgccgtgatcgccctgaccgaccccgagggctgcccactgagccggtttaaggatagcctgggaaacccaacccacatcctgagaatcggcgagagctataaggagaagcagcggaccatccaggccaagaaggaggtggagcagcggagagccggcggctacagccggaagtacgccagcaaagccaagaatctggcagacgatatggtgagaaacaccgctagagatctgctgtactacgccgtgacccaggatgccatgctgatcttcgccaacctgagccggggcttcggccggcagggcaagcggaccttcatggccgagagacagtacacacggatggaggactggctgaccgccaagctggcctacgagggcctgagcaagacctacctgtccaagacactggcccagtacacctccaagacatgcagcaactgtgggtttaccatcaccagcgccgactacgacagggtgctggagaagctgaagaagacagcaacaggctggatgaccacaattaacggcaaggagctgaaggtggagggccagattacctactacaacagatacaagagacagaacgtagtcaaggacctgtccgtcgagctggatagactgagcgaagaatctgtgaacaacgacatctcctcctggacaaagggcagaagcggagaagctctgagcctcctgaagaaaagattctcccatagacccgtgcaggagaagttcgtgtgcctgaactgcggcttcgagacacacgcagccgagcaagccgccctgaacatcgccagatcctggctgttcctgcggagccaggagtacaagaaataccagacaaacaagacaaccggcaacaccgataagagagccttcgtcgagacctggcagtccttttaccggaagaagcttaaggaggtgtggaaacctgccgtgcggtctggcggatctggcggaggctcctatggacagcgtggccttcgaggacgtggccgtgaacttcacccaggaggagtggagcctgctggaccccagccagaagaacctgtacagggaggtgatgcaggagaccctgaggaacctggccagcatcggcgagaagtggaaggaccagtacatcgaggaccagtacaagaaccccaggaacaacctgaggagcctgctgggcgagagggtggacgagaacaccgaggagaaccactgcggcggatctggctccggcagcggccccaagaaaaagagaaaagtctaagctgccttctgcggggcttgccttctggccatgcccttcttctctcccttgcacctgtacctcttggtctttgaataaagcctgagtaggaaggctagcaaaaaaaaaaaaaaaaaaaaaaaaaaaaaaaaaaaaaaaaaaaaaaaaaaaaaaaaaaaaaaaaaaaaaaaaaaaaaaaa

SEQ ID NO: 16088 - RNA, 9485 nt, synthetic construct
  source 1..9485: mol_type = other RNA
aggaaataagagagaaaagaagagtaagaagaaatataagagccaccatggcccctaagaagaagcgtaaagtgagccggatggaacgcctcgtctacgaggtgcggcagaagtgcagaaacatcgaggacatctgcatctcctgcggatctctgaacgtgaccctggagcacccactgttcatcggcggcatgtgccagaactgtaaaaactgttttctggagtgtgcctatcaatacgacgatgacggctaccagagctactgcaccatctgttgcggcggaagagaggtgctgatgtgtggaaataacaactgctgccggtgcttctgcgtggaatgcgtggacctgctggtgggccccggcgccgcccaggccgctattaaggaagatccttggaactgctacatgtgcggccacaagggcacatacggcctgctgagacggagagaggactggcctagcagactgcagatgttcttcgccaataaccacgaccaggagttcgacccccctaaggtgtaccctcccgtccccgccgagaagagaaagcccatccgggtcctgagcctgttcgatggcatcgccaccggtctgctggtgctgaaggacctgggcatccaggtggataggtacattgcctccgaggtgtgcgaggactccatcaccgtgggaatggtgcgtcatcagggcaagatcatgtacgtgggcgacgtgcggagcgtgacacagaagcatatccaggagtggggccctttcgacctggtgatcggcggcagcccttgcaatgacctgagcatcgtgaacccagcccggaagggcctgtacgagggaaccggcagactgttcttcgagttttacagactgctgcacgacgcccggcctaaggaaggcgacgaccggcccttcttttggctgttcgagaatgtggtggccatgggagtcagcgacaagcgggatattagccggttcctggagagcaaccccgtgatgatcgatgccaaggaagtgagcgccgcccaccgggccagatacttctggggcaatctgcctggcatgaacagacccctggccagcaccgtgaacgacaagctggagctgcaggagtgcctggagcacggccggatcgccaagttcagcaaggtgagaaccatcaccacccgaagcaacagcatcaaacaaggcaaggaccagcactttcctgtgttcatgaacgagaaggaggacatcctgtggtgtaccgagatggagagagtgttcgggttcccagtccactacacagatgtcagcaacatgtctagactggccagacagagactgctgggaagaagctggtccgtccctgtgatcagacacctgttcgcccctctgaaggagtacttcgcctgcgtgagcagcggcaacagcaacgccaacagccggggccccagcttctctagcggcctggtgccactgtccctgagagggagccacatgggccccatggagatctacaaaaccgtgagcgcctggaagcggcagcctgtgcgcgtgctgagcctgtttcggaatatcgataaagtcctgaaaagcctgggattcctggagagcggctctggctccggcggtggcaccctgaagtacgtggaggatgtgacaaacgtggtcagacgggatgtggagaagtggggccccttcgatctggtgtacggcagcacccaacccctgggcagctcttgtgaccggtgccctggctggtacatgtttcagttccaccggatcctgcagtacgccctgccgagacaggagtcccagcggccattcttttggattttcatggacaacttgctgctgaccgaggatgaccaggaaactaccactcggttcctgcagaccgaagccgtgaccctgcaggacgtgagaggccgggactaccagaacgccatgcgggtgtggtccaacatccctggactgaaaagcaagcacgcacctctgacccctaaagaagaggagtacctgcaggcccaggtgcggagcagaagcaagctggacgcccctaaggtggatctgctggtgaagaattgcctcctgcccctgagagagtacttcaagtatttcagccagaatagtctgcccctgggaggcagcggcggcggcgccctggtgacatttgaggacgtcgccgtgcggttcacccaggaggaatgggctctgctggatccttctcagaaaatcctgtaccgggacgtgatgagagagacataccggaatctgacctccgtgggcatcaactgggaatgttgggaccttgaagcctgcttcagaagcctgggaagaaacctgagagtgcaggtggtgaagagaaagtgcgagctgaccaacagcggcccctgcgccgagggcggcccaagcagcggcgcccctcctcccagcggcggcagcccagccggctccccaacctctaccgaggagggcacctctgagtccgccacccccgagagcggccctggcacctccaccgagcccagcgagggcagcgcacccggcagccctgccggcagccccacctccacagaggagggaaccagcaccgagcccagcgaaggcagcgccccaggcaccagcaccgagcctagtgagcaggagattaaacggatcaacaagatcagaagaagacttgtgaaagacagcaacaccaagaaggccggcaagacaggccccatgaaaaccctgctggttagagtgatgacacccgatctgagagagcggctggaaaacctgagaaagaagcctgaaaatatcccccagcccatcagcaatacatctagagccaacctgaataagctgctgaccgattacaccgaaatgaagaaggcgatcctgcatgtgtactgggaagagttccagaaggaccctgtgggcctgatgagccgggtggcccagcctgccagcaagaagatcgatcagaacaagctgaaacctgagatggacgagaagggcaacctgaccaccgccggctttgcctgctctcagtgtggccagcccctgttcgtgtacaagctggagcaggtgtctgagaagggcaaggcttacaccaactacttcggacggtgcaatgtggccgagcacgaaaagctgatcctgctggcccagctgaagcccgagaaggatagcgacgaagccgtgacatatagcctgggaaagtttgggcagagggccctggatttctacagcattcatgtgaccaaggagtccacccaccccgtgaagcccctggcccagatcgccggaaacagatacgcctccggacctgtgggaaaggccctgagcgacgcatgtatgggcacaatcgcctccttcctgtctaagtaccaggacatcatcatcgaacaccagaaggtggtgaagggcaaccagaagagactggagagcctgcgggagctggccggcaaggaaaacctggaataccctagcgtgaccctgccacctcagcctcacaccaaggagggcgttgatgcctacaacgaagtgatcgcccgggtgcgaatgtgggtgaacctgaacctgtggcagaagctgaagctaagcagagatgatgccaagcctctgctgagactgaagggattcccttcctttcctctggtcgagagacaggccaacgaagtggactggtgggacatggtgtgtaacgtgaagaagctgatcaacgagaaaaaggaggatggcaaggtgttttggcagaatctggctggctacaagagacaggaagccctgagaccatacctgagcagcgaggaagatcggaagaagggaaagaaattcgctcggtaccagctgggcgacctgctgctgcacctggaaaagaagcacggcgaggactggggaaaggtgtacgacgaggcctgggagcggattgacaagaaagtggaaggcctgagcaagcacatcaagctggaagaggaacggagaagcgaggacgcccagagcaaggccgccctgaccgactggctgcgggctaaggccagcttcgtgatcgagggcctgaaggaggccgacaaggacgagttctgcagatgcgagctgaagctgcagaagtggtacggggacctgcggggaaagcccttcgccatcgaagccgagaacagcatcctggacatcagcggcttcagcaagcagtacaactgtgccttcatctggcagaaggacggcgtgaagaagctgaacctgtacctgatcatcaactacttcaagggcggcaagctgcggttcaagaagatcaaacctgaagccttcgaagccaacagattctacaccgtgatcaacaaaaagagcggcgagatcgtgcccatggaggtgaacttcaacttcgacgaccccaacctgatcatcctgcctctggcctttggcaagagacagggcagagaattcatctggaacgacctgctgtccctggaaaccggcagcctgaagctggccaacggaagagtgatcgagaagacactgtacaacagaagaacccggcaggatgagcctgccctgttcgtggccctgaccttcgagcggcgggaggtcctggactcctccaatatcaaaccaatgaacctgatcggcgtggcaagaggcgaaaacatccccgccgtgatcgccctgaccgaccccgagggctgcccactgagccggtttaaggatagcctgggaaacccaacccacatcctgagaatcggcgagagctataaggagaagcagcggaccatccaggccaagaaggaggtggagcagcggagagccggcggctacagccggaagtacgccagcaaagccaagaatctggcagacgatatggtgagaaacaccgctagagatctgctgtactacgccgtgacccaggatgccatgctgatcttcgccaacctgagccggggcttcggccggcagggcaagcggaccttcatggccgagagacagtacacacggatggaggactggctgaccgccaagctggcctacgagggcctgagcaagacctacctgtccaagacactggcccagtacacctccaagacatgcagcaactgtgggtttaccatcaccagcgccgactacgacagggtgctggagaagctgaagaagacagcaacaggctggatgaccacaattaacggcaaggagctgaaggtggagggccagattacctactacaacagatacaagagacagaacgtagtcaaggacctgtccgtcgagctggatagactgagcgaagaatctgtgaacaacgacatctcctcctggacaaagggcagaagcggagaagctctgagcctcctgaagaaaagattctcccatagacccgtgcaggagaagttcgtgtgcctgaactgcggcttcgagacacacgcagccgagcaagccgccctgaacatcgccagatcctggctgttcctgcggagccaggagtacaagaaataccagacaaacaagacaaccggcaacaccgataagagagccttcgtcgagacctggcagtccttttaccggaagaagcttaaggaggtgtggaaacctgccgtgcggtctggcggatctggcggaggctcccaggcccaggaggtgctgatgttcgacgacgtggccgtgaggttcacctgggaggagtggcagctgctgaaccccgcccagaaggccctgtacagggacgtgatgctggagaactacaggagcctggtgagcgtgggctggagggccagcaagcccgacctgctgagccagctggagaggggcgagccctggaccatcgagggcgagaaccactgcggcaccccccccgagatctggaaggccggcggcccaagcagcggcgcccctcctcccagcggcggcagcccagccggctccccaacctctaccgaggagggcacctctgagtccgccacccccgagagcggccctggcacctccaccgagcccagcgagggcagcgcacccggcagccctgccggcagccccacctccacagaggagggaaccagcaccgagcccagcgaaggcagcgccccaggcaccagcaccgagcctagtgagcaggagattaaacggatcaacaagatcagaagaagacttgtgaaagacagcaacaccaagaaggccggcaagacaggccccatgaaaaccctgctggttagagtgatgacacccgatctgagagagcggctggaaaacctgagaaagaagcctgaaaatatcccccagcccatcagcaatacatctagagccaacctgaataagctgctgaccgattacaccgaaatgaagaaggcgatcctgcatgtgtactgggaagagttccagaaggaccctgtgggcctgatgagccgggtggcccagcctgccagcaagaagatcgatcagaacaagctgaaacctgagatggacgagaagggcaacctgaccaccgccggctttgcctgctctcagtgtggccagcccctgttcgtgtacaagctggagcaggtgtctgagaagggcaaggcttacaccaactacttcggacggtgcaatgtggccgagcacgaaaagctgatcctgctggcccagctgaagcccgagaaggatagcgacgaagccgtgacatatagcctgggaaagtttgggcagagggccctggatttctacagcattcatgtgaccaaggagtccacccaccccgtgaagcccctggcccagatcgccggaaacagatacgcctccggacctgtgggaaaggccctgagcgacgcatgtatgggcacaatcgcctccttcctgtctaagtaccaggacatcatcatcgaacaccagaaggtggtgaagggcaaccagaagagactggagagcctgcgggagctggccggcaaggaaaacctggaataccctagcgtgaccctgccacctcagcctcacaccaaggagggcgttgatgcctacaacgaagtgatcgcccgggtgcgaatgtgggtgaacctgaacctgtggcagaagctgaagctaagcagagatgatgccaagcctctgctgagactgaagggattcccttcctttcctctggtcgagagacaggccaacgaagtggactggtgggacatggtgtgtaacgtgaagaagctgatcaacgagaaaaaggaggatggcaaggtgttttggcagaatctggctggctacaagagacaggaagccctgagaccatacctgagcagcgaggaagatcggaagaagggaaagaaattcgctcggtaccagctgggcgacctgctgctgcacctggaaaagaagcacggcgaggactggggaaaggtgtacgacgaggcctgggagcggattgacaagaaagtggaaggcctgagcaagcacatcaagctggaagaggaacggagaagcgaggacgcccagagcaaggccgccctgaccgactggctgcgggctaaggccagcttcgtgatcgagggcctgaaggaggccgacaaggacgagttctgcagatgcgagctgaagctgcagaagtggtacggggacctgcggggaaagcccttcgccatcgaagccgagaacagcatcctggacatcagcggcttcagcaagcagtacaactgtgccttcatctggcagaaggacggcgtgaagaagctgaacctgtacctgatcatcaactacttcaagggcggcaagctgcggttcaagaagatcaaacctgaagccttcgaagccaacagattctacaccgtgatcaacaaaaagagcggcgagatcgtgcccatggaggtgaacttcaacttcgacgaccccaacctgatcatcctgcctctggcctttggcaagagacagggcagagaattcatctggaacgacctgctgtccctggaaaccggcagcctgaagctggccaacggaagagtgatcgagaagacactgtacaacagaagaacccggcaggatgagcctgccctgttcgtggccctgaccttcgagcggcgggaggtcctggactcctccaatatcaaaccaatgaacctgatcggcgtggcaagaggcgaaaacatccccgccgtgatcgccctgaccgaccccgagggctgcccactgagccggtttaaggatagcctgggaaacccaacccacatcctgagaatcggcgagagctataaggagaagcagcggaccatccaggccaagaaggaggtggagcagcggagagccggcggctacagccggaagtacgccagcaaagccaagaatctggcagacgatatggtgagaaacaccgctagagatctgctgtactacgccgtgacccaggatgccatgctgatcttcgccaacctgagccggggcttcggccggcagggcaagcggaccttcatggccgagagacagtacacacggatggaggactggctgaccgccaagctggcctacgagggcctgagcaagacctacctgtccaagacactggcccagtacacctccaagacatgcagcaactgtgggtttaccatcaccagcgccgactacgacagggtgctggagaagctgaagaagacagcaacaggctggatgaccacaattaacggcaaggagctgaaggtggagggccagattacctactacaacagatacaagagacagaacgtagtcaaggacctgtccgtcgagctggatagactgagcgaagaatctgtgaacaacgacatctcctcctggacaaagggcagaagcggagaagctctgagcctcctgaagaaaagattctcccatagacccgtgcaggagaagttcgtgtgcctgaactgcggcttcgagacacacgcagccgagcaagccgccctgaacatcgccagatcctggctgttcctgcggagccaggagtacaagaaataccagacaaacaagacaaccggcaacaccgataagagagccttcgtcgagacctggcagtccttttaccggaagaagcttaaggaggtgtggaaacctgccgtgcggtctggcggatctggcggaggctcctcaggcccaggaggtgctgatgttcgacgacgtggccgtgaggttcacctgggaggagtggcagctgctgaaccccgcccagaaggccctgtacagggacgtgatgctggagaactacaggagcctggtgagcgtgggctggagggccagcaagcccgacctgctgagccagctggagaggggcgagccctggaccatcgagggcgagaaccactgcggcaccccccccgagatctggaaggccggatctggctccggcagcggccccaagaaaaagagaaaagtctaagctgccttctgcggggcttgccttctggccatgcccttcttctctcccttgcacctgtacctcttggtctttgaataaagcctgagtaggaaggctagcaaaaaaaaaaaaaaaaaaaaaaaaaaaaaaaaaaaaaaaaaaaaaaaaaaaaaaaaaaaaaaaaaaaaaaaaaaaaaaaa

SEQ ID NO: 16089 - RNA, 9485 nt, synthetic construct
  source 1..9485: mol_type = other RNA
aggaaataagagagaaaagaagagtaagaagaaatataagagccaccatggcccctaagaagaagcgtaaagtgagccggatggaacgcctcgtctacgaggtgcggcagaagtgcagaaacatcgaggacatctgcatctcctgcggatctctgaacgtgaccctggagcacccactgttcatcggcggcatgtgccagaactgtaaaaactgttttctggagtgtgcctatcaatacgacgatgacggctaccagagctactgcaccatctgttgcggcggaagagaggtgctgatgtgtggaaataacaactgctgccggtgcttctgcgtggaatgcgtggacctgctggtgggccccggcgccgcccaggccgctattaaggaagatccttggaactgctacatgtgcggccacaagggcacatacggcctgctgagacggagagaggactggcctagcagactgcagatgttcttcgccaataaccacgaccaggagttcgacccccctaaggtgtaccctcccgtccccgccgagaagagaaagcccatccgggtcctgagcctgttcgatggcatcgccaccggtctgctggtgctgaaggacctgggcatccaggtggataggtacattgcctccgaggtgtgcgaggactccatcaccgtgggaatggtgcgtcatcagggcaagatcatgtacgtgggcgacgtgcggagcgtgacacagaagcatatccaggagtggggccctttcgacctggtgatcggcggcagcccttgcaatgacctgagcatcgtgaacccagcccggaagggcctgtacgagggaaccggcagactgttcttcgagttttacagactgctgcacgacgcccggcctaaggaaggcgacgaccggcccttcttttggctgttcgagaatgtggtggccatgggagtcagcgacaagcgggatattagccggttcctggagagcaaccccgtgatgatcgatgccaaggaagtgagcgccgcccaccgggccagatacttctggggcaatctgcctggcatgaacagacccctggccagcaccgtgaacgacaagctggagctgcaggagtgcctggagcacggccggatcgccaagttcagcaaggtgagaaccatcaccacccgaagcaacagcatcaaacaaggcaaggaccagcactttcctgtgttcatgaacgagaaggaggacatcctgtggtgtaccgagatggagagagtgttcgggttcccagtccactacacagatgtcagcaacatgtctagactggccagacagagactgctgggaagaagctggtccgtccctgtgatcagacacctgttcgcccctctgaaggagtacttcgcctgcgtgagcagcggcaacagcaacgccaacagccggggccccagcttctctagcggcctggtgccactgtccctgagagggagccacatgggccccatggagatctacaaaaccgtgagcgcctggaagcggcagcctgtgcgcgtgctgagcctgtttcggaatatcgataaagtcctgaaaagcctgggattcctggagagcggctctggctccggcggtggcaccctgaagtacgtggaggatgtgacaaacgtggtcagacgggatgtggagaagtggggccccttcgatctggtgtacggcagcacccaacccctgggcagctcttgtgaccggtgccctggctggtacatgtttcagttccaccggatcctgcagtacgccctgccgagacaggagtcccagcggccattcttttggattttcatggacaacttgctgctgaccgaggatgaccaggaaactaccactcggttcctgcagaccgaagccgtgaccctgcaggacgtgagaggccgggactaccagaacgccatgcgggtgtggtccaacatccctggactgaaaagcaagcacgcacctctgacccctaaagaagaggagtacctgcaggcccaggtgcggagcagaagcaagctggacgcccctaaggtggatctgctggtgaagaattgcctcctgcccctgagagagtacttcaagtatttcagccagaatagtctgcccctgggaggcagcggcggcggcgccctggtgacatttgaggacgtcgccgtgcggttcacccaggaggaatgggctctgctggatccttctcagaaaatcctgtaccgggacgtgatgagagagacataccggaatctgacctccgtgggcatcaactgggaatgttgggaccttgaagcctgcttcagaagcctgggaagaaacctgagagtgcaggtggtgaagagaaagtgcgagctgaccaacagcggcccctgcgccgagggcggcccaagcagcggcgcccctcctcccagcggcggcagcccagccggctccccaacctctaccgaggagggcacctctgagtccgccacccccgagagcggccctggcacctccaccgagcccagcgagggcagcgcacccggcagccctgccggcagccccacctccacagaggagggaaccagcaccgagcccagcgaaggcagcgccccaggcaccagcaccgagcctagtgagcaggagattaaacggatcaacaagatcagaagaagacttgtgaaagacagcaacaccaagaaggccggcaagacaggccccatgaaaaccctgctggttagagtgatgacacccgatctgagagagcggctggaaaacctgagaaagaagcctgaaaatatcccccagcccatcagcaatacatctagagccaacctgaataagctgctgaccgattacaccgaaatgaagaaggcgatcctgcatgtgtactgggaagagttccagaaggaccctgtgggcctgatgagccgggtggcccagcctgccagcaagaagatcgatcagaacaagctgaaacctgagatggacgagaagggcaacctgaccaccgccggctttgcctgctctcagtgtggccagcccctgttcgtgtacaagctggagcaggtgtctgagaagggcaaggcttacaccaactacttcggacggtgcaatgtggccgagcacgaaaagctgatcctgctggcccagctgaagcccgagaaggatagcgacgaagccgtgacatatagcctgggaaagtttgggcagagggccctggatttctacagcattcatgtgaccaaggagtccacccaccccgtgaagcccctggcccagatcgccggaaacagatacgcctccggacctgtgggaaaggccctgagcgacgcatgtatgggcacaatcgcctccttcctgtctaagtaccaggacatcatcatcgaacaccagaaggtggtgaagggcaaccagaagagactggagagcctgcgggagctggccggcaaggaaaacctggaataccctagcgtgaccctgccacctcagcctcacaccaaggagggcgttgatgcctacaacgaagtgatcgcccgggtgcgaatgtgggtgaacctgaacctgtggcagaagctgaagctaagcagagatgatgccaagcctctgctgagactgaagggattcccttcctttcctctggtcgagagacaggccaacgaagtggactggtgggacatggtgtgtaacgtgaagaagctgatcaacgagaaaaaggaggatggcaaggtgttttggcagaatctggctggctacaagagacaggaagccctgagaccatacctgagcagcgaggaagatcggaagaagggaaagaaattcgctcggtaccagctgggcgacctgctgctgcacctggaaaagaagcacggcgaggactggggaaaggtgtacgacgaggcctgggagcggattgacaagaaagtggaaggcctgagcaagcacatcaagctggaagaggaacggagaagcgaggacgcccagagcaaggccgccctgaccgactggctgcgggctaaggccagcttcgtgatcgagggcctgaaggaggccgacaaggacgagttctgcagatgcgagctgaagctgcagaagtggtacggggacctgcggggaaagcccttcgccatcgaagccgagaacagcatcctggacatcagcggcttcagcaagcagtacaactgtgccttcatctggcagaaggacggcgtgaagaagctgaacctgtacctgatcatcaactacttcaagggcggcaagctgcggttcaagaagatcaaacctgaagccttcgaagccaacagattctacaccgtgatcaacaaaaagagcggcgagatcgtgcccatggaggtgaacttcaacttcgacgaccccaacctgatcatcctgcctctggcctttggcaagagacagggcagagaattcatctggaacgacctgctgtccctggaaaccggcagcctgaagctggccaacggaagagtgatcgagaagacactgtacaacagaagaacccggcaggatgagcctgccctgttcgtggccctgaccttcgagcggcgggaggtcctggactcctccaatatcaaaccaatgaacctgatcggcgtggcaagaggcgaaaacatccccgccgtgatcgccctgaccgaccccgagggctgcccactgagccggtttaaggatagcctgggaaacccaacccacatcctgagaatcggcgagagctataaggagaagcagcggaccatccaggccaagaaggaggtggagcagcggagagccggcggctacagccggaagtacgccagcaaagccaagaatctggcagacgatatggtgagaaacaccgctagagatctgctgtactacgccgtgacccaggatgccatgctgatcttcgccaacctgagccggggcttcggccggcagggcaagcggaccttcatggccgagagacagtacacacggatggaggactggctgaccgccaagctggcctacgagggcctgagcaagacctacctgtccaagacactggcccagtacacctccaagacatgcagcaactgtgggtttaccatcaccagcgccgactacgacagggtgctggagaagctgaagaagacagcaacaggctggatgaccacaattaacggcaaggagctgaaggtggagggccagattacctactacaacagatacaagagacagaacgtagtcaaggacctgtccgtcgagctggatagactgagcgaagaatctgtgaacaacgacatctcctcctggacaaagggcagaagcggagaagctctgagcctcctgaagaaaagattctcccatagacccgtgcaggagaagttcgtgtgcctgaactgcggcttcgagacacacgcagccgagcaagccgccctgaacatcgccagatcctggctgttcctgcggagccaggagtacaagaaataccagacaaacaagacaaccggcaacaccgataagagagccttcgtcgagacctggcagtccttttaccggaagaagcttaaggaggtgtggaaacctgccgtgcggtctggcggatctggcggaggctccctgcaggagagcgtgaccttcagggacgtggccgtgctgttcagccaggacgagtggctgcacctggacagcgcccagaggaccctgtacagggaggtgatgctggagaactacaacaacctggccagcctgggcatccccttcagcatgcccaaggtgatctgccagctgcagcagggcgaggacccctgcaccgtggagggcgaggtgcccagcgacagctgcatcgacgccaagggccagggcggcccaagcagcggcgcccctcctcccagcggcggcagcccagccggctccccaacctctaccgaggagggcacctctgagtccgccacccccgagagcggccctggcacctccaccgagcccagcgagggcagcgcacccggcagccctgccggcagccccacctccacagaggagggaaccagcaccgagcccagcgaaggcagcgccccaggcaccagcaccgagcctagtgagcaggagattaaacggatcaacaagatcagaagaagacttgtgaaagacagcaacaccaagaaggccggcaagacaggccccatgaaaaccctgctggttagagtgatgacacccgatctgagagagcggctggaaaacctgagaaagaagcctgaaaatatcccccagcccatcagcaatacatctagagccaacctgaataagctgctgaccgattacaccgaaatgaagaaggcgatcctgcatgtgtactgggaagagttccagaaggaccctgtgggcctgatgagccgggtggcccagcctgccagcaagaagatcgatcagaacaagctgaaacctgagatggacgagaagggcaacctgaccaccgccggctttgcctgctctcagtgtggccagcccctgttcgtgtacaagctggagcaggtgtctgagaagggcaaggcttacaccaactacttcggacggtgcaatgtggccgagcacgaaaagctgatcctgctggcccagctgaagcccgagaaggatagcgacgaagccgtgacatatagcctgggaaagtttgggcagagggccctggatttctacagcattcatgtgaccaaggagtccacccaccccgtgaagcccctggcccagatcgccggaaacagatacgcctccggacctgtgggaaaggccctgagcgacgcatgtatgggcacaatcgcctccttcctgtctaagtaccaggacatcatcatcgaacaccagaaggtggtgaagggcaaccagaagagactggagagcctgcgggagctggccggcaaggaaaacctggaataccctagcgtgaccctgccacctcagcctcacaccaaggagggcgttgatgcctacaacgaagtgatcgcccgggtgcgaatgtgggtgaacctgaacctgtggcagaagctgaagctaagcagagatgatgccaagcctctgctgagactgaagggattcccttcctttcctctggtcgagagacaggccaacgaagtggactggtgggacatggtgtgtaacgtgaagaagctgatcaacgagaaaaaggaggatggcaaggtgttttggcagaatctggctggctacaagagacaggaagccctgagaccatacctgagcagcgaggaagatcggaagaagggaaagaaattcgctcggtaccagctgggcgacctgctgctgcacctggaaaagaagcacggcgaggactggggaaaggtgtacgacgaggcctgggagcggattgacaagaaagtggaaggcctgagcaagcacatcaagctggaagaggaacggagaagcgaggacgcccagagcaaggccgccctgaccgactggctgcgggctaaggccagcttcgtgatcgagggcctgaaggaggccgacaaggacgagttctgcagatgcgagctgaagctgcagaagtggtacggggacctgcggggaaagcccttcgccatcgaagccgagaacagcatcctggacatcagcggcttcagcaagcagtacaactgtgccttcatctggcagaaggacggcgtgaagaagctgaacctgtacctgatcatcaactacttcaagggcggcaagctgcggttcaagaagatcaaacctgaagccttcgaagccaacagattctacaccgtgatcaacaaaaagagcggcgagatcgtgcccatggaggtgaacttcaacttcgacgaccccaacctgatcatcctgcctctggcctttggcaagagacagggcagagaattcatctggaacgacctgctgtccctggaaaccggcagcctgaagctggccaacggaagagtgatcgagaagacactgtacaacagaagaacccggcaggatgagcctgccctgttcgtggccctgaccttcgagcggcgggaggtcctggactcctccaatatcaaaccaatgaacctgatcggcgtggcaagaggcgaaaacatccccgccgtgatcgccctgaccgaccccgagggctgcccactgagccggtttaaggatagcctgggaaacccaacccacatcctgagaatcggcgagagctataaggagaagcagcggaccatccaggccaagaaggaggtggagcagcggagagccggcggctacagccggaagtacgccagcaaagccaagaatctggcagacgatatggtgagaaacaccgctagagatctgctgtactacgccgtgacccaggatgccatgctgatcttcgccaacctgagccggggcttcggccggcagggcaagcggaccttcatggccgagagacagtacacacggatggaggactggctgaccgccaagctggcctacgagggcctgagcaagacctacctgtccaagacactggcccagtacacctccaagacatgcagcaactgtgggtttaccatcaccagcgccgactacgacagggtgctggagaagctgaagaagacagcaacaggctggatgaccacaattaacggcaaggagctgaaggtggagggccagattacctactacaacagatacaagagacagaacgtagtcaaggacctgtccgtcgagctggatagactgagcgaagaatctgtgaacaacgacatctcctcctggacaaagggcagaagcggagaagctctgagcctcctgaagaaaagattctcccatagacccgtgcaggagaagttcgtgtgcctgaactgcggcttcgagacacacgcagccgagcaagccgccctgaacatcgccagatcctggctgttcctgcggagccaggagtacaagaaataccagacaaacaagacaaccggcaacaccgataagagagccttcgtcgagacctggcagtccttttaccggaagaagcttaaggaggtgtggaaacctgccgtgcggtctggcggatctggcggaggctcctctgcaggagagcgtgaccttcagggacgtggccgtgctgttcagccaggacgagtggctgcacctggacagcgcccagaggaccctgtacagggaggtgatgctggagaactacaacaacctggccagcctgggcatccccttcagcatgcccaaggtgatctgccagctgcagcagggcgaggacccctgcaccgtggagggcgaggtgcccagcgacagctgcatcgacgccaagggccagggatctggctccggcagcggccccaagaaaaagagaaaagtctaagctgccttctgcggggcttgccttctggccatgcccttcttctctcccttgcacctgtacctcttggtctttgaataaagcctgagtaggaaggctagcaaaaaaaaaaaaaaaaaaaaaaaaaaaaaaaaaaaaaaaaaaaaaaaaaaaaaaaaaaaaaaaaaaaaaaaaaaaaaaaa

SEQ ID NO: 16090 - RNA, 9479 nt, synthetic construct
  source 1..9479: mol_type = other RNA
aggaaataagagagaaaagaagagtaagaagaaatataagagccaccatggcccctaagaagaagcgtaaagtgagccggatggaacgcctcgtctacgaggtgcggcagaagtgcagaaacatcgaggacatctgcatctcctgcggatctctgaacgtgaccctggagcacccactgttcatcggcggcatgtgccagaactgtaaaaactgttttctggagtgtgcctatcaatacgacgatgacggctaccagagctactgcaccatctgttgcggcggaagagaggtgctgatgtgtggaaataacaactgctgccggtgcttctgcgtggaatgcgtggacctgctggtgggccccggcgccgcccaggccgctattaaggaagatccttggaactgctacatgtgcggccacaagggcacatacggcctgctgagacggagagaggactggcctagcagactgcagatgttcttcgccaataaccacgaccaggagttcgacccccctaaggtgtaccctcccgtccccgccgagaagagaaagcccatccgggtcctgagcctgttcgatggcatcgccaccggtctgctggtgctgaaggacctgggcatccaggtggataggtacattgcctccgaggtgtgcgaggactccatcaccgtgggaatggtgcgtcatcagggcaagatcatgtacgtgggcgacgtgcggagcgtgacacagaagcatatccaggagtggggccctttcgacctggtgatcggcggcagcccttgcaatgacctgagcatcgtgaacccagcccggaagggcctgtacgagggaaccggcagactgttcttcgagttttacagactgctgcacgacgcccggcctaaggaaggcgacgaccggcccttcttttggctgttcgagaatgtggtggccatgggagtcagcgacaagcgggatattagccggttcctggagagcaaccccgtgatgatcgatgccaaggaagtgagcgccgcccaccgggccagatacttctggggcaatctgcctggcatgaacagacccctggccagcaccgtgaacgacaagctggagctgcaggagtgcctggagcacggccggatcgccaagttcagcaaggtgagaaccatcaccacccgaagcaacagcatcaaacaaggcaaggaccagcactttcctgtgttcatgaacgagaaggaggacatcctgtggtgtaccgagatggagagagtgttcgggttcccagtccactacacagatgtcagcaacatgtctagactggccagacagagactgctgggaagaagctggtccgtccctgtgatcagacacctgttcgcccctctgaaggagtacttcgcctgcgtgagcagcggcaacagcaacgccaacagccggggccccagcttctctagcggcctggtgccactgtccctgagagggagccacatgggccccatggagatctacaaaaccgtgagcgcctggaagcggcagcctgtgcgcgtgctgagcctgtttcggaatatcgataaagtcctgaaaagcctgggattcctggagagcggctctggctccggcggtggcaccctgaagtacgtggaggatgtgacaaacgtggtcagacgggatgtggagaagtggggccccttcgatctggtgtacggcagcacccaacccctgggcagctcttgtgaccggtgccctggctggtacatgtttcagttccaccggatcctgcagtacgccctgccgagacaggagtcccagcggccattcttttggattttcatggacaacttgctgctgaccgaggatgaccaggaaactaccactcggttcctgcagaccgaagccgtgaccctgcaggacgtgagaggccgggactaccagaacgccatgcgggtgtggtccaacatccctggactgaaaagcaagcacgcacctctgacccctaaagaagaggagtacctgcaggcccaggtgcggagcagaagcaagctggacgcccctaaggtggatctgctggtgaagaattgcctcctgcccctgagagagtacttcaagtatttcagccagaatagtctgcccctgggaggcagcggcggcggcgccctggtgacatttgaggacgtcgccgtgcggttcacccaggaggaatgggctctgctggatccttctcagaaaatcctgtaccgggacgtgatgagagagacataccggaatctgacctccgtgggcatcaactgggaatgttgggaccttgaagcctgcttcagaagcctgggaagaaacctgagagtgcaggtggtgaagagaaagtgcgagctgaccaacagcggcccctgcgccgagggcggcccaagcagcggcgcccctcctcccagcggcggcagcccagccggctccccaacctctaccgaggagggcacctctgagtccgccacccccgagagcggccctggcacctccaccgagcccagcgagggcagcgcacccggcagccctgccggcagccccacctccacagaggagggaaccagcaccgagcccagcgaaggcagcgccccaggcaccagcaccgagcctagtgagcaggagattaaacggatcaacaagatcagaagaagacttgtgaaagacagcaacaccaagaaggccggcaagacaggccccatgaaaaccctgctggttagagtgatgacacccgatctgagagagcggctggaaaacctgagaaagaagcctgaaaatatcccccagcccatcagcaatacatctagagccaacctgaataagctgctgaccgattacaccgaaatgaagaaggcgatcctgcatgtgtactgggaagagttccagaaggaccctgtgggcctgatgagccgggtggcccagcctgccagcaagaagatcgatcagaacaagctgaaacctgagatggacgagaagggcaacctgaccaccgccggctttgcctgctctcagtgtggccagcccctgttcgtgtacaagctggagcaggtgtctgagaagggcaaggcttacaccaactacttcggacggtgcaatgtggccgagcacgaaaagctgatcctgctggcccagctgaagcccgagaaggatagcgacgaagccgtgacatatagcctgggaaagtttgggcagagggccctggatttctacagcattcatgtgaccaaggagtccacccaccccgtgaagcccctggcccagatcgccggaaacagatacgcctccggacctgtgggaaaggccctgagcgacgcatgtatgggcacaatcgcctccttcctgtctaagtaccaggacatcatcatcgaacaccagaaggtggtgaagggcaaccagaagagactggagagcctgcgggagctggccggcaaggaaaacctggaataccctagcgtgaccctgccacctcagcctcacaccaaggagggcgttgatgcctacaacgaagtgatcgcccgggtgcgaatgtgggtgaacctgaacctgtggcagaagctgaagctaagcagagatgatgccaagcctctgctgagactgaagggattcccttcctttcctctggtcgagagacaggccaacgaagtggactggtgggacatggtgtgtaacgtgaagaagctgatcaacgagaaaaaggaggatggcaaggtgttttggcagaatctggctggctacaagagacaggaagccctgagaccatacctgagcagcgaggaagatcggaagaagggaaagaaattcgctcggtaccagctgggcgacctgctgctgcacctggaaaagaagcacggcgaggactggggaaaggtgtacgacgaggcctgggagcggattgacaagaaagtggaaggcctgagcaagcacatcaagctggaagaggaacggagaagcgaggacgcccagagcaaggccgccctgaccgactggctgcgggctaaggccagcttcgtgatcgagggcctgaaggaggccgacaaggacgagttctgcagatgcgagctgaagctgcagaagtggtacggggacctgcggggaaagcccttcgccatcgaagccgagaacagcatcctggacatcagcggcttcagcaagcagtacaactgtgccttcatctggcagaaggacggcgtgaagaagctgaacctgtacctgatcatcaactacttcaagggcggcaagctgcggttcaagaagatcaaacctgaagccttcgaagccaacagattctacaccgtgatcaacaaaaagagcggcgagatcgtgcccatggaggtgaacttcaacttcgacgaccccaacctgatcatcctgcctctggcctttggcaagagacagggcagagaattcatctggaacgacctgctgtccctggaaaccggcagcctgaagctggccaacggaagagtgatcgagaagacactgtacaacagaagaacccggcaggatgagcctgccctgttcgtggccctgaccttcgagcggcgggaggtcctggactcctccaatatcaaaccaatgaacctgatcggcgtggcaagaggcgaaaacatccccgccgtgatcgccctgaccgaccccgagggctgcccactgagccggtttaaggatagcctgggaaacccaacccacatcctgagaatcggcgagagctataaggagaagcagcggaccatccaggccaagaaggaggtggagcagcggagagccggcggctacagccggaagtacgccagcaaagccaagaatctggcagacgatatggtgagaaacaccgctagagatctgctgtactacgccgtgacccaggatgccatgctgatcttcgccaacctgagccggggcttcggccggcagggcaagcggaccttcatggccgagagacagtacacacggatggaggactggctgaccgccaagctggcctacgagggcctgagcaagacctacctgtccaagacactggcccagtacacctccaagacatgcagcaactgtgggtttaccatcaccagcgccgactacgacagggtgctggagaagctgaagaagacagcaacaggctggatgaccacaattaacggcaaggagctgaaggtggagggccagattacctactacaacagatacaagagacagaacgtagtcaaggacctgtccgtcgagctggatagactgagcgaagaatctgtgaacaacgacatctcctcctggacaaagggcagaagcggagaagctctgagcctcctgaagaaaagattctcccatagacccgtgcaggagaagttcgtgtgcctgaactgcggcttcgagacacacgcagccgagcaagccgccctgaacatcgccagatcctggctgttcctgcggagccaggagtacaagaaataccagacaaacaagacaaccggcaacaccgataagagagccttcgtcgagacctggcagtccttttaccggaagaagcttaaggaggtgtggaaacctgccgtgcggtctggcggatctggcggaggctccagccaggtgaccttcagcgacgtggccatcgacttcagccacgaggagtgggcctgcctggacagcgcccagagagacctgtacaaggacgtgatggtgcagaactacgagaacctggtgagcgtgggcctgagcgtgaccaagccctacgtgatcatgctgctggaggacggcaaggagccctggatgatggagaagaagctgagcaaggcctaccccttccccctgagccacagcgtgggcggcccaagcagcggcgcccctcctcccagcggcggcagcccagccggctccccaacctctaccgaggagggcacctctgagtccgccacccccgagagcggccctggcacctccaccgagcccagcgagggcagcgcacccggcagccctgccggcagccccacctccacagaggagggaaccagcaccgagcccagcgaaggcagcgccccaggcaccagcaccgagcctagtgagcaggagattaaacggatcaacaagatcagaagaagacttgtgaaagacagcaacaccaagaaggccggcaagacaggccccatgaaaaccctgctggttagagtgatgacacccgatctgagagagcggctggaaaacctgagaaagaagcctgaaaatatcccccagcccatcagcaatacatctagagccaacctgaataagctgctgaccgattacaccgaaatgaagaaggcgatcctgcatgtgtactgggaagagttccagaaggaccctgtgggcctgatgagccgggtggcccagcctgccagcaagaagatcgatcagaacaagctgaaacctgagatggacgagaagggcaacctgaccaccgccggctttgcctgctctcagtgtggccagcccctgttcgtgtacaagctggagcaggtgtctgagaagggcaaggcttacaccaactacttcggacggtgcaatgtggccgagcacgaaaagctgatcctgctggcccagctgaagcccgagaaggatagcgacgaagccgtgacatatagcctgggaaagtttgggcagagggccctggatttctacagcattcatgtgaccaaggagtccacccaccccgtgaagcccctggcccagatcgccggaaacagatacgcctccggacctgtgggaaaggccctgagcgacgcatgtatgggcacaatcgcctccttcctgtctaagtaccaggacatcatcatcgaacaccagaaggtggtgaagggcaaccagaagagactggagagcctgcgggagctggccggcaaggaaaacctggaataccctagcgtgaccctgccacctcagcctcacaccaaggagggcgttgatgcctacaacgaagtgatcgcccgggtgcgaatgtgggtgaacctgaacctgtggcagaagctgaagctaagcagagatgatgccaagcctctgctgagactgaagggattcccttcctttcctctggtcgagagacaggccaacgaagtggactggtgggacatggtgtgtaacgtgaagaagctgatcaacgagaaaaaggaggatggcaaggtgttttggcagaatctggctggctacaagagacaggaagccctgagaccatacctgagcagcgaggaagatcggaagaagggaaagaaattcgctcggtaccagctgggcgacctgctgctgcacctggaaaagaagcacggcgaggactggggaaaggtgtacgacgaggcctgggagcggattgacaagaaagtggaaggcctgagcaagcacatcaagctggaagaggaacggagaagcgaggacgcccagagcaaggccgccctgaccgactggctgcgggctaaggccagcttcgtgatcgagggcctgaaggaggccgacaaggacgagttctgcagatgcgagctgaagctgcagaagtggtacggggacctgcggggaaagcccttcgccatcgaagccgagaacagcatcctggacatcagcggcttcagcaagcagtacaactgtgccttcatctggcagaaggacggcgtgaagaagctgaacctgtacctgatcatcaactacttcaagggcggcaagctgcggttcaagaagatcaaacctgaagccttcgaagccaacagattctacaccgtgatcaacaaaaagagcggcgagatcgtgcccatggaggtgaacttcaacttcgacgaccccaacctgatcatcctgcctctggcctttggcaagagacagggcagagaattcatctggaacgacctgctgtccctggaaaccggcagcctgaagctggccaacggaagagtgatcgagaagacactgtacaacagaagaacccggcaggatgagcctgccctgttcgtggccctgaccttcgagcggcgggaggtcctggactcctccaatatcaaaccaatgaacctgatcggcgtggcaagaggcgaaaacatccccgccgtgatcgccctgaccgaccccgagggctgcccactgagccggtttaaggatagcctgggaaacccaacccacatcctgagaatcggcgagagctataaggagaagcagcggaccatccaggccaagaaggaggtggagcagcggagagccggcggctacagccggaagtacgccagcaaagccaagaatctggcagacgatatggtgagaaacaccgctagagatctgctgtactacgccgtgacccaggatgccatgctgatcttcgccaacctgagccggggcttcggccggcagggcaagcggaccttcatggccgagagacagtacacacggatggaggactggctgaccgccaagctggcctacgagggcctgagcaagacctacctgtccaagacactggcccagtacacctccaagacatgcagcaactgtgggtttaccatcaccagcgccgactacgacagggtgctggagaagctgaagaagacagcaacaggctggatgaccacaattaacggcaaggagctgaaggtggagggccagattacctactacaacagatacaagagacagaacgtagtcaaggacctgtccgtcgagctggatagactgagcgaagaatctgtgaacaacgacatctcctcctggacaaagggcagaagcggagaagctctgagcctcctgaagaaaagattctcccatagacccgtgcaggagaagttcgtgtgcctgaactgcggcttcgagacacacgcagccgagcaagccgccctgaacatcgccagatcctggctgttcctgcggagccaggagtacaagaaataccagacaaacaagacaaccggcaacaccgataagagagccttcgtcgagacctggcagtccttttaccggaagaagcttaaggaggtgtggaaacctgccgtgcggtctggcggatctggcggaggctcctagccaggtgaccttcagcgacgtggccatcgacttcagccacgaggagtgggcctgcctggacagcgcccagagagacctgtacaaggacgtgatggtgcagaactacgagaacctggtgagcgtgggcctgagcgtgaccaagccctacgtgatcatgctgctggaggacggcaaggagccctggatgatggagaagaagctgagcaaggcctaccccttccccctgagccacagcgtgggatctggctccggcagcggccccaagaaaaagagaaaagtctaagctgccttctgcggggcttgccttctggccatgcccttcttctctcccttgcacctgtacctcttggtctttgaataaagcctgagtaggaaggctagcaaaaaaaaaaaaaaaaaaaaaaaaaaaaaaaaaaaaaaaaaaaaaaaaaaaaaaaaaaaaaaaaaaaaaaaaaaaaaaaa

SEQ ID NO: 16091 - RNA, 9485 nt, synthetic construct
  source 1..9485: mol_type = other RNA
aggaaataagagagaaaagaagagtaagaagaaatataagagccaccatggcccctaagaagaagcgtaaagtgagccggatggaacgcctcgtctacgaggtgcggcagaagtgcagaaacatcgaggacatctgcatctcctgcggatctctgaacgtgaccctggagcacccactgttcatcggcggcatgtgccagaactgtaaaaactgttttctggagtgtgcctatcaatacgacgatgacggctaccagagctactgcaccatctgttgcggcggaagagaggtgctgatgtgtggaaataacaactgctgccggtgcttctgcgtggaatgcgtggacctgctggtgggccccggcgccgcccaggccgctattaaggaagatccttggaactgctacatgtgcggccacaagggcacatacggcctgctgagacggagagaggactggcctagcagactgcagatgttcttcgccaataaccacgaccaggagttcgacccccctaaggtgtaccctcccgtccccgccgagaagagaaagcccatccgggtcctgagcctgttcgatggcatcgccaccggtctgctggtgctgaaggacctgggcatccaggtggataggtacattgcctccgaggtgtgcgaggactccatcaccgtgggaatggtgcgtcatcagggcaagatcatgtacgtgggcgacgtgcggagcgtgacacagaagcatatccaggagtggggccctttcgacctggtgatcggcggcagcccttgcaatgacctgagcatcgtgaacccagcccggaagggcctgtacgagggaaccggcagactgttcttcgagttttacagactgctgcacgacgcccggcctaaggaaggcgacgaccggcccttcttttggctgttcgagaatgtggtggccatgggagtcagcgacaagcgggatattagccggttcctggagagcaaccccgtgatgatcgatgccaaggaagtgagcgccgcccaccgggccagatacttctggggcaatctgcctggcatgaacagacccctggccagcaccgtgaacgacaagctggagctgcaggagtgcctggagcacggccggatcgccaagttcagcaaggtgagaaccatcaccacccgaagcaacagcatcaaacaaggcaaggaccagcactttcctgtgttcatgaacgagaaggaggacatcctgtggtgtaccgagatggagagagtgttcgggttcccagtccactacacagatgtcagcaacatgtctagactggccagacagagactgctgggaagaagctggtccgtccctgtgatcagacacctgttcgcccctctgaaggagtacttcgcctgcgtgagcagcggcaacagcaacgccaacagccggggccccagcttctctagcggcctggtgccactgtccctgagagggagccacatgggccccatggagatctacaaaaccgtgagcgcctggaagcggcagcctgtgcgcgtgctgagcctgtttcggaatatcgataaagtcctgaaaagcctgggattcctggagagcggctctggctccggcggtggcaccctgaagtacgtggaggatgtgacaaacgtggtcagacgggatgtggagaagtggggccccttcgatctggtgtacggcagcacccaacccctgggcagctcttgtgaccggtgccctggctggtacatgtttcagttccaccggatcctgcagtacgccctgccgagacaggagtcccagcggccattcttttggattttcatggacaacttgctgctgaccgaggatgaccaggaaactaccactcggttcctgcagaccgaagccgtgaccctgcaggacgtgagaggccgggactaccagaacgccatgcgggtgtggtccaacatccctggactgaaaagcaagcacgcacctctgacccctaaagaagaggagtacctgcaggcccaggtgcggagcagaagcaagctggacgcccctaaggtggatctgctggtgaagaattgcctcctgcccctgagagagtacttcaagtatttcagccagaatagtctgcccctgggaggcagcggcggcggcgccctggtgacatttgaggacgtcgccgtgcggttcacccaggaggaatgggctctgctggatccttctcagaaaatcctgtaccgggacgtgatgagagagacataccggaatctgacctccgtgggcatcaactgggaatgttgggaccttgaagcctgcttcagaagcctgggaagaaacctgagagtgcaggtggtgaagagaaagtgcgagctgaccaacagcggcccctgcgccgagggcggcccaagcagcggcgcccctcctcccagcggcggcagcccagccggctccccaacctctaccgaggagggcacctctgagtccgccacccccgagagcggccctggcacctccaccgagcccagcgagggcagcgcacccggcagccctgccggcagccccacctccacagaggagggaaccagcaccgagcccagcgaaggcagcgccccaggcaccagcaccgagcctagtgagcaggagattaaacggatcaacaagatcagaagaagacttgtgaaagacagcaacaccaagaaggccggcaagacaggccccatgaaaaccctgctggttagagtgatgacacccgatctgagagagcggctggaaaacctgagaaagaagcctgaaaatatcccccagcccatcagcaatacatctagagccaacctgaataagctgctgaccgattacaccgaaatgaagaaggcgatcctgcatgtgtactgggaagagttccagaaggaccctgtgggcctgatgagccgggtggcccagcctgccagcaagaagatcgatcagaacaagctgaaacctgagatggacgagaagggcaacctgaccaccgccggctttgcctgctctcagtgtggccagcccctgttcgtgtacaagctggagcaggtgtctgagaagggcaaggcttacaccaactacttcggacggtgcaatgtggccgagcacgaaaagctgatcctgctggcccagctgaagcccgagaaggatagcgacgaagccgtgacatatagcctgggaaagtttgggcagagggccctggatttctacagcattcatgtgaccaaggagtccacccaccccgtgaagcccctggcccagatcgccggaaacagatacgcctccggacctgtgggaaaggccctgagcgacgcatgtatgggcacaatcgcctccttcctgtctaagtaccaggacatcatcatcgaacaccagaaggtggtgaagggcaaccagaagagactggagagcctgcgggagctggccggcaaggaaaacctggaataccctagcgtgaccctgccacctcagcctcacaccaaggagggcgttgatgcctacaacgaagtgatcgcccgggtgcgaatgtgggtgaacctgaacctgtggcagaagctgaagctaagcagagatgatgccaagcctctgctgagactgaagggattcccttcctttcctctggtcgagagacaggccaacgaagtggactggtgggacatggtgtgtaacgtgaagaagctgatcaacgagaaaaaggaggatggcaaggtgttttggcagaatctggctggctacaagagacaggaagccctgagaccatacctgagcagcgaggaagatcggaagaagggaaagaaattcgctcggtaccagctgggcgacctgctgctgcacctggaaaagaagcacggcgaggactggggaaaggtgtacgacgaggcctgggagcggattgacaagaaagtggaaggcctgagcaagcacatcaagctggaagaggaacggagaagcgaggacgcccagagcaaggccgccctgaccgactggctgcgggctaaggccagcttcgtgatcgagggcctgaaggaggccgacaaggacgagttctgcagatgcgagctgaagctgcagaagtggtacggggacctgcggggaaagcccttcgccatcgaagccgagaacagcatcctggacatcagcggcttcagcaagcagtacaactgtgccttcatctggcagaaggacggcgtgaagaagctgaacctgtacctgatcatcaactacttcaagggcggcaagctgcggttcaagaagatcaaacctgaagccttcgaagccaacagattctacaccgtgatcaacaaaaagagcggcgagatcgtgcccatggaggtgaacttcaacttcgacgaccccaacctgatcatcctgcctctggcctttggcaagagacagggcagagaattcatctggaacgacctgctgtccctggaaaccggcagcctgaagctggccaacggaagagtgatcgagaagacactgtacaacagaagaacccggcaggatgagcctgccctgttcgtggccctgaccttcgagcggcgggaggtcctggactcctccaatatcaaaccaatgaacctgatcggcgtggcaagaggcgaaaacatccccgccgtgatcgccctgaccgaccccgagggctgcccactgagccggtttaaggatagcctgggaaacccaacccacatcctgagaatcggcgagagctataaggagaagcagcggaccatccaggccaagaaggaggtggagcagcggagagccggcggctacagccggaagtacgccagcaaagccaagaatctggcagacgatatggtgagaaacaccgctagagatctgctgtactacgccgtgacccaggatgccatgctgatcttcgccaacctgagccggggcttcggccggcagggcaagcggaccttcatggccgagagacagtacacacggatggaggactggctgaccgccaagctggcctacgagggcctgagcaagacctacctgtccaagacactggcccagtacacctccaagacatgcagcaactgtgggtttaccatcaccagcgccgactacgacagggtgctggagaagctgaagaagacagcaacaggctggatgaccacaattaacggcaaggagctgaaggtggagggccagattacctactacaacagatacaagagacagaacgtagtcaaggacctgtccgtcgagctggatagactgagcgaagaatctgtgaacaacgacatctcctcctggacaaagggcagaagcggagaagctctgagcctcctgaagaaaagattctcccatagacccgtgcaggagaagttcgtgtgcctgaactgcggcttcgagacacacgcagccgagcaagccgccctgaacatcgccagatcctggctgttcctgcggagccaggagtacaagaaataccagacaaacaagacaaccggcaacaccgataagagagccttcgtcgagacctggcagtccttttaccggaagaagcttaaggaggtgtggaaacctgccgtgcggtctggcggatctggcggaggctccgacgccgtgaccttccccgacgtggccatcgacttcagcagggacgagtgggagtgcctgaacctggcccagaggaccctgtacaggaaggtgatgctggagaactacaggaccctggtgagcgtgggcctgtgcgtgagcaagcccgacgtgatcagcctgctggagcagggcgaggagccctgggtgaccgacggcgagatggccggcggcctgtgcccccacagcgagtgcgtgtggatgggcggcccaagcagcggcgcccctcctcccagcggcggcagcccagccggctccccaacctctaccgaggagggcacctctgagtccgccacccccgagagcggccctggcacctccaccgagcccagcgagggcagcgcacccggcagccctgccggcagccccacctccacagaggagggaaccagcaccgagcccagcgaaggcagcgccccaggcaccagcaccgagcctagtgagcaggagattaaacggatcaacaagatcagaagaagacttgtgaaagacagcaacaccaagaaggccggcaagacaggccccatgaaaaccctgctggttagagtgatgacacccgatctgagagagcggctggaaaacctgagaaagaagcctgaaaatatcccccagcccatcagcaatacatctagagccaacctgaataagctgctgaccgattacaccgaaatgaagaaggcgatcctgcatgtgtactgggaagagttccagaaggaccctgtgggcctgatgagccgggtggcccagcctgccagcaagaagatcgatcagaacaagctgaaacctgagatggacgagaagggcaacctgaccaccgccggctttgcctgctctcagtgtggccagcccctgttcgtgtacaagctggagcaggtgtctgagaagggcaaggcttacaccaactacttcggacggtgcaatgtggccgagcacgaaaagctgatcctgctggcccagctgaagcccgagaaggatagcgacgaagccgtgacatatagcctgggaaagtttgggcagagggccctggatttctacagcattcatgtgaccaaggagtccacccaccccgtgaagcccctggcccagatcgccggaaacagatacgcctccggacctgtgggaaaggccctgagcgacgcatgtatgggcacaatcgcctccttcctgtctaagtaccaggacatcatcatcgaacaccagaaggtggtgaagggcaaccagaagagactggagagcctgcgggagctggccggcaaggaaaacctggaataccctagcgtgaccctgccacctcagcctcacaccaaggagggcgttgatgcctacaacgaagtgatcgcccgggtgcgaatgtgggtgaacctgaacctgtggcagaagctgaagctaagcagagatgatgccaagcctctgctgagactgaagggattcccttcctttcctctggtcgagagacaggccaacgaagtggactggtgggacatggtgtgtaacgtgaagaagctgatcaacgagaaaaaggaggatggcaaggtgttttggcagaatctggctggctacaagagacaggaagccctgagaccatacctgagcagcgaggaagatcggaagaagggaaagaaattcgctcggtaccagctgggcgacctgctgctgcacctggaaaagaagcacggcgaggactggggaaaggtgtacgacgaggcctgggagcggattgacaagaaagtggaaggcctgagcaagcacatcaagctggaagaggaacggagaagcgaggacgcccagagcaaggccgccctgaccgactggctgcgggctaaggccagcttcgtgatcgagggcctgaaggaggccgacaaggacgagttctgcagatgcgagctgaagctgcagaagtggtacggggacctgcggggaaagcccttcgccatcgaagccgagaacagcatcctggacatcagcggcttcagcaagcagtacaactgtgccttcatctggcagaaggacggcgtgaagaagctgaacctgtacctgatcatcaactacttcaagggcggcaagctgcggttcaagaagatcaaacctgaagccttcgaagccaacagattctacaccgtgatcaacaaaaagagcggcgagatcgtgcccatggaggtgaacttcaacttcgacgaccccaacctgatcatcctgcctctggcctttggcaagagacagggcagagaattcatctggaacgacctgctgtccctggaaaccggcagcctgaagctggccaacggaagagtgatcgagaagacactgtacaacagaagaacccggcaggatgagcctgccctgttcgtggccctgaccttcgagcggcgggaggtcctggactcctccaatatcaaaccaatgaacctgatcggcgtggcaagaggcgaaaacatccccgccgtgatcgccctgaccgaccccgagggctgcccactgagccggtttaaggatagcctgggaaacccaacccacatcctgagaatcggcgagagctataaggagaagcagcggaccatccaggccaagaaggaggtggagcagcggagagccggcggctacagccggaagtacgccagcaaagccaagaatctggcagacgatatggtgagaaacaccgctagagatctgctgtactacgccgtgacccaggatgccatgctgatcttcgccaacctgagccggggcttcggccggcagggcaagcggaccttcatggccgagagacagtacacacggatggaggactggctgaccgccaagctggcctacgagggcctgagcaagacctacctgtccaagacactggcccagtacacctccaagacatgcagcaactgtgggtttaccatcaccagcgccgactacgacagggtgctggagaagctgaagaagacagcaacaggctggatgaccacaattaacggcaaggagctgaaggtggagggccagattacctactacaacagatacaagagacagaacgtagtcaaggacctgtccgtcgagctggatagactgagcgaagaatctgtgaacaacgacatctcctcctggacaaagggcagaagcggagaagctctgagcctcctgaagaaaagattctcccatagacccgtgcaggagaagttcgtgtgcctgaactgcggcttcgagacacacgcagccgagcaagccgccctgaacatcgccagatcctggctgttcctgcggagccaggagtacaagaaataccagacaaacaagacaaccggcaacaccgataagagagccttcgtcgagacctggcagtccttttaccggaagaagcttaaggaggtgtggaaacctgccgtgcggtctggcggatctggcggaggctcctgacgccgtgaccttccccgacgtggccatcgacttcagcagggacgagtgggagtgcctgaacctggcccagaggaccctgtacaggaaggtgatgctggagaactacaggaccctggtgagcgtgggcctgtgcgtgagcaagcccgacgtgatcagcctgctggagcagggcgaggagccctgggtgaccgacggcgagatggccggcggcctgtgcccccacagcgagtgcgtgtggatgggatctggctccggcagcggccccaagaaaaagagaaaagtctaagctgccttctgcggggcttgccttctggccatgcccttcttctctcccttgcacctgtacctcttggtctttgaataaagcctgagtaggaaggctagcaaaaaaaaaaaaaaaaaaaaaaaaaaaaaaaaaaaaaaaaaaaaaaaaaaaaaaaaaaaaaaaaaaaaaaaaaaaaaaaa

SEQ ID NO: 16092 - RNA, 9485 nt, synthetic construct
  source 1..9485: mol_type = other RNA
aggaaataagagagaaaagaagagtaagaagaaatataagagccaccatggcccctaagaagaagcgtaaagtgagccggatggaacgcctcgtctacgaggtgcggcagaagtgcagaaacatcgaggacatctgcatctcctgcggatctctgaacgtgaccctggagcacccactgttcatcggcggcatgtgccagaactgtaaaaactgttttctggagtgtgcctatcaatacgacgatgacggctaccagagctactgcaccatctgttgcggcggaagagaggtgctgatgtgtggaaataacaactgctgccggtgcttctgcgtggaatgcgtggacctgctggtgggccccggcgccgcccaggccgctattaaggaagatccttggaactgctacatgtgcggccacaagggcacatacggcctgctgagacggagagaggactggcctagcagactgcagatgttcttcgccaataaccacgaccaggagttcgacccccctaaggtgtaccctcccgtccccgccgagaagagaaagcccatccgggtcctgagcctgttcgatggcatcgccaccggtctgctggtgctgaaggacctgggcatccaggtggataggtacattgcctccgaggtgtgcgaggactccatcaccgtgggaatggtgcgtcatcagggcaagatcatgtacgtgggcgacgtgcggagcgtgacacagaagcatatccaggagtggggccctttcgacctggtgatcggcggcagcccttgcaatgacctgagcatcgtgaacccagcccggaagggcctgtacgagggaaccggcagactgttcttcgagttttacagactgctgcacgacgcccggcctaaggaaggcgacgaccggcccttcttttggctgttcgagaatgtggtggccatgggagtcagcgacaagcgggatattagccggttcctggagagcaaccccgtgatgatcgatgccaaggaagtgagcgccgcccaccgggccagatacttctggggcaatctgcctggcatgaacagacccctggccagcaccgtgaacgacaagctggagctgcaggagtgcctggagcacggccggatcgccaagttcagcaaggtgagaaccatcaccacccgaagcaacagcatcaaacaaggcaaggaccagcactttcctgtgttcatgaacgagaaggaggacatcctgtggtgtaccgagatggagagagtgttcgggttcccagtccactacacagatgtcagcaacatgtctagactggccagacagagactgctgggaagaagctggtccgtccctgtgatcagacacctgttcgcccctctgaaggagtacttcgcctgcgtgagcagcggcaacagcaacgccaacagccggggccccagcttctctagcggcctggtgccactgtccctgagagggagccacatgggccccatggagatctacaaaaccgtgagcgcctggaagcggcagcctgtgcgcgtgctgagcctgtttcggaatatcgataaagtcctgaaaagcctgggattcctggagagcggctctggctccggcggtggcaccctgaagtacgtggaggatgtgacaaacgtggtcagacgggatgtggagaagtggggccccttcgatctggtgtacggcagcacccaacccctgggcagctcttgtgaccggtgccctggctggtacatgtttcagttccaccggatcctgcagtacgccctgccgagacaggagtcccagcggccattcttttggattttcatggacaacttgctgctgaccgaggatgaccaggaaactaccactcggttcctgcagaccgaagccgtgaccctgcaggacgtgagaggccgggactaccagaacgccatgcgggtgtggtccaacatccctggactgaaaagcaagcacgcacctctgacccctaaagaagaggagtacctgcaggcccaggtgcggagcagaagcaagctggacgcccctaaggtggatctgctggtgaagaattgcctcctgcccctgagagagtacttcaagtatttcagccagaatagtctgcccctgggaggcagcggcggcggcgccctggtgacatttgaggacgtcgccgtgcggttcacccaggaggaatgggctctgctggatccttctcagaaaatcctgtaccgggacgtgatgagagagacataccggaatctgacctccgtgggcatcaactgggaatgttgggaccttgaagcctgcttcagaagcctgggaagaaacctgagagtgcaggtggtgaagagaaagtgcgagctgaccaacagcggcccctgcgccgagggcggcccaagcagcggcgcccctcctcccagcggcggcagcccagccggctccccaacctctaccgaggagggcacctctgagtccgccacccccgagagcggccctggcacctccaccgagcccagcgagggcagcgcacccggcagccctgccggcagccccacctccacagaggagggaaccagcaccgagcccagcgaaggcagcgccccaggcaccagcaccgagcctagtgagcaggagattaaacggatcaacaagatcagaagaagacttgtgaaagacagcaacaccaagaaggccggcaagacaggccccatgaaaaccctgctggttagagtgatgacacccgatctgagagagcggctggaaaacctgagaaagaagcctgaaaatatcccccagcccatcagcaatacatctagagccaacctgaataagctgctgaccgattacaccgaaatgaagaaggcgatcctgcatgtgtactgggaagagttccagaaggaccctgtgggcctgatgagccgggtggcccagcctgccagcaagaagatcgatcagaacaagctgaaacctgagatggacgagaagggcaacctgaccaccgccggctttgcctgctctcagtgtggccagcccctgttcgtgtacaagctggagcaggtgtctgagaagggcaaggcttacaccaactacttcggacggtgcaatgtggccgagcacgaaaagctgatcctgctggcccagctgaagcccgagaaggatagcgacgaagccgtgacatatagcctgggaaagtttgggcagagggccctggatttctacagcattcatgtgaccaaggagtccacccaccccgtgaagcccctggcccagatcgccggaaacagatacgcctccggacctgtgggaaaggccctgagcgacgcatgtatgggcacaatcgcctccttcctgtctaagtaccaggacatcatcatcgaacaccagaaggtggtgaagggcaaccagaagagactggagagcctgcgggagctggccggcaaggaaaacctggaataccctagcgtgaccctgccacctcagcctcacaccaaggagggcgttgatgcctacaacgaagtgatcgcccgggtgcgaatgtgggtgaacctgaacctgtggcagaagctgaagctaagcagagatgatgccaagcctctgctgagactgaagggattcccttcctttcctctggtcgagagacaggccaacgaagtggactggtgggacatggtgtgtaacgtgaagaagctgatcaacgagaaaaaggaggatggcaaggtgttttggcagaatctggctggctacaagagacaggaagccctgagaccatacctgagcagcgaggaagatcggaagaagggaaagaaattcgctcggtaccagctgggcgacctgctgctgcacctggaaaagaagcacggcgaggactggggaaaggtgtacgacgaggcctgggagcggattgacaagaaagtggaaggcctgagcaagcacatcaagctggaagaggaacggagaagcgaggacgcccagagcaaggccgccctgaccgactggctgcgggctaaggccagcttcgtgatcgagggcctgaaggaggccgacaaggacgagttctgcagatgcgagctgaagctgcagaagtggtacggggacctgcggggaaagcccttcgccatcgaagccgagaacagcatcctggacatcagcggcttcagcaagcagtacaactgtgccttcatctggcagaaggacggcgtgaagaagctgaacctgtacctgatcatcaactacttcaagggcggcaagctgcggttcaagaagatcaaacctgaagccttcgaagccaacagattctacaccgtgatcaacaaaaagagcggcgagatcgtgcccatggaggtgaacttcaacttcgacgaccccaacctgatcatcctgcctctggcctttggcaagagacagggcagagaattcatctggaacgacctgctgtccctggaaaccggcagcctgaagctggccaacggaagagtgatcgagaagacactgtacaacagaagaacccggcaggatgagcctgccctgttcgtggccctgaccttcgagcggcgggaggtcctggactcctccaatatcaaaccaatgaacctgatcggcgtggcaagaggcgaaaacatccccgccgtgatcgccctgaccgaccccgagggctgcccactgagccggtttaaggatagcctgggaaacccaacccacatcctgagaatcggcgagagctataaggagaagcagcggaccatccaggccaagaaggaggtggagcagcggagagccggcggctacagccggaagtacgccagcaaagccaagaatctggcagacgatatggtgagaaacaccgctagagatctgctgtactacgccgtgacccaggatgccatgctgatcttcgccaacctgagccggggcttcggccggcagggcaagcggaccttcatggccgagagacagtacacacggatggaggactggctgaccgccaagctggcctacgagggcctgagcaagacctacctgtccaagacactggcccagtacacctccaagacatgcagcaactgtgggtttaccatcaccagcgccgactacgacagggtgctggagaagctgaagaagacagcaacaggctggatgaccacaattaacggcaaggagctgaaggtggagggccagattacctactacaacagatacaagagacagaacgtagtcaaggacctgtccgtcgagctggatagactgagcgaagaatctgtgaacaacgacatctcctcctggacaaagggcagaagcggagaagctctgagcctcctgaagaaaagattctcccatagacccgtgcaggagaagttcgtgtgcctgaactgcggcttcgagacacacgcagccgagcaagccgccctgaacatcgccagatcctggctgttcctgcggagccaggagtacaagaaataccagacaaacaagacaaccggcaacaccgataagagagccttcgtcgagacctggcagtccttttaccggaagaagcttaaggaggtgtggaaacctgccgtgcggtctggcggatctggcggaggctccttccagggcctgatgaccttcgaggacgtgaccgtggagttcacccagtgggagtggggccagctggaccccgcccagaaggacctgtacagggaggtgatgctggagaacttcaggaacctggccagcctgggcctgcccctgagcaagccctacgtgatctgccagctggaggagggccaggagccctgcatgctggagaaggagatcagcgtgggcacccagagcgtgggcgaggccaccggcggcccaagcagcggcgcccctcctcccagcggcggcagcccagccggctccccaacctctaccgaggagggcacctctgagtccgccacccccgagagcggccctggcacctccaccgagcccagcgagggcagcgcacccggcagccctgccggcagccccacctccacagaggagggaaccagcaccgagcccagcgaaggcagcgccccaggcaccagcaccgagcctagtgagcaggagattaaacggatcaacaagatcagaagaagacttgtgaaagacagcaacaccaagaaggccggcaagacaggccccatgaaaaccctgctggttagagtgatgacacccgatctgagagagcggctggaaaacctgagaaagaagcctgaaaatatcccccagcccatcagcaatacatctagagccaacctgaataagctgctgaccgattacaccgaaatgaagaaggcgatcctgcatgtgtactgggaagagttccagaaggaccctgtgggcctgatgagccgggtggcccagcctgccagcaagaagatcgatcagaacaagctgaaacctgagatggacgagaagggcaacctgaccaccgccggctttgcctgctctcagtgtggccagcccctgttcgtgtacaagctggagcaggtgtctgagaagggcaaggcttacaccaactacttcggacggtgcaatgtggccgagcacgaaaagctgatcctgctggcccagctgaagcccgagaaggatagcgacgaagccgtgacatatagcctgggaaagtttgggcagagggccctggatttctacagcattcatgtgaccaaggagtccacccaccccgtgaagcccctggcccagatcgccggaaacagatacgcctccggacctgtgggaaaggccctgagcgacgcatgtatgggcacaatcgcctccttcctgtctaagtaccaggacatcatcatcgaacaccagaaggtggtgaagggcaaccagaagagactggagagcctgcgggagctggccggcaaggaaaacctggaataccctagcgtgaccctgccacctcagcctcacaccaaggagggcgttgatgcctacaacgaagtgatcgcccgggtgcgaatgtgggtgaacctgaacctgtggcagaagctgaagctaagcagagatgatgccaagcctctgctgagactgaagggattcccttcctttcctctggtcgagagacaggccaacgaagtggactggtgggacatggtgtgtaacgtgaagaagctgatcaacgagaaaaaggaggatggcaaggtgttttggcagaatctggctggctacaagagacaggaagccctgagaccatacctgagcagcgaggaagatcggaagaagggaaagaaattcgctcggtaccagctgggcgacctgctgctgcacctggaaaagaagcacggcgaggactggggaaaggtgtacgacgaggcctgggagcggattgacaagaaagtggaaggcctgagcaagcacatcaagctggaagaggaacggagaagcgaggacgcccagagcaaggccgccctgaccgactggctgcgggctaaggccagcttcgtgatcgagggcctgaaggaggccgacaaggacgagttctgcagatgcgagctgaagctgcagaagtggtacggggacctgcggggaaagcccttcgccatcgaagccgagaacagcatcctggacatcagcggcttcagcaagcagtacaactgtgccttcatctggcagaaggacggcgtgaagaagctgaacctgtacctgatcatcaactacttcaagggcggcaagctgcggttcaagaagatcaaacctgaagccttcgaagccaacagattctacaccgtgatcaacaaaaagagcggcgagatcgtgcccatggaggtgaacttcaacttcgacgaccccaacctgatcatcctgcctctggcctttggcaagagacagggcagagaattcatctggaacgacctgctgtccctggaaaccggcagcctgaagctggccaacggaagagtgatcgagaagacactgtacaacagaagaacccggcaggatgagcctgccctgttcgtggccctgaccttcgagcggcgggaggtcctggactcctccaatatcaaaccaatgaacctgatcggcgtggcaagaggcgaaaacatccccgccgtgatcgccctgaccgaccccgagggctgcccactgagccggtttaaggatagcctgggaaacccaacccacatcctgagaatcggcgagagctataaggagaagcagcggaccatccaggccaagaaggaggtggagcagcggagagccggcggctacagccggaagtacgccagcaaagccaagaatctggcagacgatatggtgagaaacaccgctagagatctgctgtactacgccgtgacccaggatgccatgctgatcttcgccaacctgagccggggcttcggccggcagggcaagcggaccttcatggccgagagacagtacacacggatggaggactggctgaccgccaagctggcctacgagggcctgagcaagacctacctgtccaagacactggcccagtacacctccaagacatgcagcaactgtgggtttaccatcaccagcgccgactacgacagggtgctggagaagctgaagaagacagcaacaggctggatgaccacaattaacggcaaggagctgaaggtggagggccagattacctactacaacagatacaagagacagaacgtagtcaaggacctgtccgtcgagctggatagactgagcgaagaatctgtgaacaacgacatctcctcctggacaaagggcagaagcggagaagctctgagcctcctgaagaaaagattctcccatagacccgtgcaggagaagttcgtgtgcctgaactgcggcttcgagacacacgcagccgagcaagccgccctgaacatcgccagatcctggctgttcctgcggagccaggagtacaagaaataccagacaaacaagacaaccggcaacaccgataagagagccttcgtcgagacctggcagtccttttaccggaagaagcttaaggaggtgtggaaacctgccgtgcggtctggcggatctggcggaggctcctttccagggcctgatgaccttcgaggacgtgaccgtggagttcacccagtgggagtggggccagctggaccccgcccagaaggacctgtacagggaggtgatgctggagaacttcaggaacctggccagcctgggcctgcccctgagcaagccctacgtgatctgccagctggaggagggccaggagccctgcatgctggagaaggagatcagcgtgggcacccagagcgtgggcgaggccaccggatctggctccggcagcggccccaagaaaaagagaaaagtctaagctgccttctgcggggcttgccttctggccatgcccttcttctctcccttgcacctgtacctcttggtctttgaataaagcctgagtaggaaggctagcaaaaaaaaaaaaaaaaaaaaaaaaaaaaaaaaaaaaaaaaaaaaaaaaaaaaaaaaaaaaaaaaaaaaaaaaaaaaaaaa

SEQ ID NO: 16093 - RNA, 9485 nt, synthetic construct
  source 1..9485: mol_type = other RNA
aggaaataagagagaaaagaagagtaagaagaaatataagagccaccatggcccctaagaagaagcgtaaagtgagccggatggaacgcctcgtctacgaggtgcggcagaagtgcagaaacatcgaggacatctgcatctcctgcggatctctgaacgtgaccctggagcacccactgttcatcggcggcatgtgccagaactgtaaaaactgttttctggagtgtgcctatcaatacgacgatgacggctaccagagctactgcaccatctgttgcggcggaagagaggtgctgatgtgtggaaataacaactgctgccggtgcttctgcgtggaatgcgtggacctgctggtgggccccggcgccgcccaggccgctattaaggaagatccttggaactgctacatgtgcggccacaagggcacatacggcctgctgagacggagagaggactggcctagcagactgcagatgttcttcgccaataaccacgaccaggagttcgacccccctaaggtgtaccctcccgtccccgccgagaagagaaagcccatccgggtcctgagcctgttcgatggcatcgccaccggtctgctggtgctgaaggacctgggcatccaggtggataggtacattgcctccgaggtgtgcgaggactccatcaccgtgggaatggtgcgtcatcagggcaagatcatgtacgtgggcgacgtgcggagcgtgacacagaagcatatccaggagtggggccctttcgacctggtgatcggcggcagcccttgcaatgacctgagcatcgtgaacccagcccggaagggcctgtacgagggaaccggcagactgttcttcgagttttacagactgctgcacgacgcccggcctaaggaaggcgacgaccggcccttcttttggctgttcgagaatgtggtggccatgggagtcagcgacaagcgggatattagccggttcctggagagcaaccccgtgatgatcgatgccaaggaagtgagcgccgcccaccgggccagatacttctggggcaatctgcctggcatgaacagacccctggccagcaccgtgaacgacaagctggagctgcaggagtgcctggagcacggccggatcgccaagttcagcaaggtgagaaccatcaccacccgaagcaacagcatcaaacaaggcaaggaccagcactttcctgtgttcatgaacgagaaggaggacatcctgtggtgtaccgagatggagagagtgttcgggttcccagtccactacacagatgtcagcaacatgtctagactggccagacagagactgctgggaagaagctggtccgtccctgtgatcagacacctgttcgcccctctgaaggagtacttcgcctgcgtgagcagcggcaacagcaacgccaacagccggggccccagcttctctagcggcctggtgccactgtccctgagagggagccacatgggccccatggagatctacaaaaccgtgagcgcctggaagcggcagcctgtgcgcgtgctgagcctgtttcggaatatcgataaagtcctgaaaagcctgggattcctggagagcggctctggctccggcggtggcaccctgaagtacgtggaggatgtgacaaacgtggtcagacgggatgtggagaagtggggccccttcgatctggtgtacggcagcacccaacccctgggcagctcttgtgaccggtgccctggctggtacatgtttcagttccaccggatcctgcagtacgccctgccgagacaggagtcccagcggccattcttttggattttcatggacaacttgctgctgaccgaggatgaccaggaaactaccactcggttcctgcagaccgaagccgtgaccctgcaggacgtgagaggccgggactaccagaacgccatgcgggtgtggtccaacatccctggactgaaaagcaagcacgcacctctgacccctaaagaagaggagtacctgcaggcccaggtgcggagcagaagcaagctggacgcccctaaggtggatctgctggtgaagaattgcctcctgcccctgagagagtacttcaagtatttcagccagaatagtctgcccctgggaggcagcggcggcggcgccctggtgacatttgaggacgtcgccgtgcggttcacccaggaggaatgggctctgctggatccttctcagaaaatcctgtaccgggacgtgatgagagagacataccggaatctgacctccgtgggcatcaactgggaatgttgggaccttgaagcctgcttcagaagcctgggaagaaacctgagagtgcaggtggtgaagagaaagtgcgagctgaccaacagcggcccctgcgccgagggcggcccaagcagcggcgcccctcctcccagcggcggcagcccagccggctccccaacctctaccgaggagggcacctctgagtccgccacccccgagagcggccctggcacctccaccgagcccagcgagggcagcgcacccggcagccctgccggcagccccacctccacagaggagggaaccagcaccgagcccagcgaaggcagcgccccaggcaccagcaccgagcctagtgagcaggagattaaacggatcaacaagatcagaagaagacttgtgaaagacagcaacaccaagaaggccggcaagacaggccccatgaaaaccctgctggttagagtgatgacacccgatctgagagagcggctggaaaacctgagaaagaagcctgaaaatatcccccagcccatcagcaatacatctagagccaacctgaataagctgctgaccgattacaccgaaatgaagaaggcgatcctgcatgtgtactgggaagagttccagaaggaccctgtgggcctgatgagccgggtggcccagcctgccagcaagaagatcgatcagaacaagctgaaacctgagatggacgagaagggcaacctgaccaccgccggctttgcctgctctcagtgtggccagcccctgttcgtgtacaagctggagcaggtgtctgagaagggcaaggcttacaccaactacttcggacggtgcaatgtggccgagcacgaaaagctgatcctgctggcccagctgaagcccgagaaggatagcgacgaagccgtgacatatagcctgggaaagtttgggcagagggccctggatttctacagcattcatgtgaccaaggagtccacccaccccgtgaagcccctggcccagatcgccggaaacagatacgcctccggacctgtgggaaaggccctgagcgacgcatgtatgggcacaatcgcctccttcctgtctaagtaccaggacatcatcatcgaacaccagaaggtggtgaagggcaaccagaagagactggagagcctgcgggagctggccggcaaggaaaacctggaataccctagcgtgaccctgccacctcagcctcacaccaaggagggcgttgatgcctacaacgaagtgatcgcccgggtgcgaatgtgggtgaacctgaacctgtggcagaagctgaagctaagcagagatgatgccaagcctctgctgagactgaagggattcccttcctttcctctggtcgagagacaggccaacgaagtggactggtgggacatggtgtgtaacgtgaagaagctgatcaacgagaaaaaggaggatggcaaggtgttttggcagaatctggctggctacaagagacaggaagccctgagaccatacctgagcagcgaggaagatcggaagaagggaaagaaattcgctcggtaccagctgggcgacctgctgctgcacctggaaaagaagcacggcgaggactggggaaaggtgtacgacgaggcctgggagcggattgacaagaaagtggaaggcctgagcaagcacatcaagctggaagaggaacggagaagcgaggacgcccagagcaaggccgccctgaccgactggctgcgggctaaggccagcttcgtgatcgagggcctgaaggaggccgacaaggacgagttctgcagatgcgagctgaagctgcagaagtggtacggggacctgcggggaaagcccttcgccatcgaagccgagaacagcatcctggacatcagcggcttcagcaagcagtacaactgtgccttcatctggcagaaggacggcgtgaagaagctgaacctgtacctgatcatcaactacttcaagggcggcaagctgcggttcaagaagatcaaacctgaagccttcgaagccaacagattctacaccgtgatcaacaaaaagagcggcgagatcgtgcccatggaggtgaacttcaacttcgacgaccccaacctgatcatcctgcctctggcctttggcaagagacagggcagagaattcatctggaacgacctgctgtccctggaaaccggcagcctgaagctggccaacggaagagtgatcgagaagacactgtacaacagaagaacccggcaggatgagcctgccctgttcgtggccctgaccttcgagcggcgggaggtcctggactcctccaatatcaaaccaatgaacctgatcggcgtggcaagaggcgaaaacatccccgccgtgatcgccctgaccgaccccgagggctgcccactgagccggtttaaggatagcctgggaaacccaacccacatcctgagaatcggcgagagctataaggagaagcagcggaccatccaggccaagaaggaggtggagcagcggagagccggcggctacagccggaagtacgccagcaaagccaagaatctggcagacgatatggtgagaaacaccgctagagatctgctgtactacgccgtgacccaggatgccatgctgatcttcgccaacctgagccggggcttcggccggcagggcaagcggaccttcatggccgagagacagtacacacggatggaggactggctgaccgccaagctggcctacgagggcctgagcaagacctacctgtccaagacactggcccagtacacctccaagacatgcagcaactgtgggtttaccatcaccagcgccgactacgacagggtgctggagaagctgaagaagacagcaacaggctggatgaccacaattaacggcaaggagctgaaggtggagggccagattacctactacaacagatacaagagacagaacgtagtcaaggacctgtccgtcgagctggatagactgagcgaagaatctgtgaacaacgacatctcctcctggacaaagggcagaagcggagaagctctgagcctcctgaagaaaagattctcccatagacccgtgcaggagaagttcgtgtgcctgaactgcggcttcgagacacacgcagccgagcaagccgccctgaacatcgccagatcctggctgttcctgcggagccaggagtacaagaaataccagacaaacaagacaaccggcaacaccgataagagagccttcgtcgagacctggcagtccttttaccggaagaagcttaaggaggtgtggaaacctgccgtgcggtctggcggatctggcggaggctccagcgaggagagcgtgaccttcgaggacgtggccatctacttcagcgagaacgagtggaccggcctggcccccgcccagagggtgctgtacagggacgtgatgctggagaactacggcgccgtggccgccctggccgccttccccttccccaagcccgccctgatcagccagctggagaggggcgaggccccctggtgcaaggccccccagggcgccctggacggcgagggccccaggggcatcggcggcccaagcagcggcgcccctcctcccagcggcggcagcccagccggctccccaacctctaccgaggagggcacctctgagtccgccacccccgagagcggccctggcacctccaccgagcccagcgagggcagcgcacccggcagccctgccggcagccccacctccacagaggagggaaccagcaccgagcccagcgaaggcagcgccccaggcaccagcaccgagcctagtgagcaggagattaaacggatcaacaagatcagaagaagacttgtgaaagacagcaacaccaagaaggccggcaagacaggccccatgaaaaccctgctggttagagtgatgacacccgatctgagagagcggctggaaaacctgagaaagaagcctgaaaatatcccccagcccatcagcaatacatctagagccaacctgaataagctgctgaccgattacaccgaaatgaagaaggcgatcctgcatgtgtactgggaagagttccagaaggaccctgtgggcctgatgagccgggtggcccagcctgccagcaagaagatcgatcagaacaagctgaaacctgagatggacgagaagggcaacctgaccaccgccggctttgcctgctctcagtgtggccagcccctgttcgtgtacaagctggagcaggtgtctgagaagggcaaggcttacaccaactacttcggacggtgcaatgtggccgagcacgaaaagctgatcctgctggcccagctgaagcccgagaaggatagcgacgaagccgtgacatatagcctgggaaagtttgggcagagggccctggatttctacagcattcatgtgaccaaggagtccacccaccccgtgaagcccctggcccagatcgccggaaacagatacgcctccggacctgtgggaaaggccctgagcgacgcatgtatgggcacaatcgcctccttcctgtctaagtaccaggacatcatcatcgaacaccagaaggtggtgaagggcaaccagaagagactggagagcctgcgggagctggccggcaaggaaaacctggaataccctagcgtgaccctgccacctcagcctcacaccaaggagggcgttgatgcctacaacgaagtgatcgcccgggtgcgaatgtgggtgaacctgaacctgtggcagaagctgaagctaagcagagatgatgccaagcctctgctgagactgaagggattcccttcctttcctctggtcgagagacaggccaacgaagtggactggtgggacatggtgtgtaacgtgaagaagctgatcaacgagaaaaaggaggatggcaaggtgttttggcagaatctggctggctacaagagacaggaagccctgagaccatacctgagcagcgaggaagatcggaagaagggaaagaaattcgctcggtaccagctgggcgacctgctgctgcacctggaaaagaagcacggcgaggactggggaaaggtgtacgacgaggcctgggagcggattgacaagaaagtggaaggcctgagcaagcacatcaagctggaagaggaacggagaagcgaggacgcccagagcaaggccgccctgaccgactggctgcgggctaaggccagcttcgtgatcgagggcctgaaggaggccgacaaggacgagttctgcagatgcgagctgaagctgcagaagtggtacggggacctgcggggaaagcccttcgccatcgaagccgagaacagcatcctggacatcagcggcttcagcaagcagtacaactgtgccttcatctggcagaaggacggcgtgaagaagctgaacctgtacctgatcatcaactacttcaagggcggcaagctgcggttcaagaagatcaaacctgaagccttcgaagccaacagattctacaccgtgatcaacaaaaagagcggcgagatcgtgcccatggaggtgaacttcaacttcgacgaccccaacctgatcatcctgcctctggcctttggcaagagacagggcagagaattcatctggaacgacctgctgtccctggaaaccggcagcctgaagctggccaacggaagagtgatcgagaagacactgtacaacagaagaacccggcaggatgagcctgccctgttcgtggccctgaccttcgagcggcgggaggtcctggactcctccaatatcaaaccaatgaacctgatcggcgtggcaagaggcgaaaacatccccgccgtgatcgccctgaccgaccccgagggctgcccactgagccggtttaaggatagcctgggaaacccaacccacatcctgagaatcggcgagagctataaggagaagcagcggaccatccaggccaagaaggaggtggagcagcggagagccggcggctacagccggaagtacgccagcaaagccaagaatctggcagacgatatggtgagaaacaccgctagagatctgctgtactacgccgtgacccaggatgccatgctgatcttcgccaacctgagccggggcttcggccggcagggcaagcggaccttcatggccgagagacagtacacacggatggaggactggctgaccgccaagctggcctacgagggcctgagcaagacctacctgtccaagacactggcccagtacacctccaagacatgcagcaactgtgggtttaccatcaccagcgccgactacgacagggtgctggagaagctgaagaagacagcaacaggctggatgaccacaattaacggcaaggagctgaaggtggagggccagattacctactacaacagatacaagagacagaacgtagtcaaggacctgtccgtcgagctggatagactgagcgaagaatctgtgaacaacgacatctcctcctggacaaagggcagaagcggagaagctctgagcctcctgaagaaaagattctcccatagacccgtgcaggagaagttcgtgtgcctgaactgcggcttcgagacacacgcagccgagcaagccgccctgaacatcgccagatcctggctgttcctgcggagccaggagtacaagaaataccagacaaacaagacaaccggcaacaccgataagagagccttcgtcgagacctggcagtccttttaccggaagaagcttaaggaggtgtggaaacctgccgtgcggtctggcggatctggcggaggctcctagcgaggagagcgtgaccttcgaggacgtggccatctacttcagcgagaacgagtggaccggcctggcccccgcccagagggtgctgtacagggacgtgatgctggagaactacggcgccgtggccgccctggccgccttccccttccccaagcccgccctgatcagccagctggagaggggcgaggccccctggtgcaaggccccccagggcgccctggacggcgagggccccaggggcatcggatctggctccggcagcggccccaagaaaaagagaaaagtctaagctgccttctgcggggcttgccttctggccatgcccttcttctctcccttgcacctgtacctcttggtctttgaataaagcctgagtaggaaggctagcaaaaaaaaaaaaaaaaaaaaaaaaaaaaaaaaaaaaaaaaaaaaaaaaaaaaaaaaaaaaaaaaaaaaaaaaaaaaaaaa

SEQ ID NO: 16094 - RNA, 9479 nt, synthetic construct
  source 1..9479: mol_type = other RNA
aggaaataagagagaaaagaagagtaagaagaaatataagagccaccatggcccctaagaagaagcgtaaagtgagccggatggaacgcctcgtctacgaggtgcggcagaagtgcagaaacatcgaggacatctgcatctcctgcggatctctgaacgtgaccctggagcacccactgttcatcggcggcatgtgccagaactgtaaaaactgttttctggagtgtgcctatcaatacgacgatgacggctaccagagctactgcaccatctgttgcggcggaagagaggtgctgatgtgtggaaataacaactgctgccggtgcttctgcgtggaatgcgtggacctgctggtgggccccggcgccgcccaggccgctattaaggaagatccttggaactgctacatgtgcggccacaagggcacatacggcctgctgagacggagagaggactggcctagcagactgcagatgttcttcgccaataaccacgaccaggagttcgacccccctaaggtgtaccctcccgtccccgccgagaagagaaagcccatccgggtcctgagcctgttcgatggcatcgccaccggtctgctggtgctgaaggacctgggcatccaggtggataggtacattgcctccgaggtgtgcgaggactccatcaccgtgggaatggtgcgtcatcagggcaagatcatgtacgtgggcgacgtgcggagcgtgacacagaagcatatccaggagtggggccctttcgacctggtgatcggcggcagcccttgcaatgacctgagcatcgtgaacccagcccggaagggcctgtacgagggaaccggcagactgttcttcgagttttacagactgctgcacgacgcccggcctaaggaaggcgacgaccggcccttcttttggctgttcgagaatgtggtggccatgggagtcagcgacaagcgggatattagccggttcctggagagcaaccccgtgatgatcgatgccaaggaagtgagcgccgcccaccgggccagatacttctggggcaatctgcctggcatgaacagacccctggccagcaccgtgaacgacaagctggagctgcaggagtgcctggagcacggccggatcgccaagttcagcaaggtgagaaccatcaccacccgaagcaacagcatcaaacaaggcaaggaccagcactttcctgtgttcatgaacgagaaggaggacatcctgtggtgtaccgagatggagagagtgttcgggttcccagtccactacacagatgtcagcaacatgtctagactggccagacagagactgctgggaagaagctggtccgtccctgtgatcagacacctgttcgcccctctgaaggagtacttcgcctgcgtgagcagcggcaacagcaacgccaacagccggggccccagcttctctagcggcctggtgccactgtccctgagagggagccacatgggccccatggagatctacaaaaccgtgagcgcctggaagcggcagcctgtgcgcgtgctgagcctgtttcggaatatcgataaagtcctgaaaagcctgggattcctggagagcggctctggctccggcggtggcaccctgaagtacgtggaggatgtgacaaacgtggtcagacgggatgtggagaagtggggccccttcgatctggtgtacggcagcacccaacccctgggcagctcttgtgaccggtgccctggctggtacatgtttcagttccaccggatcctgcagtacgccctgccgagacaggagtcccagcggccattcttttggattttcatggacaacttgctgctgaccgaggatgaccaggaaactaccactcggttcctgcagaccgaagccgtgaccctgcaggacgtgagaggccgggactaccagaacgccatgcgggtgtggtccaacatccctggactgaaaagcaagcacgcacctctgacccctaaagaagaggagtacctgcaggcccaggtgcggagcagaagcaagctggacgcccctaaggtggatctgctggtgaagaattgcctcctgcccctgagagagtacttcaagtatttcagccagaatagtctgcccctgggaggcagcggcggcggcgccctggtgacatttgaggacgtcgccgtgcggttcacccaggaggaatgggctctgctggatccttctcagaaaatcctgtaccgggacgtgatgagagagacataccggaatctgacctccgtgggcatcaactgggaatgttgggaccttgaagcctgcttcagaagcctgggaagaaacctgagagtgcaggtggtgaagagaaagtgcgagctgaccaacagcggcccctgcgccgagggcggcccaagcagcggcgcccctcctcccagcggcggcagcccagccggctccccaacctctaccgaggagggcacctctgagtccgccacccccgagagcggccctggcacctccaccgagcccagcgagggcagcgcacccggcagccctgccggcagccccacctccacagaggagggaaccagcaccgagcccagcgaaggcagcgccccaggcaccagcaccgagcctagtgagcaggagattaaacggatcaacaagatcagaagaagacttgtgaaagacagcaacaccaagaaggccggcaagacaggccccatgaaaaccctgctggttagagtgatgacacccgatctgagagagcggctggaaaacctgagaaagaagcctgaaaatatcccccagcccatcagcaatacatctagagccaacctgaataagctgctgaccgattacaccgaaatgaagaaggcgatcctgcatgtgtactgggaagagttccagaaggaccctgtgggcctgatgagccgggtggcccagcctgccagcaagaagatcgatcagaacaagctgaaacctgagatggacgagaagggcaacctgaccaccgccggctttgcctgctctcagtgtggccagcccctgttcgtgtacaagctggagcaggtgtctgagaagggcaaggcttacaccaactacttcggacggtgcaatgtggccgagcacgaaaagctgatcctgctggcccagctgaagcccgagaaggatagcgacgaagccgtgacatatagcctgggaaagtttgggcagagggccctggatttctacagcattcatgtgaccaaggagtccacccaccccgtgaagcccctggcccagatcgccggaaacagatacgcctccggacctgtgggaaaggccctgagcgacgcatgtatgggcacaatcgcctccttcctgtctaagtaccaggacatcatcatcgaacaccagaaggtggtgaagggcaaccagaagagactggagagcctgcgggagctggccggcaaggaaaacctggaataccctagcgtgaccctgccacctcagcctcacaccaaggagggcgttgatgcctacaacgaagtgatcgcccgggtgcgaatgtgggtgaacctgaacctgtggcagaagctgaagctaagcagagatgatgccaagcctctgctgagactgaagggattcccttcctttcctctggtcgagagacaggccaacgaagtggactggtgggacatggtgtgtaacgtgaagaagctgatcaacgagaaaaaggaggatggcaaggtgttttggcagaatctggctggctacaagagacaggaagccctgagaccatacctgagcagcgaggaagatcggaagaagggaaagaaattcgctcggtaccagctgggcgacctgctgctgcacctggaaaagaagcacggcgaggactggggaaaggtgtacgacgaggcctgggagcggattgacaagaaagtggaaggcctgagcaagcacatcaagctggaagaggaacggagaagcgaggacgcccagagcaaggccgccctgaccgactggctgcgggctaaggccagcttcgtgatcgagggcctgaaggaggccgacaaggacgagttctgcagatgcgagctgaagctgcagaagtggtacggggacctgcggggaaagcccttcgccatcgaagccgagaacagcatcctggacatcagcggcttcagcaagcagtacaactgtgccttcatctggcagaaggacggcgtgaagaagctgaacctgtacctgatcatcaactacttcaagggcggcaagctgcggttcaagaagatcaaacctgaagccttcgaagccaacagattctacaccgtgatcaacaaaaagagcggcgagatcgtgcccatggaggtgaacttcaacttcgacgaccccaacctgatcatcctgcctctggcctttggcaagagacagggcagagaattcatctggaacgacctgctgtccctggaaaccggcagcctgaagctggccaacggaagagtgatcgagaagacactgtacaacagaagaacccggcaggatgagcctgccctgttcgtggccctgaccttcgagcggcgggaggtcctggactcctccaatatcaaaccaatgaacctgatcggcgtggcaagaggcgaaaacatccccgccgtgatcgccctgaccgaccccgagggctgcccactgagccggtttaaggatagcctgggaaacccaacccacatcctgagaatcggcgagagctataaggagaagcagcggaccatccaggccaagaaggaggtggagcagcggagagccggcggctacagccggaagtacgccagcaaagccaagaatctggcagacgatatggtgagaaacaccgctagagatctgctgtactacgccgtgacccaggatgccatgctgatcttcgccaacctgagccggggcttcggccggcagggcaagcggaccttcatggccgagagacagtacacacggatggaggactggctgaccgccaagctggcctacgagggcctgagcaagacctacctgtccaagacactggcccagtacacctccaagacatgcagcaactgtgggtttaccatcaccagcgccgactacgacagggtgctggagaagctgaagaagacagcaacaggctggatgaccacaattaacggcaaggagctgaaggtggagggccagattacctactacaacagatacaagagacagaacgtagtcaaggacctgtccgtcgagctggatagactgagcgaagaatctgtgaacaacgacatctcctcctggacaaagggcagaagcggagaagctctgagcctcctgaagaaaagattctcccatagacccgtgcaggagaagttcgtgtgcctgaactgcggcttcgagacacacgcagccgagcaagccgccctgaacatcgccagatcctggctgttcctgcggagccaggagtacaagaaataccagacaaacaagacaaccggcaacaccgataagagagccttcgtcgagacctggcagtccttttaccggaagaagcttaaggaggtgtggaaacctgccgtgcggtctggcggatctggcggaggctccgagcccctgaagttcagagacgtggccatcgagttcagcctggaggagtggcagtgcctggacaccatccagcagaacctgtacagaaacgtgatgctggagaactacagaaacctggtgttcctgggcatcgtggtgagcaagcccgacctgatcacctgcctggagcaggagaaggagccctggaccagaaagagacacagaatggtggccgagccccccgtgatctgcagccacttcggcggcccaagcagcggcgcccctcctcccagcggcggcagcccagccggctccccaacctctaccgaggagggcacctctgagtccgccacccccgagagcggccctggcacctccaccgagcccagcgagggcagcgcacccggcagccctgccggcagccccacctccacagaggagggaaccagcaccgagcccagcgaaggcagcgccccaggcaccagcaccgagcctagtgagcaggagattaaacggatcaacaagatcagaagaagacttgtgaaagacagcaacaccaagaaggccggcaagacaggccccatgaaaaccctgctggttagagtgatgacacccgatctgagagagcggctggaaaacctgagaaagaagcctgaaaatatcccccagcccatcagcaatacatctagagccaacctgaataagctgctgaccgattacaccgaaatgaagaaggcgatcctgcatgtgtactgggaagagttccagaaggaccctgtgggcctgatgagccgggtggcccagcctgccagcaagaagatcgatcagaacaagctgaaacctgagatggacgagaagggcaacctgaccaccgccggctttgcctgctctcagtgtggccagcccctgttcgtgtacaagctggagcaggtgtctgagaagggcaaggcttacaccaactacttcggacggtgcaatgtggccgagcacgaaaagctgatcctgctggcccagctgaagcccgagaaggatagcgacgaagccgtgacatatagcctgggaaagtttgggcagagggccctggatttctacagcattcatgtgaccaaggagtccacccaccccgtgaagcccctggcccagatcgccggaaacagatacgcctccggacctgtgggaaaggccctgagcgacgcatgtatgggcacaatcgcctccttcctgtctaagtaccaggacatcatcatcgaacaccagaaggtggtgaagggcaaccagaagagactggagagcctgcgggagctggccggcaaggaaaacctggaataccctagcgtgaccctgccacctcagcctcacaccaaggagggcgttgatgcctacaacgaagtgatcgcccgggtgcgaatgtgggtgaacctgaacctgtggcagaagctgaagctaagcagagatgatgccaagcctctgctgagactgaagggattcccttcctttcctctggtcgagagacaggccaacgaagtggactggtgggacatggtgtgtaacgtgaagaagctgatcaacgagaaaaaggaggatggcaaggtgttttggcagaatctggctggctacaagagacaggaagccctgagaccatacctgagcagcgaggaagatcggaagaagggaaagaaattcgctcggtaccagctgggcgacctgctgctgcacctggaaaagaagcacggcgaggactggggaaaggtgtacgacgaggcctgggagcggattgacaagaaagtggaaggcctgagcaagcacatcaagctggaagaggaacggagaagcgaggacgcccagagcaaggccgccctgaccgactggctgcgggctaaggccagcttcgtgatcgagggcctgaaggaggccgacaaggacgagttctgcagatgcgagctgaagctgcagaagtggtacggggacctgcggggaaagcccttcgccatcgaagccgagaacagcatcctggacatcagcggcttcagcaagcagtacaactgtgccttcatctggcagaaggacggcgtgaagaagctgaacctgtacctgatcatcaactacttcaagggcggcaagctgcggttcaagaagatcaaacctgaagccttcgaagccaacagattctacaccgtgatcaacaaaaagagcggcgagatcgtgcccatggaggtgaacttcaacttcgacgaccccaacctgatcatcctgcctctggcctttggcaagagacagggcagagaattcatctggaacgacctgctgtccctggaaaccggcagcctgaagctggccaacggaagagtgatcgagaagacactgtacaacagaagaacccggcaggatgagcctgccctgttcgtggccctgaccttcgagcggcgggaggtcctggactcctccaatatcaaaccaatgaacctgatcggcgtggcaagaggcgaaaacatccccgccgtgatcgccctgaccgaccccgagggctgcccactgagccggtttaaggatagcctgggaaacccaacccacatcctgagaatcggcgagagctataaggagaagcagcggaccatccaggccaagaaggaggtggagcagcggagagccggcggctacagccggaagtacgccagcaaagccaagaatctggcagacgatatggtgagaaacaccgctagagatctgctgtactacgccgtgacccaggatgccatgctgatcttcgccaacctgagccggggcttcggccggcagggcaagcggaccttcatggccgagagacagtacacacggatggaggactggctgaccgccaagctggcctacgagggcctgagcaagacctacctgtccaagacactggcccagtacacctccaagacatgcagcaactgtgggtttaccatcaccagcgccgactacgacagggtgctggagaagctgaagaagacagcaacaggctggatgaccacaattaacggcaaggagctgaaggtggagggccagattacctactacaacagatacaagagacagaacgtagtcaaggacctgtccgtcgagctggatagactgagcgaagaatctgtgaacaacgacatctcctcctggacaaagggcagaagcggagaagctctgagcctcctgaagaaaagattctcccatagacccgtgcaggagaagttcgtgtgcctgaactgcggcttcgagacacacgcagccgagcaagccgccctgaacatcgccagatcctggctgttcctgcggagccaggagtacaagaaataccagacaaacaagacaaccggcaacaccgataagagagccttcgtcgagacctggcagtccttttaccggaagaagcttaaggaggtgtggaaacctgccgtgcggtctggcggatctggcggaggctcctgagcccctgaagttcagagacgtggccatcgagttcagcctggaggagtggcagtgcctggacaccatccagcagaacctgtacagaaacgtgatgctggagaactacagaaacctggtgttcctgggcatcgtggtgagcaagcccgacctgatcacctgcctggagcaggagaaggagccctggaccagaaagagacacagaatggtggccgagccccccgtgatctgcagccacttcggatctggctccggcagcggccccaagaaaaagagaaaagtctaagctgccttctgcggggcttgccttctggccatgcccttcttctctcccttgcacctgtacctcttggtctttgaataaagcctgagtaggaaggctagcaaaaaaaaaaaaaaaaaaaaaaaaaaaaaaaaaaaaaaaaaaaaaaaaaaaaaaaaaaaaaaaaaaaaaaaaaaaaaaaa

SEQ ID NO: 16095 - RNA, 9485 nt, synthetic construct
  source 1..9485: mol_type = other RNA
aggaaataagagagaaaagaagagtaagaagaaatataagagccaccatggcccctaagaagaagcgtaaagtgagccggatggaacgcctcgtctacgaggtgcggcagaagtgcagaaacatcgaggacatctgcatctcctgcggatctctgaacgtgaccctggagcacccactgttcatcggcggcatgtgccagaactgtaaaaactgttttctggagtgtgcctatcaatacgacgatgacggctaccagagctactgcaccatctgttgcggcggaagagaggtgctgatgtgtggaaataacaactgctgccggtgcttctgcgtggaatgcgtggacctgctggtgggccccggcgccgcccaggccgctattaaggaagatccttggaactgctacatgtgcggccacaagggcacatacggcctgctgagacggagagaggactggcctagcagactgcagatgttcttcgccaataaccacgaccaggagttcgacccccctaaggtgtaccctcccgtccccgccgagaagagaaagcccatccgggtcctgagcctgttcgatggcatcgccaccggtctgctggtgctgaaggacctgggcatccaggtggataggtacattgcctccgaggtgtgcgaggactccatcaccgtgggaatggtgcgtcatcagggcaagatcatgtacgtgggcgacgtgcggagcgtgacacagaagcatatccaggagtggggccctttcgacctggtgatcggcggcagcccttgcaatgacctgagcatcgtgaacccagcccggaagggcctgtacgagggaaccggcagactgttcttcgagttttacagactgctgcacgacgcccggcctaaggaaggcgacgaccggcccttcttttggctgttcgagaatgtggtggccatgggagtcagcgacaagcgggatattagccggttcctggagagcaaccccgtgatgatcgatgccaaggaagtgagcgccgcccaccgggccagatacttctggggcaatctgcctggcatgaacagacccctggccagcaccgtgaacgacaagctggagctgcaggagtgcctggagcacggccggatcgccaagttcagcaaggtgagaaccatcaccacccgaagcaacagcatcaaacaaggcaaggaccagcactttcctgtgttcatgaacgagaaggaggacatcctgtggtgtaccgagatggagagagtgttcgggttcccagtccactacacagatgtcagcaacatgtctagactggccagacagagactgctgggaagaagctggtccgtccctgtgatcagacacctgttcgcccctctgaaggagtacttcgcctgcgtgagcagcggcaacagcaacgccaacagccggggccccagcttctctagcggcctggtgccactgtccctgagagggagccacatgggccccatggagatctacaaaaccgtgagcgcctggaagcggcagcctgtgcgcgtgctgagcctgtttcggaatatcgataaagtcctgaaaagcctgggattcctggagagcggctctggctccggcggtggcaccctgaagtacgtggaggatgtgacaaacgtggtcagacgggatgtggagaagtggggccccttcgatctggtgtacggcagcacccaacccctgggcagctcttgtgaccggtgccctggctggtacatgtttcagttccaccggatcctgcagtacgccctgccgagacaggagtcccagcggccattcttttggattttcatggacaacttgctgctgaccgaggatgaccaggaaactaccactcggttcctgcagaccgaagccgtgaccctgcaggacgtgagaggccgggactaccagaacgccatgcgggtgtggtccaacatccctggactgaaaagcaagcacgcacctctgacccctaaagaagaggagtacctgcaggcccaggtgcggagcagaagcaagctggacgcccctaaggtggatctgctggtgaagaattgcctcctgcccctgagagagtacttcaagtatttcagccagaatagtctgcccctgggaggcagcggcggcggcgccctggtgacatttgaggacgtcgccgtgcggttcacccaggaggaatgggctctgctggatccttctcagaaaatcctgtaccgggacgtgatgagagagacataccggaatctgacctccgtgggcatcaactgggaatgttgggaccttgaagcctgcttcagaagcctgggaagaaacctgagagtgcaggtggtgaagagaaagtgcgagctgaccaacagcggcccctgcgccgagggcggcccaagcagcggcgcccctcctcccagcggcggcagcccagccggctccccaacctctaccgaggagggcacctctgagtccgccacccccgagagcggccctggcacctccaccgagcccagcgagggcagcgcacccggcagccctgccggcagccccacctccacagaggagggaaccagcaccgagcccagcgaaggcagcgccccaggcaccagcaccgagcctagtgagcaggagattaaacggatcaacaagatcagaagaagacttgtgaaagacagcaacaccaagaaggccggcaagacaggccccatgaaaaccctgctggttagagtgatgacacccgatctgagagagcggctggaaaacctgagaaagaagcctgaaaatatcccccagcccatcagcaatacatctagagccaacctgaataagctgctgaccgattacaccgaaatgaagaaggcgatcctgcatgtgtactgggaagagttccagaaggaccctgtgggcctgatgagccgggtggcccagcctgccagcaagaagatcgatcagaacaagctgaaacctgagatggacgagaagggcaacctgaccaccgccggctttgcctgctctcagtgtggccagcccctgttcgtgtacaagctggagcaggtgtctgagaagggcaaggcttacaccaactacttcggacggtgcaatgtggccgagcacgaaaagctgatcctgctggcccagctgaagcccgagaaggatagcgacgaagccgtgacatatagcctgggaaagtttgggcagagggccctggatttctacagcattcatgtgaccaaggagtccacccaccccgtgaagcccctggcccagatcgccggaaacagatacgcctccggacctgtgggaaaggccctgagcgacgcatgtatgggcacaatcgcctccttcctgtctaagtaccaggacatcatcatcgaacaccagaaggtggtgaagggcaaccagaagagactggagagcctgcgggagctggccggcaaggaaaacctggaataccctagcgtgaccctgccacctcagcctcacaccaaggagggcgttgatgcctacaacgaagtgatcgcccgggtgcgaatgtgggtgaacctgaacctgtggcagaagctgaagctaagcagagatgatgccaagcctctgctgagactgaagggattcccttcctttcctctggtcgagagacaggccaacgaagtggactggtgggacatggtgtgtaacgtgaagaagctgatcaacgagaaaaaggaggatggcaaggtgttttggcagaatctggctggctacaagagacaggaagccctgagaccatacctgagcagcgaggaagatcggaagaagggaaagaaattcgctcggtaccagctgggcgacctgctgctgcacctggaaaagaagcacggcgaggactggggaaaggtgtacgacgaggcctgggagcggattgacaagaaagtggaaggcctgagcaagcacatcaagctggaagaggaacggagaagcgaggacgcccagagcaaggccgccctgaccgactggctgcgggctaaggccagcttcgtgatcgagggcctgaaggaggccgacaaggacgagttctgcagatgcgagctgaagctgcagaagtggtacggggacctgcggggaaagcccttcgccatcgaagccgagaacagcatcctggacatcagcggcttcagcaagcagtacaactgtgccttcatctggcagaaggacggcgtgaagaagctgaacctgtacctgatcatcaactacttcaagggcggcaagctgcggttcaagaagatcaaacctgaagccttcgaagccaacagattctacaccgtgatcaacaaaaagagcggcgagatcgtgcccatggaggtgaacttcaacttcgacgaccccaacctgatcatcctgcctctggcctttggcaagagacagggcagagaattcatctggaacgacctgctgtccctggaaaccggcagcctgaagctggccaacggaagagtgatcgagaagacactgtacaacagaagaacccggcaggatgagcctgccctgttcgtggccctgaccttcgagcggcgggaggtcctggactcctccaatatcaaaccaatgaacctgatcggcgtggcaagaggcgaaaacatccccgccgtgatcgccctgaccgaccccgagggctgcccactgagccggtttaaggatagcctgggaaacccaacccacatcctgagaatcggcgagagctataaggagaagcagcggaccatccaggccaagaaggaggtggagcagcggagagccggcggctacagccggaagtacgccagcaaagccaagaatctggcagacgatatggtgagaaacaccgctagagatctgctgtactacgccgtgacccaggatgccatgctgatcttcgccaacctgagccggggcttcggccggcagggcaagcggaccttcatggccgagagacagtacacacggatggaggactggctgaccgccaagctggcctacgagggcctgagcaagacctacctgtccaagacactggcccagtacacctccaagacatgcagcaactgtgggtttaccatcaccagcgccgactacgacagggtgctggagaagctgaagaagacagcaacaggctggatgaccacaattaacggcaaggagctgaaggtggagggccagattacctactacaacagatacaagagacagaacgtagtcaaggacctgtccgtcgagctggatagactgagcgaagaatctgtgaacaacgacatctcctcctggacaaagggcagaagcggagaagctctgagcctcctgaagaaaagattctcccatagacccgtgcaggagaagttcgtgtgcctgaactgcggcttcgagacacacgcagccgagcaagccgccctgaacatcgccagatcctggctgttcctgcggagccaggagtacaagaaataccagacaaacaagacaaccggcaacaccgataagagagccttcgtcgagacctggcagtccttttaccggaagaagcttaaggaggtgtggaaacctgccgtgcggtctggcggatctggcggaggctccctgctgaccttcgaggacgtggccgtgagcttcagcgaggaggagtggaagctgctggaccccgcccagaagatcctgtacaacgacgtgatgcaggagaactacgagaccgtgatcagcctgggcctgaagctgaagaacgacaccggcaacgaccagcccatcagcgtgagcgccctggagatccaggccagcggcaggaaggtgctgaggaaggccaggatgaaggtggcccagaagaccggcggcccaagcagcggcgcccctcctcccagcggcggcagcccagccggctccccaacctctaccgaggagggcacctctgagtccgccacccccgagagcggccctggcacctccaccgagcccagcgagggcagcgcacccggcagccctgccggcagccccacctccacagaggagggaaccagcaccgagcccagcgaaggcagcgccccaggcaccagcaccgagcctagtgagcaggagattaaacggatcaacaagatcagaagaagacttgtgaaagacagcaacaccaagaaggccggcaagacaggccccatgaaaaccctgctggttagagtgatgacacccgatctgagagagcggctggaaaacctgagaaagaagcctgaaaatatcccccagcccatcagcaatacatctagagccaacctgaataagctgctgaccgattacaccgaaatgaagaaggcgatcctgcatgtgtactgggaagagttccagaaggaccctgtgggcctgatgagccgggtggcccagcctgccagcaagaagatcgatcagaacaagctgaaacctgagatggacgagaagggcaacctgaccaccgccggctttgcctgctctcagtgtggccagcccctgttcgtgtacaagctggagcaggtgtctgagaagggcaaggcttacaccaactacttcggacggtgcaatgtggccgagcacgaaaagctgatcctgctggcccagctgaagcccgagaaggatagcgacgaagccgtgacatatagcctgggaaagtttgggcagagggccctggatttctacagcattcatgtgaccaaggagtccacccaccccgtgaagcccctggcccagatcgccggaaacagatacgcctccggacctgtgggaaaggccctgagcgacgcatgtatgggcacaatcgcctccttcctgtctaagtaccaggacatcatcatcgaacaccagaaggtggtgaagggcaaccagaagagactggagagcctgcgggagctggccggcaaggaaaacctggaataccctagcgtgaccctgccacctcagcctcacaccaaggagggcgttgatgcctacaacgaagtgatcgcccgggtgcgaatgtgggtgaacctgaacctgtggcagaagctgaagctaagcagagatgatgccaagcctctgctgagactgaagggattcccttcctttcctctggtcgagagacaggccaacgaagtggactggtgggacatggtgtgtaacgtgaagaagctgatcaacgagaaaaaggaggatggcaaggtgttttggcagaatctggctggctacaagagacaggaagccctgagaccatacctgagcagcgaggaagatcggaagaagggaaagaaattcgctcggtaccagctgggcgacctgctgctgcacctggaaaagaagcacggcgaggactggggaaaggtgtacgacgaggcctgggagcggattgacaagaaagtggaaggcctgagcaagcacatcaagctggaagaggaacggagaagcgaggacgcccagagcaaggccgccctgaccgactggctgcgggctaaggccagcttcgtgatcgagggcctgaaggaggccgacaaggacgagttctgcagatgcgagctgaagctgcagaagtggtacggggacctgcggggaaagcccttcgccatcgaagccgagaacagcatcctggacatcagcggcttcagcaagcagtacaactgtgccttcatctggcagaaggacggcgtgaagaagctgaacctgtacctgatcatcaactacttcaagggcggcaagctgcggttcaagaagatcaaacctgaagccttcgaagccaacagattctacaccgtgatcaacaaaaagagcggcgagatcgtgcccatggaggtgaacttcaacttcgacgaccccaacctgatcatcctgcctctggcctttggcaagagacagggcagagaattcatctggaacgacctgctgtccctggaaaccggcagcctgaagctggccaacggaagagtgatcgagaagacactgtacaacagaagaacccggcaggatgagcctgccctgttcgtggccctgaccttcgagcggcgggaggtcctggactcctccaatatcaaaccaatgaacctgatcggcgtggcaagaggcgaaaacatccccgccgtgatcgccctgaccgaccccgagggctgcccactgagccggtttaaggatagcctgggaaacccaacccacatcctgagaatcggcgagagctataaggagaagcagcggaccatccaggccaagaaggaggtggagcagcggagagccggcggctacagccggaagtacgccagcaaagccaagaatctggcagacgatatggtgagaaacaccgctagagatctgctgtactacgccgtgacccaggatgccatgctgatcttcgccaacctgagccggggcttcggccggcagggcaagcggaccttcatggccgagagacagtacacacggatggaggactggctgaccgccaagctggcctacgagggcctgagcaagacctacctgtccaagacactggcccagtacacctccaagacatgcagcaactgtgggtttaccatcaccagcgccgactacgacagggtgctggagaagctgaagaagacagcaacaggctggatgaccacaattaacggcaaggagctgaaggtggagggccagattacctactacaacagatacaagagacagaacgtagtcaaggacctgtccgtcgagctggatagactgagcgaagaatctgtgaacaacgacatctcctcctggacaaagggcagaagcggagaagctctgagcctcctgaagaaaagattctcccatagacccgtgcaggagaagttcgtgtgcctgaactgcggcttcgagacacacgcagccgagcaagccgccctgaacatcgccagatcctggctgttcctgcggagccaggagtacaagaaataccagacaaacaagacaaccggcaacaccgataagagagccttcgtcgagacctggcagtccttttaccggaagaagcttaaggaggtgtggaaacctgccgtgcggtctggcggatctggcggaggctcctctgctgaccttcgaggacgtggccgtgagcttcagcgaggaggagtggaagctgctggaccccgcccagaagatcctgtacaacgacgtgatgcaggagaactacgagaccgtgatcagcctgggcctgaagctgaagaacgacaccggcaacgaccagcccatcagcgtgagcgccctggagatccaggccagcggcaggaaggtgctgaggaaggccaggatgaaggtggcccagaagaccggatctggctccggcagcggccccaagaaaaagagaaaagtctaagctgccttctgcggggcttgccttctggccatgcccttcttctctcccttgcacctgtacctcttggtctttgaataaagcctgagtaggaaggctagcaaaaaaaaaaaaaaaaaaaaaaaaaaaaaaaaaaaaaaaaaaaaaaaaaaaaaaaaaaaaaaaaaaaaaaaaaaaaaaaa

SEQ ID NO: 16096 - RNA, 9485 nt, synthetic construct
  source 1..9485: mol_type = other RNA
aggaaataagagagaaaagaagagtaagaagaaatataagagccaccatggcccctaagaagaagcgtaaagtgagccggatggaacgcctcgtctacgaggtgcggcagaagtgcagaaacatcgaggacatctgcatctcctgcggatctctgaacgtgaccctggagcacccactgttcatcggcggcatgtgccagaactgtaaaaactgttttctggagtgtgcctatcaatacgacgatgacggctaccagagctactgcaccatctgttgcggcggaagagaggtgctgatgtgtggaaataacaactgctgccggtgcttctgcgtggaatgcgtggacctgctggtgggccccggcgccgcccaggccgctattaaggaagatccttggaactgctacatgtgcggccacaagggcacatacggcctgctgagacggagagaggactggcctagcagactgcagatgttcttcgccaataaccacgaccaggagttcgacccccctaaggtgtaccctcccgtccccgccgagaagagaaagcccatccgggtcctgagcctgttcgatggcatcgccaccggtctgctggtgctgaaggacctgggcatccaggtggataggtacattgcctccgaggtgtgcgaggactccatcaccgtgggaatggtgcgtcatcagggcaagatcatgtacgtgggcgacgtgcggagcgtgacacagaagcatatccaggagtggggccctttcgacctggtgatcggcggcagcccttgcaatgacctgagcatcgtgaacccagcccggaagggcctgtacgagggaaccggcagactgttcttcgagttttacagactgctgcacgacgcccggcctaaggaaggcgacgaccggcccttcttttggctgttcgagaatgtggtggccatgggagtcagcgacaagcgggatattagccggttcctggagagcaaccccgtgatgatcgatgccaaggaagtgagcgccgcccaccgggccagatacttctggggcaatctgcctggcatgaacagacccctggccagcaccgtgaacgacaagctggagctgcaggagtgcctggagcacggccggatcgccaagttcagcaaggtgagaaccatcaccacccgaagcaacagcatcaaacaaggcaaggaccagcactttcctgtgttcatgaacgagaaggaggacatcctgtggtgtaccgagatggagagagtgttcgggttcccagtccactacacagatgtcagcaacatgtctagactggccagacagagactgctgggaagaagctggtccgtccctgtgatcagacacctgttcgcccctctgaaggagtacttcgcctgcgtgagcagcggcaacagcaacgccaacagccggggccccagcttctctagcggcctggtgccactgtccctgagagggagccacatgggccccatggagatctacaaaaccgtgagcgcctggaagcggcagcctgtgcgcgtgctgagcctgtttcggaatatcgataaagtcctgaaaagcctgggattcctggagagcggctctggctccggcggtggcaccctgaagtacgtggaggatgtgacaaacgtggtcagacgggatgtggagaagtggggccccttcgatctggtgtacggcagcacccaacccctgggcagctcttgtgaccggtgccctggctggtacatgtttcagttccaccggatcctgcagtacgccctgccgagacaggagtcccagcggccattcttttggattttcatggacaacttgctgctgaccgaggatgaccaggaaactaccactcggttcctgcagaccgaagccgtgaccctgcaggacgtgagaggccgggactaccagaacgccatgcgggtgtggtccaacatccctggactgaaaagcaagcacgcacctctgacccctaaagaagaggagtacctgcaggcccaggtgcggagcagaagcaagctggacgcccctaaggtggatctgctggtgaagaattgcctcctgcccctgagagagtacttcaagtatttcagccagaatagtctgcccctgggaggcagcggcggcggcgccctggtgacatttgaggacgtcgccgtgcggttcacccaggaggaatgggctctgctggatccttctcagaaaatcctgtaccgggacgtgatgagagagacataccggaatctgacctccgtgggcatcaactgggaatgttgggaccttgaagcctgcttcagaagcctgggaagaaacctgagagtgcaggtggtgaagagaaagtgcgagctgaccaacagcggcccctgcgccgagggcggcccaagcagcggcgcccctcctcccagcggcggcagcccagccggctccccaacctctaccgaggagggcacctctgagtccgccacccccgagagcggccctggcacctccaccgagcccagcgagggcagcgcacccggcagccctgccggcagccccacctccacagaggagggaaccagcaccgagcccagcgaaggcagcgccccaggcaccagcaccgagcctagtgagcaggagattaaacggatcaacaagatcagaagaagacttgtgaaagacagcaacaccaagaaggccggcaagacaggccccatgaaaaccctgctggttagagtgatgacacccgatctgagagagcggctggaaaacctgagaaagaagcctgaaaatatcccccagcccatcagcaatacatctagagccaacctgaataagctgctgaccgattacaccgaaatgaagaaggcgatcctgcatgtgtactgggaagagttccagaaggaccctgtgggcctgatgagccgggtggcccagcctgccagcaagaagatcgatcagaacaagctgaaacctgagatggacgagaagggcaacctgaccaccgccggctttgcctgctctcagtgtggccagcccctgttcgtgtacaagctggagcaggtgtctgagaagggcaaggcttacaccaactacttcggacggtgcaatgtggccgagcacgaaaagctgatcctgctggcccagctgaagcccgagaaggatagcgacgaagccgtgacatatagcctgggaaagtttgggcagagggccctggatttctacagcattcatgtgaccaaggagtccacccaccccgtgaagcccctggcccagatcgccggaaacagatacgcctccggacctgtgggaaaggccctgagcgacgcatgtatgggcacaatcgcctccttcctgtctaagtaccaggacatcatcatcgaacaccagaaggtggtgaagggcaaccagaagagactggagagcctgcgggagctggccggcaaggaaaacctggaataccctagcgtgaccctgccacctcagcctcacaccaaggagggcgttgatgcctacaacgaagtgatcgcccgggtgcgaatgtgggtgaacctgaacctgtggcagaagctgaagctaagcagagatgatgccaagcctctgctgagactgaagggattcccttcctttcctctggtcgagagacaggccaacgaagtggactggtgggacatggtgtgtaacgtgaagaagctgatcaacgagaaaaaggaggatggcaaggtgttttggcagaatctggctggctacaagagacaggaagccctgagaccatacctgagcagcgaggaagatcggaagaagggaaagaaattcgctcggtaccagctgggcgacctgctgctgcacctggaaaagaagcacggcgaggactggggaaaggtgtacgacgaggcctgggagcggattgacaagaaagtggaaggcctgagcaagcacatcaagctggaagaggaacggagaagcgaggacgcccagagcaaggccgccctgaccgactggctgcgggctaaggccagcttcgtgatcgagggcctgaaggaggccgacaaggacgagttctgcagatgcgagctgaagctgcagaagtggtacggggacctgcggggaaagcccttcgccatcgaagccgagaacagcatcctggacatcagcggcttcagcaagcagtacaactgtgccttcatctggcagaaggacggcgtgaagaagctgaacctgtacctgatcatcaactacttcaagggcggcaagctgcggttcaagaagatcaaacctgaagccttcgaagccaacagattctacaccgtgatcaacaaaaagagcggcgagatcgtgcccatggaggtgaacttcaacttcgacgaccccaacctgatcatcctgcctctggcctttggcaagagacagggcagagaattcatctggaacgacctgctgtccctggaaaccggcagcctgaagctggccaacggaagagtgatcgagaagacactgtacaacagaagaacccggcaggatgagcctgccctgttcgtggccctgaccttcgagcggcgggaggtcctggactcctccaatatcaaaccaatgaacctgatcggcgtggcaagaggcgaaaacatccccgccgtgatcgccctgaccgaccccgagggctgcccactgagccggtttaaggatagcctgggaaacccaacccacatcctgagaatcggcgagagctataaggagaagcagcggaccatccaggccaagaaggaggtggagcagcggagagccggcggctacagccggaagtacgccagcaaagccaagaatctggcagacgatatggtgagaaacaccgctagagatctgctgtactacgccgtgacccaggatgccatgctgatcttcgccaacctgagccggggcttcggccggcagggcaagcggaccttcatggccgagagacagtacacacggatggaggactggctgaccgccaagctggcctacgagggcctgagcaagacctacctgtccaagacactggcccagtacacctccaagacatgcagcaactgtgggtttaccatcaccagcgccgactacgacagggtgctggagaagctgaagaagacagcaacaggctggatgaccacaattaacggcaaggagctgaaggtggagggccagattacctactacaacagatacaagagacagaacgtagtcaaggacctgtccgtcgagctggatagactgagcgaagaatctgtgaacaacgacatctcctcctggacaaagggcagaagcggagaagctctgagcctcctgaagaaaagattctcccatagacccgtgcaggagaagttcgtgtgcctgaactgcggcttcgagacacacgcagccgagcaagccgccctgaacatcgccagatcctggctgttcctgcggagccaggagtacaagaaataccagacaaacaagacaaccggcaacaccgataagagagccttcgtcgagacctggcagtccttttaccggaagaagcttaaggaggtgtggaaacctgccgtgcggtctggcggatctggcggaggctccccccagggctgcgccatcagcgaggacgtgttcgtgtacttcagcagggaggagtgggtgctgctggacgaggaccagaggctgctgtacagggacgtgatgctggagaacttcgccctgctggccagcctgggcatcgccagcagcaggagccacctggtgacccagctggagcagggcgaggagccctggatgcccgcccaggtggacatgacccccgccaccgagaaggaggcccagaagggcggcccaagcagcggcgcccctcctcccagcggcggcagcccagccggctccccaacctctaccgaggagggcacctctgagtccgccacccccgagagcggccctggcacctccaccgagcccagcgagggcagcgcacccggcagccctgccggcagccccacctccacagaggagggaaccagcaccgagcccagcgaaggcagcgccccaggcaccagcaccgagcctagtgagcaggagattaaacggatcaacaagatcagaagaagacttgtgaaagacagcaacaccaagaaggccggcaagacaggccccatgaaaaccctgctggttagagtgatgacacccgatctgagagagcggctggaaaacctgagaaagaagcctgaaaatatcccccagcccatcagcaatacatctagagccaacctgaataagctgctgaccgattacaccgaaatgaagaaggcgatcctgcatgtgtactgggaagagttccagaaggaccctgtgggcctgatgagccgggtggcccagcctgccagcaagaagatcgatcagaacaagctgaaacctgagatggacgagaagggcaacctgaccaccgccggctttgcctgctctcagtgtggccagcccctgttcgtgtacaagctggagcaggtgtctgagaagggcaaggcttacaccaactacttcggacggtgcaatgtggccgagcacgaaaagctgatcctgctggcccagctgaagcccgagaaggatagcgacgaagccgtgacatatagcctgggaaagtttgggcagagggccctggatttctacagcattcatgtgaccaaggagtccacccaccccgtgaagcccctggcccagatcgccggaaacagatacgcctccggacctgtgggaaaggccctgagcgacgcatgtatgggcacaatcgcctccttcctgtctaagtaccaggacatcatcatcgaacaccagaaggtggtgaagggcaaccagaagagactggagagcctgcgggagctggccggcaaggaaaacctggaataccctagcgtgaccctgccacctcagcctcacaccaaggagggcgttgatgcctacaacgaagtgatcgcccgggtgcgaatgtgggtgaacctgaacctgtggcagaagctgaagctaagcagagatgatgccaagcctctgctgagactgaagggattcccttcctttcctctggtcgagagacaggccaacgaagtggactggtgggacatggtgtgtaacgtgaagaagctgatcaacgagaaaaaggaggatggcaaggtgttttggcagaatctggctggctacaagagacaggaagccctgagaccatacctgagcagcgaggaagatcggaagaagggaaagaaattcgctcggtaccagctgggcgacctgctgctgcacctggaaaagaagcacggcgaggactggggaaaggtgtacgacgaggcctgggagcggattgacaagaaagtggaaggcctgagcaagcacatcaagctggaagaggaacggagaagcgaggacgcccagagcaaggccgccctgaccgactggctgcgggctaaggccagcttcgtgatcgagggcctgaaggaggccgacaaggacgagttctgcagatgcgagctgaagctgcagaagtggtacggggacctgcggggaaagcccttcgccatcgaagccgagaacagcatcctggacatcagcggcttcagcaagcagtacaactgtgccttcatctggcagaaggacggcgtgaagaagctgaacctgtacctgatcatcaactacttcaagggcggcaagctgcggttcaagaagatcaaacctgaagccttcgaagccaacagattctacaccgtgatcaacaaaaagagcggcgagatcgtgcccatggaggtgaacttcaacttcgacgaccccaacctgatcatcctgcctctggcctttggcaagagacagggcagagaattcatctggaacgacctgctgtccctggaaaccggcagcctgaagctggccaacggaagagtgatcgagaagacactgtacaacagaagaacccggcaggatgagcctgccctgttcgtggccctgaccttcgagcggcgggaggtcctggactcctccaatatcaaaccaatgaacctgatcggcgtggcaagaggcgaaaacatccccgccgtgatcgccctgaccgaccccgagggctgcccactgagccggtttaaggatagcctgggaaacccaacccacatcctgagaatcggcgagagctataaggagaagcagcggaccatccaggccaagaaggaggtggagcagcggagagccggcggctacagccggaagtacgccagcaaagccaagaatctggcagacgatatggtgagaaacaccgctagagatctgctgtactacgccgtgacccaggatgccatgctgatcttcgccaacctgagccggggcttcggccggcagggcaagcggaccttcatggccgagagacagtacacacggatggaggactggctgaccgccaagctggcctacgagggcctgagcaagacctacctgtccaagacactggcccagtacacctccaagacatgcagcaactgtgggtttaccatcaccagcgccgactacgacagggtgctggagaagctgaagaagacagcaacaggctggatgaccacaattaacggcaaggagctgaaggtggagggccagattacctactacaacagatacaagagacagaacgtagtcaaggacctgtccgtcgagctggatagactgagcgaagaatctgtgaacaacgacatctcctcctggacaaagggcagaagcggagaagctctgagcctcctgaagaaaagattctcccatagacccgtgcaggagaagttcgtgtgcctgaactgcggcttcgagacacacgcagccgagcaagccgccctgaacatcgccagatcctggctgttcctgcggagccaggagtacaagaaataccagacaaacaagacaaccggcaacaccgataagagagccttcgtcgagacctggcagtccttttaccggaagaagcttaaggaggtgtggaaacctgccgtgcggtctggcggatctggcggaggctcctccccagggctgcgccatcagcgaggacgtgttcgtgtacttcagcagggaggagtgggtgctgctggacgaggaccagaggctgctgtacagggacgtgatgctggagaacttcgccctgctggccagcctgggcatcgccagcagcaggagccacctggtgacccagctggagcagggcgaggagccctggatgcccgcccaggtggacatgacccccgccaccgagaaggaggcccagaagggatctggctccggcagcggccccaagaaaaagagaaaagtctaagctgccttctgcggggcttgccttctggccatgcccttcttctctcccttgcacctgtacctcttggtctttgaataaagcctgagtaggaaggctagcaaaaaaaaaaaaaaaaaaaaaaaaaaaaaaaaaaaaaaaaaaaaaaaaaaaaaaaaaaaaaaaaaaaaaaaaaaaaaaaa

SEQ ID NO: 16097 - RNA, 9485 nt, synthetic construct
  source 1..9485: mol_type = other RNA
aggaaataagagagaaaagaagagtaagaagaaatataagagccaccatggcccctaagaagaagcgtaaagtgagccggatggaacgcctcgtctacgaggtgcggcagaagtgcagaaacatcgaggacatctgcatctcctgcggatctctgaacgtgaccctggagcacccactgttcatcggcggcatgtgccagaactgtaaaaactgttttctggagtgtgcctatcaatacgacgatgacggctaccagagctactgcaccatctgttgcggcggaagagaggtgctgatgtgtggaaataacaactgctgccggtgcttctgcgtggaatgcgtggacctgctggtgggccccggcgccgcccaggccgctattaaggaagatccttggaactgctacatgtgcggccacaagggcacatacggcctgctgagacggagagaggactggcctagcagactgcagatgttcttcgccaataaccacgaccaggagttcgacccccctaaggtgtaccctcccgtccccgccgagaagagaaagcccatccgggtcctgagcctgttcgatggcatcgccaccggtctgctggtgctgaaggacctgggcatccaggtggataggtacattgcctccgaggtgtgcgaggactccatcaccgtgggaatggtgcgtcatcagggcaagatcatgtacgtgggcgacgtgcggagcgtgacacagaagcatatccaggagtggggccctttcgacctggtgatcggcggcagcccttgcaatgacctgagcatcgtgaacccagcccggaagggcctgtacgagggaaccggcagactgttcttcgagttttacagactgctgcacgacgcccggcctaaggaaggcgacgaccggcccttcttttggctgttcgagaatgtggtggccatgggagtcagcgacaagcgggatattagccggttcctggagagcaaccccgtgatgatcgatgccaaggaagtgagcgccgcccaccgggccagatacttctggggcaatctgcctggcatgaacagacccctggccagcaccgtgaacgacaagctggagctgcaggagtgcctggagcacggccggatcgccaagttcagcaaggtgagaaccatcaccacccgaagcaacagcatcaaacaaggcaaggaccagcactttcctgtgttcatgaacgagaaggaggacatcctgtggtgtaccgagatggagagagtgttcgggttcccagtccactacacagatgtcagcaacatgtctagactggccagacagagactgctgggaagaagctggtccgtccctgtgatcagacacctgttcgcccctctgaaggagtacttcgcctgcgtgagcagcggcaacagcaacgccaacagccggggccccagcttctctagcggcctggtgccactgtccctgagagggagccacatgggccccatggagatctacaaaaccgtgagcgcctggaagcggcagcctgtgcgcgtgctgagcctgtttcggaatatcgataaagtcctgaaaagcctgggattcctggagagcggctctggctccggcggtggcaccctgaagtacgtggaggatgtgacaaacgtggtcagacgggatgtggagaagtggggccccttcgatctggtgtacggcagcacccaacccctgggcagctcttgtgaccggtgccctggctggtacatgtttcagttccaccggatcctgcagtacgccctgccgagacaggagtcccagcggccattcttttggattttcatggacaacttgctgctgaccgaggatgaccaggaaactaccactcggttcctgcagaccgaagccgtgaccctgcaggacgtgagaggccgggactaccagaacgccatgcgggtgtggtccaacatccctggactgaaaagcaagcacgcacctctgacccctaaagaagaggagtacctgcaggcccaggtgcggagcagaagcaagctggacgcccctaaggtggatctgctggtgaagaattgcctcctgcccctgagagagtacttcaagtatttcagccagaatagtctgcccctgggaggcagcggcggcggcgccctggtgacatttgaggacgtcgccgtgcggttcacccaggaggaatgggctctgctggatccttctcagaaaatcctgtaccgggacgtgatgagagagacataccggaatctgacctccgtgggcatcaactgggaatgttgggaccttgaagcctgcttcagaagcctgggaagaaacctgagagtgcaggtggtgaagagaaagtgcgagctgaccaacagcggcccctgcgccgagggcggcccaagcagcggcgcccctcctcccagcggcggcagcccagccggctccccaacctctaccgaggagggcacctctgagtccgccacccccgagagcggccctggcacctccaccgagcccagcgagggcagcgcacccggcagccctgccggcagccccacctccacagaggagggaaccagcaccgagcccagcgaaggcagcgccccaggcaccagcaccgagcctagtgagcaggagattaaacggatcaacaagatcagaagaagacttgtgaaagacagcaacaccaagaaggccggcaagacaggccccatgaaaaccctgctggttagagtgatgacacccgatctgagagagcggctggaaaacctgagaaagaagcctgaaaatatcccccagcccatcagcaatacatctagagccaacctgaataagctgctgaccgattacaccgaaatgaagaaggcgatcctgcatgtgtactgggaagagttccagaaggaccctgtgggcctgatgagccgggtggcccagcctgccagcaagaagatcgatcagaacaagctgaaacctgagatggacgagaagggcaacctgaccaccgccggctttgcctgctctcagtgtggccagcccctgttcgtgtacaagctggagcaggtgtctgagaagggcaaggcttacaccaactacttcggacggtgcaatgtggccgagcacgaaaagctgatcctgctggcccagctgaagcccgagaaggatagcgacgaagccgtgacatatagcctgggaaagtttgggcagagggccctggatttctacagcattcatgtgaccaaggagtccacccaccccgtgaagcccctggcccagatcgccggaaacagatacgcctccggacctgtgggaaaggccctgagcgacgcatgtatgggcacaatcgcctccttcctgtctaagtaccaggacatcatcatcgaacaccagaaggtggtgaagggcaaccagaagagactggagagcctgcgggagctggccggcaaggaaaacctggaataccctagcgtgaccctgccacctcagcctcacaccaaggagggcgttgatgcctacaacgaagtgatcgcccgggtgcgaatgtgggtgaacctgaacctgtggcagaagctgaagctaagcagagatgatgccaagcctctgctgagactgaagggattcccttcctttcctctggtcgagagacaggccaacgaagtggactggtgggacatggtgtgtaacgtgaagaagctgatcaacgagaaaaaggaggatggcaaggtgttttggcagaatctggctggctacaagagacaggaagccctgagaccatacctgagcagcgaggaagatcggaagaagggaaagaaattcgctcggtaccagctgggcgacctgctgctgcacctggaaaagaagcacggcgaggactggggaaaggtgtacgacgaggcctgggagcggattgacaagaaagtggaaggcctgagcaagcacatcaagctggaagaggaacggagaagcgaggacgcccagagcaaggccgccctgaccgactggctgcgggctaaggccagcttcgtgatcgagggcctgaaggaggccgacaaggacgagttctgcagatgcgagctgaagctgcagaagtggtacggggacctgcggggaaagcccttcgccatcgaagccgagaacagcatcctggacatcagcggcttcagcaagcagtacaactgtgccttcatctggcagaaggacggcgtgaagaagctgaacctgtacctgatcatcaactacttcaagggcggcaagctgcggttcaagaagatcaaacctgaagccttcgaagccaacagattctacaccgtgatcaacaaaaagagcggcgagatcgtgcccatggaggtgaacttcaacttcgacgaccccaacctgatcatcctgcctctggcctttggcaagagacagggcagagaattcatctggaacgacctgctgtccctggaaaccggcagcctgaagctggccaacggaagagtgatcgagaagacactgtacaacagaagaacccggcaggatgagcctgccctgttcgtggccctgaccttcgagcggcgggaggtcctggactcctccaatatcaaaccaatgaacctgatcggcgtggcaagaggcgaaaacatccccgccgtgatcgccctgaccgaccccgagggctgcccactgagccggtttaaggatagcctgggaaacccaacccacatcctgagaatcggcgagagctataaggagaagcagcggaccatccaggccaagaaggaggtggagcagcggagagccggcggctacagccggaagtacgccagcaaagccaagaatctggcagacgatatggtgagaaacaccgctagagatctgctgtactacgccgtgacccaggatgccatgctgatcttcgccaacctgagccggggcttcggccggcagggcaagcggaccttcatggccgagagacagtacacacggatggaggactggctgaccgccaagctggcctacgagggcctgagcaagacctacctgtccaagacactggcccagtacacctccaagacatgcagcaactgtgggtttaccatcaccagcgccgactacgacagggtgctggagaagctgaagaagacagcaacaggctggatgaccacaattaacggcaaggagctgaaggtggagggccagattacctactacaacagatacaagagacagaacgtagtcaaggacctgtccgtcgagctggatagactgagcgaagaatctgtgaacaacgacatctcctcctggacaaagggcagaagcggagaagctctgagcctcctgaagaaaagattctcccatagacccgtgcaggagaagttcgtgtgcctgaactgcggcttcgagacacacgcagccgagcaagccgccctgaacatcgccagatcctggctgttcctgcggagccaggagtacaagaaataccagacaaacaagacaaccggcaacaccgataagagagccttcgtcgagacctggcagtccttttaccggaagaagcttaaggaggtgtggaaacctgccgtgcggtctggcggatctggcggaggctccgtgcagggcagcgtgaccttcagggacgtggccgtgctgttcagccaggacgagtggctgcacctggacaccgcccagaggaccctgtacagggaggtgatgctggagaactacagcaacctggtgagcctgggcatcctgttcagcaagcccaaggtgatcagccagctggagcagggccaggacccctggaaggtggagcacggcgccccccagggcacctgccccggctgggagagcctgggcggcccaagcagcggcgcccctcctcccagcggcggcagcccagccggctccccaacctctaccgaggagggcacctctgagtccgccacccccgagagcggccctggcacctccaccgagcccagcgagggcagcgcacccggcagccctgccggcagccccacctccacagaggagggaaccagcaccgagcccagcgaaggcagcgccccaggcaccagcaccgagcctagtgagcaggagattaaacggatcaacaagatcagaagaagacttgtgaaagacagcaacaccaagaaggccggcaagacaggccccatgaaaaccctgctggttagagtgatgacacccgatctgagagagcggctggaaaacctgagaaagaagcctgaaaatatcccccagcccatcagcaatacatctagagccaacctgaataagctgctgaccgattacaccgaaatgaagaaggcgatcctgcatgtgtactgggaagagttccagaaggaccctgtgggcctgatgagccgggtggcccagcctgccagcaagaagatcgatcagaacaagctgaaacctgagatggacgagaagggcaacctgaccaccgccggctttgcctgctctcagtgtggccagcccctgttcgtgtacaagctggagcaggtgtctgagaagggcaaggcttacaccaactacttcggacggtgcaatgtggccgagcacgaaaagctgatcctgctggcccagctgaagcccgagaaggatagcgacgaagccgtgacatatagcctgggaaagtttgggcagagggccctggatttctacagcattcatgtgaccaaggagtccacccaccccgtgaagcccctggcccagatcgccggaaacagatacgcctccggacctgtgggaaaggccctgagcgacgcatgtatgggcacaatcgcctccttcctgtctaagtaccaggacatcatcatcgaacaccagaaggtggtgaagggcaaccagaagagactggagagcctgcgggagctggccggcaaggaaaacctggaataccctagcgtgaccctgccacctcagcctcacaccaaggagggcgttgatgcctacaacgaagtgatcgcccgggtgcgaatgtgggtgaacctgaacctgtggcagaagctgaagctaagcagagatgatgccaagcctctgctgagactgaagggattcccttcctttcctctggtcgagagacaggccaacgaagtggactggtgggacatggtgtgtaacgtgaagaagctgatcaacgagaaaaaggaggatggcaaggtgttttggcagaatctggctggctacaagagacaggaagccctgagaccatacctgagcagcgaggaagatcggaagaagggaaagaaattcgctcggtaccagctgggcgacctgctgctgcacctggaaaagaagcacggcgaggactggggaaaggtgtacgacgaggcctgggagcggattgacaagaaagtggaaggcctgagcaagcacatcaagctggaagaggaacggagaagcgaggacgcccagagcaaggccgccctgaccgactggctgcgggctaaggccagcttcgtgatcgagggcctgaaggaggccgacaaggacgagttctgcagatgcgagctgaagctgcagaagtggtacggggacctgcggggaaagcccttcgccatcgaagccgagaacagcatcctggacatcagcggcttcagcaagcagtacaactgtgccttcatctggcagaaggacggcgtgaagaagctgaacctgtacctgatcatcaactacttcaagggcggcaagctgcggttcaagaagatcaaacctgaagccttcgaagccaacagattctacaccgtgatcaacaaaaagagcggcgagatcgtgcccatggaggtgaacttcaacttcgacgaccccaacctgatcatcctgcctctggcctttggcaagagacagggcagagaattcatctggaacgacctgctgtccctggaaaccggcagcctgaagctggccaacggaagagtgatcgagaagacactgtacaacagaagaacccggcaggatgagcctgccctgttcgtggccctgaccttcgagcggcgggaggtcctggactcctccaatatcaaaccaatgaacctgatcggcgtggcaagaggcgaaaacatccccgccgtgatcgccctgaccgaccccgagggctgcccactgagccggtttaaggatagcctgggaaacccaacccacatcctgagaatcggcgagagctataaggagaagcagcggaccatccaggccaagaaggaggtggagcagcggagagccggcggctacagccggaagtacgccagcaaagccaagaatctggcagacgatatggtgagaaacaccgctagagatctgctgtactacgccgtgacccaggatgccatgctgatcttcgccaacctgagccggggcttcggccggcagggcaagcggaccttcatggccgagagacagtacacacggatggaggactggctgaccgccaagctggcctacgagggcctgagcaagacctacctgtccaagacactggcccagtacacctccaagacatgcagcaactgtgggtttaccatcaccagcgccgactacgacagggtgctggagaagctgaagaagacagcaacaggctggatgaccacaattaacggcaaggagctgaaggtggagggccagattacctactacaacagatacaagagacagaacgtagtcaaggacctgtccgtcgagctggatagactgagcgaagaatctgtgaacaacgacatctcctcctggacaaagggcagaagcggagaagctctgagcctcctgaagaaaagattctcccatagacccgtgcaggagaagttcgtgtgcctgaactgcggcttcgagacacacgcagccgagcaagccgccctgaacatcgccagatcctggctgttcctgcggagccaggagtacaagaaataccagacaaacaagacaaccggcaacaccgataagagagccttcgtcgagacctggcagtccttttaccggaagaagcttaaggaggtgtggaaacctgccgtgcggtctggcggatctggcggaggctcctgtgcagggcagcgtgaccttcagggacgtggccgtgctgttcagccaggacgagtggctgcacctggacaccgcccagaggaccctgtacagggaggtgatgctggagaactacagcaacctggtgagcctgggcatcctgttcagcaagcccaaggtgatcagccagctggagcagggccaggacccctggaaggtggagcacggcgccccccagggcacctgccccggctgggagagcctgggatctggctccggcagcggccccaagaaaaagagaaaagtctaagctgccttctgcggggcttgccttctggccatgcccttcttctctcccttgcacctgtacctcttggtctttgaataaagcctgagtaggaaggctagcaaaaaaaaaaaaaaaaaaaaaaaaaaaaaaaaaaaaaaaaaaaaaaaaaaaaaaaaaaaaaaaaaaaaaaaaaaaaaaaa

SEQ ID NO: 16098 - RNA, 9485 nt, synthetic construct
  source 1..9485: mol_type = other RNA
aggaaataagagagaaaagaagagtaagaagaaatataagagccaccatggcccctaagaagaagcgtaaagtgagccggatggaacgcctcgtctacgaggtgcggcagaagtgcagaaacatcgaggacatctgcatctcctgcggatctctgaacgtgaccctggagcacccactgttcatcggcggcatgtgccagaactgtaaaaactgttttctggagtgtgcctatcaatacgacgatgacggctaccagagctactgcaccatctgttgcggcggaagagaggtgctgatgtgtggaaataacaactgctgccggtgcttctgcgtggaatgcgtggacctgctggtgggccccggcgccgcccaggccgctattaaggaagatccttggaactgctacatgtgcggccacaagggcacatacggcctgctgagacggagagaggactggcctagcagactgcagatgttcttcgccaataaccacgaccaggagttcgacccccctaaggtgtaccctcccgtccccgccgagaagagaaagcccatccgggtcctgagcctgttcgatggcatcgccaccggtctgctggtgctgaaggacctgggcatccaggtggataggtacattgcctccgaggtgtgcgaggactccatcaccgtgggaatggtgcgtcatcagggcaagatcatgtacgtgggcgacgtgcggagcgtgacacagaagcatatccaggagtggggccctttcgacctggtgatcggcggcagcccttgcaatgacctgagcatcgtgaacccagcccggaagggcctgtacgagggaaccggcagactgttcttcgagttttacagactgctgcacgacgcccggcctaaggaaggcgacgaccggcccttcttttggctgttcgagaatgtggtggccatgggagtcagcgacaagcgggatattagccggttcctggagagcaaccccgtgatgatcgatgccaaggaagtgagcgccgcccaccgggccagatacttctggggcaatctgcctggcatgaacagacccctggccagcaccgtgaacgacaagctggagctgcaggagtgcctggagcacggccggatcgccaagttcagcaaggtgagaaccatcaccacccgaagcaacagcatcaaacaaggcaaggaccagcactttcctgtgttcatgaacgagaaggaggacatcctgtggtgtaccgagatggagagagtgttcgggttcccagtccactacacagatgtcagcaacatgtctagactggccagacagagactgctgggaagaagctggtccgtccctgtgatcagacacctgttcgcccctctgaaggagtacttcgcctgcgtgagcagcggcaacagcaacgccaacagccggggccccagcttctctagcggcctggtgccactgtccctgagagggagccacatgggccccatggagatctacaaaaccgtgagcgcctggaagcggcagcctgtgcgcgtgctgagcctgtttcggaatatcgataaagtcctgaaaagcctgggattcctggagagcggctctggctccggcggtggcaccctgaagtacgtggaggatgtgacaaacgtggtcagacgggatgtggagaagtggggccccttcgatctggtgtacggcagcacccaacccctgggcagctcttgtgaccggtgccctggctggtacatgtttcagttccaccggatcctgcagtacgccctgccgagacaggagtcccagcggccattcttttggattttcatggacaacttgctgctgaccgaggatgaccaggaaactaccactcggttcctgcagaccgaagccgtgaccctgcaggacgtgagaggccgggactaccagaacgccatgcgggtgtggtccaacatccctggactgaaaagcaagcacgcacctctgacccctaaagaagaggagtacctgcaggcccaggtgcggagcagaagcaagctggacgcccctaaggtggatctgctggtgaagaattgcctcctgcccctgagagagtacttcaagtatttcagccagaatagtctgcccctgggaggcagcggcggcggcgccctggtgacatttgaggacgtcgccgtgcggttcacccaggaggaatgggctctgctggatccttctcagaaaatcctgtaccgggacgtgatgagagagacataccggaatctgacctccgtgggcatcaactgggaatgttgggaccttgaagcctgcttcagaagcctgggaagaaacctgagagtgcaggtggtgaagagaaagtgcgagctgaccaacagcggcccctgcgccgagggcggcccaagcagcggcgcccctcctcccagcggcggcagcccagccggctccccaacctctaccgaggagggcacctctgagtccgccacccccgagagcggccctggcacctccaccgagcccagcgagggcagcgcacccggcagccctgccggcagccccacctccacagaggagggaaccagcaccgagcccagcgaaggcagcgccccaggcaccagcaccgagcctagtgagcaggagattaaacggatcaacaagatcagaagaagacttgtgaaagacagcaacaccaagaaggccggcaagacaggccccatgaaaaccctgctggttagagtgatgacacccgatctgagagagcggctggaaaacctgagaaagaagcctgaaaatatcccccagcccatcagcaatacatctagagccaacctgaataagctgctgaccgattacaccgaaatgaagaaggcgatcctgcatgtgtactgggaagagttccagaaggaccctgtgggcctgatgagccgggtggcccagcctgccagcaagaagatcgatcagaacaagctgaaacctgagatggacgagaagggcaacctgaccaccgccggctttgcctgctctcagtgtggccagcccctgttcgtgtacaagctggagcaggtgtctgagaagggcaaggcttacaccaactacttcggacggtgcaatgtggccgagcacgaaaagctgatcctgctggcccagctgaagcccgagaaggatagcgacgaagccgtgacatatagcctgggaaagtttgggcagagggccctggatttctacagcattcatgtgaccaaggagtccacccaccccgtgaagcccctggcccagatcgccggaaacagatacgcctccggacctgtgggaaaggccctgagcgacgcatgtatgggcacaatcgcctccttcctgtctaagtaccaggacatcatcatcgaacaccagaaggtggtgaagggcaaccagaagagactggagagcctgcgggagctggccggcaaggaaaacctggaataccctagcgtgaccctgccacctcagcctcacaccaaggagggcgttgatgcctacaacgaagtgatcgcccgggtgcgaatgtgggtgaacctgaacctgtggcagaagctgaagctaagcagagatgatgccaagcctctgctgagactgaagggattcccttcctttcctctggtcgagagacaggccaacgaagtggactggtgggacatggtgtgtaacgtgaagaagctgatcaacgagaaaaaggaggatggcaaggtgttttggcagaatctggctggctacaagagacaggaagccctgagaccatacctgagcagcgaggaagatcggaagaagggaaagaaattcgctcggtaccagctgggcgacctgctgctgcacctggaaaagaagcacggcgaggactggggaaaggtgtacgacgaggcctgggagcggattgacaagaaagtggaaggcctgagcaagcacatcaagctggaagaggaacggagaagcgaggacgcccagagcaaggccgccctgaccgactggctgcgggctaaggccagcttcgtgatcgagggcctgaaggaggccgacaaggacgagttctgcagatgcgagctgaagctgcagaagtggtacggggacctgcggggaaagcccttcgccatcgaagccgagaacagcatcctggacatcagcggcttcagcaagcagtacaactgtgccttcatctggcagaaggacggcgtgaagaagctgaacctgtacctgatcatcaactacttcaagggcggcaagctgcggttcaagaagatcaaacctgaagccttcgaagccaacagattctacaccgtgatcaacaaaaagagcggcgagatcgtgcccatggaggtgaacttcaacttcgacgaccccaacctgatcatcctgcctctggcctttggcaagagacagggcagagaattcatctggaacgacctgctgtccctggaaaccggcagcctgaagctggccaacggaagagtgatcgagaagacactgtacaacagaagaacccggcaggatgagcctgccctgttcgtggccctgaccttcgagcggcgggaggtcctggactcctccaatatcaaaccaatgaacctgatcggcgtggcaagaggcgaaaacatccccgccgtgatcgccctgaccgaccccgagggctgcccactgagccggtttaaggatagcctgggaaacccaacccacatcctgagaatcggcgagagctataaggagaagcagcggaccatccaggccaagaaggaggtggagcagcggagagccggcggctacagccggaagtacgccagcaaagccaagaatctggcagacgatatggtgagaaacaccgctagagatctgctgtactacgccgtgacccaggatgccatgctgatcttcgccaacctgagccggggcttcggccggcagggcaagcggaccttcatggccgagagacagtacacacggatggaggactggctgaccgccaagctggcctacgagggcctgagcaagacctacctgtccaagacactggcccagtacacctccaagacatgcagcaactgtgggtttaccatcaccagcgccgactacgacagggtgctggagaagctgaagaagacagcaacaggctggatgaccacaattaacggcaaggagctgaaggtggagggccagattacctactacaacagatacaagagacagaacgtagtcaaggacctgtccgtcgagctggatagactgagcgaagaatctgtgaacaacgacatctcctcctggacaaagggcagaagcggagaagctctgagcctcctgaagaaaagattctcccatagacccgtgcaggagaagttcgtgtgcctgaactgcggcttcgagacacacgcagccgagcaagccgccctgaacatcgccagatcctggctgttcctgcggagccaggagtacaagaaataccagacaaacaagacaaccggcaacaccgataagagagccttcgtcgagacctggcagtccttttaccggaagaagcttaaggaggtgtggaaacctgccgtgcggtctggcggatctggcggaggctcccaccaggacctggtgaccttcaaggacgtggccgtgtacttcacccagaccgagtgggccggcctgagccccgcccagaaggccctgtacaggagcgtgatgctggagaactacggcaacctgaccagcctgggctaccccgtgcccaagcccgccctgatcagcctgctggagggcggcaacctgccctggggcctggaggcccaggacaaccccagcgccgagaggaccaaggacatctgcggcggcccaagcagcggcgcccctcctcccagcggcggcagcccagccggctccccaacctctaccgaggagggcacctctgagtccgccacccccgagagcggccctggcacctccaccgagcccagcgagggcagcgcacccggcagccctgccggcagccccacctccacagaggagggaaccagcaccgagcccagcgaaggcagcgccccaggcaccagcaccgagcctagtgagcaggagattaaacggatcaacaagatcagaagaagacttgtgaaagacagcaacaccaagaaggccggcaagacaggccccatgaaaaccctgctggttagagtgatgacacccgatctgagagagcggctggaaaacctgagaaagaagcctgaaaatatcccccagcccatcagcaatacatctagagccaacctgaataagctgctgaccgattacaccgaaatgaagaaggcgatcctgcatgtgtactgggaagagttccagaaggaccctgtgggcctgatgagccgggtggcccagcctgccagcaagaagatcgatcagaacaagctgaaacctgagatggacgagaagggcaacctgaccaccgccggctttgcctgctctcagtgtggccagcccctgttcgtgtacaagctggagcaggtgtctgagaagggcaaggcttacaccaactacttcggacggtgcaatgtggccgagcacgaaaagctgatcctgctggcccagctgaagcccgagaaggatagcgacgaagccgtgacatatagcctgggaaagtttgggcagagggccctggatttctacagcattcatgtgaccaaggagtccacccaccccgtgaagcccctggcccagatcgccggaaacagatacgcctccggacctgtgggaaaggccctgagcgacgcatgtatgggcacaatcgcctccttcctgtctaagtaccaggacatcatcatcgaacaccagaaggtggtgaagggcaaccagaagagactggagagcctgcgggagctggccggcaaggaaaacctggaataccctagcgtgaccctgccacctcagcctcacaccaaggagggcgttgatgcctacaacgaagtgatcgcccgggtgcgaatgtgggtgaacctgaacctgtggcagaagctgaagctaagcagagatgatgccaagcctctgctgagactgaagggattcccttcctttcctctggtcgagagacaggccaacgaagtggactggtgggacatggtgtgtaacgtgaagaagctgatcaacgagaaaaaggaggatggcaaggtgttttggcagaatctggctggctacaagagacaggaagccctgagaccatacctgagcagcgaggaagatcggaagaagggaaagaaattcgctcggtaccagctgggcgacctgctgctgcacctggaaaagaagcacggcgaggactggggaaaggtgtacgacgaggcctgggagcggattgacaagaaagtggaaggcctgagcaagcacatcaagctggaagaggaacggagaagcgaggacgcccagagcaaggccgccctgaccgactggctgcgggctaaggccagcttcgtgatcgagggcctgaaggaggccgacaaggacgagttctgcagatgcgagctgaagctgcagaagtggtacggggacctgcggggaaagcccttcgccatcgaagccgagaacagcatcctggacatcagcggcttcagcaagcagtacaactgtgccttcatctggcagaaggacggcgtgaagaagctgaacctgtacctgatcatcaactacttcaagggcggcaagctgcggttcaagaagatcaaacctgaagccttcgaagccaacagattctacaccgtgatcaacaaaaagagcggcgagatcgtgcccatggaggtgaacttcaacttcgacgaccccaacctgatcatcctgcctctggcctttggcaagagacagggcagagaattcatctggaacgacctgctgtccctggaaaccggcagcctgaagctggccaacggaagagtgatcgagaagacactgtacaacagaagaacccggcaggatgagcctgccctgttcgtggccctgaccttcgagcggcgggaggtcctggactcctccaatatcaaaccaatgaacctgatcggcgtggcaagaggcgaaaacatccccgccgtgatcgccctgaccgaccccgagggctgcccactgagccggtttaaggatagcctgggaaacccaacccacatcctgagaatcggcgagagctataaggagaagcagcggaccatccaggccaagaaggaggtggagcagcggagagccggcggctacagccggaagtacgccagcaaagccaagaatctggcagacgatatggtgagaaacaccgctagagatctgctgtactacgccgtgacccaggatgccatgctgatcttcgccaacctgagccggggcttcggccggcagggcaagcggaccttcatggccgagagacagtacacacggatggaggactggctgaccgccaagctggcctacgagggcctgagcaagacctacctgtccaagacactggcccagtacacctccaagacatgcagcaactgtgggtttaccatcaccagcgccgactacgacagggtgctggagaagctgaagaagacagcaacaggctggatgaccacaattaacggcaaggagctgaaggtggagggccagattacctactacaacagatacaagagacagaacgtagtcaaggacctgtccgtcgagctggatagactgagcgaagaatctgtgaacaacgacatctcctcctggacaaagggcagaagcggagaagctctgagcctcctgaagaaaagattctcccatagacccgtgcaggagaagttcgtgtgcctgaactgcggcttcgagacacacgcagccgagcaagccgccctgaacatcgccagatcctggctgttcctgcggagccaggagtacaagaaataccagacaaacaagacaaccggcaacaccgataagagagccttcgtcgagacctggcagtccttttaccggaagaagcttaaggaggtgtggaaacctgccgtgcggtctggcggatctggcggaggctcctcaccaggacctggtgaccttcaaggacgtggccgtgtacttcacccagaccgagtgggccggcctgagccccgcccagaaggccctgtacaggagcgtgatgctggagaactacggcaacctgaccagcctgggctaccccgtgcccaagcccgccctgatcagcctgctggagggcggcaacctgccctggggcctggaggcccaggacaaccccagcgccgagaggaccaaggacatctgcggatctggctccggcagcggccccaagaaaaagagaaaagtctaagctgccttctgcggggcttgccttctggccatgcccttcttctctcccttgcacctgtacctcttggtctttgaataaagcctgagtaggaaggctagcaaaaaaaaaaaaaaaaaaaaaaaaaaaaaaaaaaaaaaaaaaaaaaaaaaaaaaaaaaaaaaaaaaaaaaaaaaaaaaaa

SEQ ID NO: 16099 - RNA, 9485 nt, synthetic construct
  source 1..9485: mol_type = other RNA
aggaaataagagagaaaagaagagtaagaagaaatataagagccaccatggcccctaagaagaagcgtaaagtgagccggatggaacgcctcgtctacgaggtgcggcagaagtgcagaaacatcgaggacatctgcatctcctgcggatctctgaacgtgaccctggagcacccactgttcatcggcggcatgtgccagaactgtaaaaactgttttctggagtgtgcctatcaatacgacgatgacggctaccagagctactgcaccatctgttgcggcggaagagaggtgctgatgtgtggaaataacaactgctgccggtgcttctgcgtggaatgcgtggacctgctggtgggccccggcgccgcccaggccgctattaaggaagatccttggaactgctacatgtgcggccacaagggcacatacggcctgctgagacggagagaggactggcctagcagactgcagatgttcttcgccaataaccacgaccaggagttcgacccccctaaggtgtaccctcccgtccccgccgagaagagaaagcccatccgggtcctgagcctgttcgatggcatcgccaccggtctgctggtgctgaaggacctgggcatccaggtggataggtacattgcctccgaggtgtgcgaggactccatcaccgtgggaatggtgcgtcatcagggcaagatcatgtacgtgggcgacgtgcggagcgtgacacagaagcatatccaggagtggggccctttcgacctggtgatcggcggcagcccttgcaatgacctgagcatcgtgaacccagcccggaagggcctgtacgagggaaccggcagactgttcttcgagttttacagactgctgcacgacgcccggcctaaggaaggcgacgaccggcccttcttttggctgttcgagaatgtggtggccatgggagtcagcgacaagcgggatattagccggttcctggagagcaaccccgtgatgatcgatgccaaggaagtgagcgccgcccaccgggccagatacttctggggcaatctgcctggcatgaacagacccctggccagcaccgtgaacgacaagctggagctgcaggagtgcctggagcacggccggatcgccaagttcagcaaggtgagaaccatcaccacccgaagcaacagcatcaaacaaggcaaggaccagcactttcctgtgttcatgaacgagaaggaggacatcctgtggtgtaccgagatggagagagtgttcgggttcccagtccactacacagatgtcagcaacatgtctagactggccagacagagactgctgggaagaagctggtccgtccctgtgatcagacacctgttcgcccctctgaaggagtacttcgcctgcgtgagcagcggcaacagcaacgccaacagccggggccccagcttctctagcggcctggtgccactgtccctgagagggagccacatgggccccatggagatctacaaaaccgtgagcgcctggaagcggcagcctgtgcgcgtgctgagcctgtttcggaatatcgataaagtcctgaaaagcctgggattcctggagagcggctctggctccggcggtggcaccctgaagtacgtggaggatgtgacaaacgtggtcagacgggatgtggagaagtggggccccttcgatctggtgtacggcagcacccaacccctgggcagctcttgtgaccggtgccctggctggtacatgtttcagttccaccggatcctgcagtacgccctgccgagacaggagtcccagcggccattcttttggattttcatggacaacttgctgctgaccgaggatgaccaggaaactaccactcggttcctgcagaccgaagccgtgaccctgcaggacgtgagaggccgggactaccagaacgccatgcgggtgtggtccaacatccctggactgaaaagcaagcacgcacctctgacccctaaagaagaggagtacctgcaggcccaggtgcggagcagaagcaagctggacgcccctaaggtggatctgctggtgaagaattgcctcctgcccctgagagagtacttcaagtatttcagccagaatagtctgcccctgggaggcagcggcggcggcgccctggtgacatttgaggacgtcgccgtgcggttcacccaggaggaatgggctctgctggatccttctcagaaaatcctgtaccgggacgtgatgagagagacataccggaatctgacctccgtgggcatcaactgggaatgttgggaccttgaagcctgcttcagaagcctgggaagaaacctgagagtgcaggtggtgaagagaaagtgcgagctgaccaacagcggcccctgcgccgagggcggcccaagcagcggcgcccctcctcccagcggcggcagcccagccggctccccaacctctaccgaggagggcacctctgagtccgccacccccgagagcggccctggcacctccaccgagcccagcgagggcagcgcacccggcagccctgccggcagccccacctccacagaggagggaaccagcaccgagcccagcgaaggcagcgccccaggcaccagcaccgagcctagtgagcaggagattaaacggatcaacaagatcagaagaagacttgtgaaagacagcaacaccaagaaggccggcaagacaggccccatgaaaaccctgctggttagagtgatgacacccgatctgagagagcggctggaaaacctgagaaagaagcctgaaaatatcccccagcccatcagcaatacatctagagccaacctgaataagctgctgaccgattacaccgaaatgaagaaggcgatcctgcatgtgtactgggaagagttccagaaggaccctgtgggcctgatgagccgggtggcccagcctgccagcaagaagatcgatcagaacaagctgaaacctgagatggacgagaagggcaacctgaccaccgccggctttgcctgctctcagtgtggccagcccctgttcgtgtacaagctggagcaggtgtctgagaagggcaaggcttacaccaactacttcggacggtgcaatgtggccgagcacgaaaagctgatcctgctggcccagctgaagcccgagaaggatagcgacgaagccgtgacatatagcctgggaaagtttgggcagagggccctggatttctacagcattcatgtgaccaaggagtccacccaccccgtgaagcccctggcccagatcgccggaaacagatacgcctccggacctgtgggaaaggccctgagcgacgcatgtatgggcacaatcgcctccttcctgtctaagtaccaggacatcatcatcgaacaccagaaggtggtgaagggcaaccagaagagactggagagcctgcgggagctggccggcaaggaaaacctggaataccctagcgtgaccctgccacctcagcctcacaccaaggagggcgttgatgcctacaacgaagtgatcgcccgggtgcgaatgtgggtgaacctgaacctgtggcagaagctgaagctaagcagagatgatgccaagcctctgctgagactgaagggattcccttcctttcctctggtcgagagacaggccaacgaagtggactggtgggacatggtgtgtaacgtgaagaagctgatcaacgagaaaaaggaggatggcaaggtgttttggcagaatctggctggctacaagagacaggaagccctgagaccatacctgagcagcgaggaagatcggaagaagggaaagaaattcgctcggtaccagctgggcgacctgctgctgcacctggaaaagaagcacggcgaggactggggaaaggtgtacgacgaggcctgggagcggattgacaagaaagtggaaggcctgagcaagcacatcaagctggaagaggaacggagaagcgaggacgcccagagcaaggccgccctgaccgactggctgcgggctaaggccagcttcgtgatcgagggcctgaaggaggccgacaaggacgagttctgcagatgcgagctgaagctgcagaagtggtacggggacctgcggggaaagcccttcgccatcgaagccgagaacagcatcctggacatcagcggcttcagcaagcagtacaactgtgccttcatctggcagaaggacggcgtgaagaagctgaacctgtacctgatcatcaactacttcaagggcggcaagctgcggttcaagaagatcaaacctgaagccttcgaagccaacagattctacaccgtgatcaacaaaaagagcggcgagatcgtgcccatggaggtgaacttcaacttcgacgaccccaacctgatcatcctgcctctggcctttggcaagagacagggcagagaattcatctggaacgacctgctgtccctggaaaccggcagcctgaagctggccaacggaagagtgatcgagaagacactgtacaacagaagaacccggcaggatgagcctgccctgttcgtggccctgaccttcgagcggcgggaggtcctggactcctccaatatcaaaccaatgaacctgatcggcgtggcaagaggcgaaaacatccccgccgtgatcgccctgaccgaccccgagggctgcccactgagccggtttaaggatagcctgggaaacccaacccacatcctgagaatcggcgagagctataaggagaagcagcggaccatccaggccaagaaggaggtggagcagcggagagccggcggctacagccggaagtacgccagcaaagccaagaatctggcagacgatatggtgagaaacaccgctagagatctgctgtactacgccgtgacccaggatgccatgctgatcttcgccaacctgagccggggcttcggccggcagggcaagcggaccttcatggccgagagacagtacacacggatggaggactggctgaccgccaagctggcctacgagggcctgagcaagacctacctgtccaagacactggcccagtacacctccaagacatgcagcaactgtgggtttaccatcaccagcgccgactacgacagggtgctggagaagctgaagaagacagcaacaggctggatgaccacaattaacggcaaggagctgaaggtggagggccagattacctactacaacagatacaagagacagaacgtagtcaaggacctgtccgtcgagctggatagactgagcgaagaatctgtgaacaacgacatctcctcctggacaaagggcagaagcggagaagctctgagcctcctgaagaaaagattctcccatagacccgtgcaggagaagttcgtgtgcctgaactgcggcttcgagacacacgcagccgagcaagccgccctgaacatcgccagatcctggctgttcctgcggagccaggagtacaagaaataccagacaaacaagacaaccggcaacaccgataagagagccttcgtcgagacctggcagtccttttaccggaagaagcttaaggaggtgtggaaacctgccgtgcggtctggcggatctggcggaggctccgtgaccttcgaggacgtggccctgtacttcagcagggacgagtggaggctgctggacgaggcccagaggaggctgtaccacgacgtgatgctgcagaacttcagcctgatcagcagcctgggctgctgctgcggcgccgaggacgccgagagccccttccagcccagcatgttcagggacgtgagccaggccaggaccctgaaggccgccagcctgagccagaagaaccacccctgcgagaagggcggcccaagcagcggcgcccctcctcccagcggcggcagcccagccggctccccaacctctaccgaggagggcacctctgagtccgccacccccgagagcggccctggcacctccaccgagcccagcgagggcagcgcacccggcagccctgccggcagccccacctccacagaggagggaaccagcaccgagcccagcgaaggcagcgccccaggcaccagcaccgagcctagtgagcaggagattaaacggatcaacaagatcagaagaagacttgtgaaagacagcaacaccaagaaggccggcaagacaggccccatgaaaaccctgctggttagagtgatgacacccgatctgagagagcggctggaaaacctgagaaagaagcctgaaaatatcccccagcccatcagcaatacatctagagccaacctgaataagctgctgaccgattacaccgaaatgaagaaggcgatcctgcatgtgtactgggaagagttccagaaggaccctgtgggcctgatgagccgggtggcccagcctgccagcaagaagatcgatcagaacaagctgaaacctgagatggacgagaagggcaacctgaccaccgccggctttgcctgctctcagtgtggccagcccctgttcgtgtacaagctggagcaggtgtctgagaagggcaaggcttacaccaactacttcggacggtgcaatgtggccgagcacgaaaagctgatcctgctggcccagctgaagcccgagaaggatagcgacgaagccgtgacatatagcctgggaaagtttgggcagagggccctggatttctacagcattcatgtgaccaaggagtccacccaccccgtgaagcccctggcccagatcgccggaaacagatacgcctccggacctgtgggaaaggccctgagcgacgcatgtatgggcacaatcgcctccttcctgtctaagtaccaggacatcatcatcgaacaccagaaggtggtgaagggcaaccagaagagactggagagcctgcgggagctggccggcaaggaaaacctggaataccctagcgtgaccctgccacctcagcctcacaccaaggagggcgttgatgcctacaacgaagtgatcgcccgggtgcgaatgtgggtgaacctgaacctgtggcagaagctgaagctaagcagagatgatgccaagcctctgctgagactgaagggattcccttcctttcctctggtcgagagacaggccaacgaagtggactggtgggacatggtgtgtaacgtgaagaagctgatcaacgagaaaaaggaggatggcaaggtgttttggcagaatctggctggctacaagagacaggaagccctgagaccatacctgagcagcgaggaagatcggaagaagggaaagaaattcgctcggtaccagctgggcgacctgctgctgcacctggaaaagaagcacggcgaggactggggaaaggtgtacgacgaggcctgggagcggattgacaagaaagtggaaggcctgagcaagcacatcaagctggaagaggaacggagaagcgaggacgcccagagcaaggccgccctgaccgactggctgcgggctaaggccagcttcgtgatcgagggcctgaaggaggccgacaaggacgagttctgcagatgcgagctgaagctgcagaagtggtacggggacctgcggggaaagcccttcgccatcgaagccgagaacagcatcctggacatcagcggcttcagcaagcagtacaactgtgccttcatctggcagaaggacggcgtgaagaagctgaacctgtacctgatcatcaactacttcaagggcggcaagctgcggttcaagaagatcaaacctgaagccttcgaagccaacagattctacaccgtgatcaacaaaaagagcggcgagatcgtgcccatggaggtgaacttcaacttcgacgaccccaacctgatcatcctgcctctggcctttggcaagagacagggcagagaattcatctggaacgacctgctgtccctggaaaccggcagcctgaagctggccaacggaagagtgatcgagaagacactgtacaacagaagaacccggcaggatgagcctgccctgttcgtggccctgaccttcgagcggcgggaggtcctggactcctccaatatcaaaccaatgaacctgatcggcgtggcaagaggcgaaaacatccccgccgtgatcgccctgaccgaccccgagggctgcccactgagccggtttaaggatagcctgggaaacccaacccacatcctgagaatcggcgagagctataaggagaagcagcggaccatccaggccaagaaggaggtggagcagcggagagccggcggctacagccggaagtacgccagcaaagccaagaatctggcagacgatatggtgagaaacaccgctagagatctgctgtactacgccgtgacccaggatgccatgctgatcttcgccaacctgagccggggcttcggccggcagggcaagcggaccttcatggccgagagacagtacacacggatggaggactggctgaccgccaagctggcctacgagggcctgagcaagacctacctgtccaagacactggcccagtacacctccaagacatgcagcaactgtgggtttaccatcaccagcgccgactacgacagggtgctggagaagctgaagaagacagcaacaggctggatgaccacaattaacggcaaggagctgaaggtggagggccagattacctactacaacagatacaagagacagaacgtagtcaaggacctgtccgtcgagctggatagactgagcgaagaatctgtgaacaacgacatctcctcctggacaaagggcagaagcggagaagctctgagcctcctgaagaaaagattctcccatagacccgtgcaggagaagttcgtgtgcctgaactgcggcttcgagacacacgcagccgagcaagccgccctgaacatcgccagatcctggctgttcctgcggagccaggagtacaagaaataccagacaaacaagacaaccggcaacaccgataagagagccttcgtcgagacctggcagtccttttaccggaagaagcttaaggaggtgtggaaacctgccgtgcggtctggcggatctggcggaggctcctgtgaccttcgaggacgtggccctgtacttcagcagggacgagtggaggctgctggacgaggcccagaggaggctgtaccacgacgtgatgctgcagaacttcagcctgatcagcagcctgggctgctgctgcggcgccgaggacgccgagagccccttccagcccagcatgttcagggacgtgagccaggccaggaccctgaaggccgccagcctgagccagaagaaccacccctgcgagaagggatctggctccggcagcggccccaagaaaaagagaaaagtctaagctgccttctgcggggcttgccttctggccatgcccttcttctctcccttgcacctgtacctcttggtctttgaataaagcctgagtaggaaggctagcaaaaaaaaaaaaaaaaaaaaaaaaaaaaaaaaaaaaaaaaaaaaaaaaaaaaaaaaaaaaaaaaaaaaaaaaaaaaaaaa

SEQ ID NO: 16100 - RNA, 9485 nt, synthetic construct
  source 1..9485: mol_type = other RNA
aggaaataagagagaaaagaagagtaagaagaaatataagagccaccatggcccctaagaagaagcgtaaagtgagccggatggaacgcctcgtctacgaggtgcggcagaagtgcagaaacatcgaggacatctgcatctcctgcggatctctgaacgtgaccctggagcacccactgttcatcggcggcatgtgccagaactgtaaaaactgttttctggagtgtgcctatcaatacgacgatgacggctaccagagctactgcaccatctgttgcggcggaagagaggtgctgatgtgtggaaataacaactgctgccggtgcttctgcgtggaatgcgtggacctgctggtgggccccggcgccgcccaggccgctattaaggaagatccttggaactgctacatgtgcggccacaagggcacatacggcctgctgagacggagagaggactggcctagcagactgcagatgttcttcgccaataaccacgaccaggagttcgacccccctaaggtgtaccctcccgtccccgccgagaagagaaagcccatccgggtcctgagcctgttcgatggcatcgccaccggtctgctggtgctgaaggacctgggcatccaggtggataggtacattgcctccgaggtgtgcgaggactccatcaccgtgggaatggtgcgtcatcagggcaagatcatgtacgtgggcgacgtgcggagcgtgacacagaagcatatccaggagtggggccctttcgacctggtgatcggcggcagcccttgcaatgacctgagcatcgtgaacccagcccggaagggcctgtacgagggaaccggcagactgttcttcgagttttacagactgctgcacgacgcccggcctaaggaaggcgacgaccggcccttcttttggctgttcgagaatgtggtggccatgggagtcagcgacaagcgggatattagccggttcctggagagcaaccccgtgatgatcgatgccaaggaagtgagcgccgcccaccgggccagatacttctggggcaatctgcctggcatgaacagacccctggccagcaccgtgaacgacaagctggagctgcaggagtgcctggagcacggccggatcgccaagttcagcaaggtgagaaccatcaccacccgaagcaacagcatcaaacaaggcaaggaccagcactttcctgtgttcatgaacgagaaggaggacatcctgtggtgtaccgagatggagagagtgttcgggttcccagtccactacacagatgtcagcaacatgtctagactggccagacagagactgctgggaagaagctggtccgtccctgtgatcagacacctgttcgcccctctgaaggagtacttcgcctgcgtgagcagcggcaacagcaacgccaacagccggggccccagcttctctagcggcctggtgccactgtccctgagagggagccacatgggccccatggagatctacaaaaccgtgagcgcctggaagcggcagcctgtgcgcgtgctgagcctgtttcggaatatcgataaagtcctgaaaagcctgggattcctggagagcggctctggctccggcggtggcaccctgaagtacgtggaggatgtgacaaacgtggtcagacgggatgtggagaagtggggccccttcgatctggtgtacggcagcacccaacccctgggcagctcttgtgaccggtgccctggctggtacatgtttcagttccaccggatcctgcagtacgccctgccgagacaggagtcccagcggccattcttttggattttcatggacaacttgctgctgaccgaggatgaccaggaaactaccactcggttcctgcagaccgaagccgtgaccctgcaggacgtgagaggccgggactaccagaacgccatgcgggtgtggtccaacatccctggactgaaaagcaagcacgcacctctgacccctaaagaagaggagtacctgcaggcccaggtgcggagcagaagcaagctggacgcccctaaggtggatctgctggtgaagaattgcctcctgcccctgagagagtacttcaagtatttcagccagaatagtctgcccctgggaggcagcggcggcggcgccctggtgacatttgaggacgtcgccgtgcggttcacccaggaggaatgggctctgctggatccttctcagaaaatcctgtaccgggacgtgatgagagagacataccggaatctgacctccgtgggcatcaactgggaatgttgggaccttgaagcctgcttcagaagcctgggaagaaacctgagagtgcaggtggtgaagagaaagtgcgagctgaccaacagcggcccctgcgccgagggcggcccaagcagcggcgcccctcctcccagcggcggcagcccagccggctccccaacctctaccgaggagggcacctctgagtccgccacccccgagagcggccctggcacctccaccgagcccagcgagggcagcgcacccggcagccctgccggcagccccacctccacagaggagggaaccagcaccgagcccagcgaaggcagcgccccaggcaccagcaccgagcctagtgagcaggagattaaacggatcaacaagatcagaagaagacttgtgaaagacagcaacaccaagaaggccggcaagacaggccccatgaaaaccctgctggttagagtgatgacacccgatctgagagagcggctggaaaacctgagaaagaagcctgaaaatatcccccagcccatcagcaatacatctagagccaacctgaataagctgctgaccgattacaccgaaatgaagaaggcgatcctgcatgtgtactgggaagagttccagaaggaccctgtgggcctgatgagccgggtggcccagcctgccagcaagaagatcgatcagaacaagctgaaacctgagatggacgagaagggcaacctgaccaccgccggctttgcctgctctcagtgtggccagcccctgttcgtgtacaagctggagcaggtgtctgagaagggcaaggcttacaccaactacttcggacggtgcaatgtggccgagcacgaaaagctgatcctgctggcccagctgaagcccgagaaggatagcgacgaagccgtgacatatagcctgggaaagtttgggcagagggccctggatttctacagcattcatgtgaccaaggagtccacccaccccgtgaagcccctggcccagatcgccggaaacagatacgcctccggacctgtgggaaaggccctgagcgacgcatgtatgggcacaatcgcctccttcctgtctaagtaccaggacatcatcatcgaacaccagaaggtggtgaagggcaaccagaagagactggagagcctgcgggagctggccggcaaggaaaacctggaataccctagcgtgaccctgccacctcagcctcacaccaaggagggcgttgatgcctacaacgaagtgatcgcccgggtgcgaatgtgggtgaacctgaacctgtggcagaagctgaagctaagcagagatgatgccaagcctctgctgagactgaagggattcccttcctttcctctggtcgagagacaggccaacgaagtggactggtgggacatggtgtgtaacgtgaagaagctgatcaacgagaaaaaggaggatggcaaggtgttttggcagaatctggctggctacaagagacaggaagccctgagaccatacctgagcagcgaggaagatcggaagaagggaaagaaattcgctcggtaccagctgggcgacctgctgctgcacctggaaaagaagcacggcgaggactggggaaaggtgtacgacgaggcctgggagcggattgacaagaaagtggaaggcctgagcaagcacatcaagctggaagaggaacggagaagcgaggacgcccagagcaaggccgccctgaccgactggctgcgggctaaggccagcttcgtgatcgagggcctgaaggaggccgacaaggacgagttctgcagatgcgagctgaagctgcagaagtggtacggggacctgcggggaaagcccttcgccatcgaagccgagaacagcatcctggacatcagcggcttcagcaagcagtacaactgtgccttcatctggcagaaggacggcgtgaagaagctgaacctgtacctgatcatcaactacttcaagggcggcaagctgcggttcaagaagatcaaacctgaagccttcgaagccaacagattctacaccgtgatcaacaaaaagagcggcgagatcgtgcccatggaggtgaacttcaacttcgacgaccccaacctgatcatcctgcctctggcctttggcaagagacagggcagagaattcatctggaacgacctgctgtccctggaaaccggcagcctgaagctggccaacggaagagtgatcgagaagacactgtacaacagaagaacccggcaggatgagcctgccctgttcgtggccctgaccttcgagcggcgggaggtcctggactcctccaatatcaaaccaatgaacctgatcggcgtggcaagaggcgaaaacatccccgccgtgatcgccctgaccgaccccgagggctgcccactgagccggtttaaggatagcctgggaaacccaacccacatcctgagaatcggcgagagctataaggagaagcagcggaccatccaggccaagaaggaggtggagcagcggagagccggcggctacagccggaagtacgccagcaaagccaagaatctggcagacgatatggtgagaaacaccgctagagatctgctgtactacgccgtgacccaggatgccatgctgatcttcgccaacctgagccggggcttcggccggcagggcaagcggaccttcatggccgagagacagtacacacggatggaggactggctgaccgccaagctggcctacgagggcctgagcaagacctacctgtccaagacactggcccagtacacctccaagacatgcagcaactgtgggtttaccatcaccagcgccgactacgacagggtgctggagaagctgaagaagacagcaacaggctggatgaccacaattaacggcaaggagctgaaggtggagggccagattacctactacaacagatacaagagacagaacgtagtcaaggacctgtccgtcgagctggatagactgagcgaagaatctgtgaacaacgacatctcctcctggacaaagggcagaagcggagaagctctgagcctcctgaagaaaagattctcccatagacccgtgcaggagaagttcgtgtgcctgaactgcggcttcgagacacacgcagccgagcaagccgccctgaacatcgccagatcctggctgttcctgcggagccaggagtacaagaaataccagacaaacaagacaaccggcaacaccgataagagagccttcgtcgagacctggcagtccttttaccggaagaagcttaaggaggtgtggaaacctgccgtgcggtctggcggatctggcggaggctccatgcccgccaacgaggacaccccccagcccggcggccacggcagcgcctgcgaggtgagcgtgagcttcgaggacgtgaccgtggacttcagcagggaggagtggcagcagctggacagcacccagaggaggctgtaccaggacgtgatgctggagaactacagccacctgctgagcgtgggcttcgaggtgcccaagcccgaggtgatcttcaagctggagcagggcgagggcccctggaccggcggcccaagcagcggcgcccctcctcccagcggcggcagcccagccggctccccaacctctaccgaggagggcacctctgagtccgccacccccgagagcggccctggcacctccaccgagcccagcgagggcagcgcacccggcagccctgccggcagccccacctccacagaggagggaaccagcaccgagcccagcgaaggcagcgccccaggcaccagcaccgagcctagtgagcaggagattaaacggatcaacaagatcagaagaagacttgtgaaagacagcaacaccaagaaggccggcaagacaggccccatgaaaaccctgctggttagagtgatgacacccgatctgagagagcggctggaaaacctgagaaagaagcctgaaaatatcccccagcccatcagcaatacatctagagccaacctgaataagctgctgaccgattacaccgaaatgaagaaggcgatcctgcatgtgtactgggaagagttccagaaggaccctgtgggcctgatgagccgggtggcccagcctgccagcaagaagatcgatcagaacaagctgaaacctgagatggacgagaagggcaacctgaccaccgccggctttgcctgctctcagtgtggccagcccctgttcgtgtacaagctggagcaggtgtctgagaagggcaaggcttacaccaactacttcggacggtgcaatgtggccgagcacgaaaagctgatcctgctggcccagctgaagcccgagaaggatagcgacgaagccgtgacatatagcctgggaaagtttgggcagagggccctggatttctacagcattcatgtgaccaaggagtccacccaccccgtgaagcccctggcccagatcgccggaaacagatacgcctccggacctgtgggaaaggccctgagcgacgcatgtatgggcacaatcgcctccttcctgtctaagtaccaggacatcatcatcgaacaccagaaggtggtgaagggcaaccagaagagactggagagcctgcgggagctggccggcaaggaaaacctggaataccctagcgtgaccctgccacctcagcctcacaccaaggagggcgttgatgcctacaacgaagtgatcgcccgggtgcgaatgtgggtgaacctgaacctgtggcagaagctgaagctaagcagagatgatgccaagcctctgctgagactgaagggattcccttcctttcctctggtcgagagacaggccaacgaagtggactggtgggacatggtgtgtaacgtgaagaagctgatcaacgagaaaaaggaggatggcaaggtgttttggcagaatctggctggctacaagagacaggaagccctgagaccatacctgagcagcgaggaagatcggaagaagggaaagaaattcgctcggtaccagctgggcgacctgctgctgcacctggaaaagaagcacggcgaggactggggaaaggtgtacgacgaggcctgggagcggattgacaagaaagtggaaggcctgagcaagcacatcaagctggaagaggaacggagaagcgaggacgcccagagcaaggccgccctgaccgactggctgcgggctaaggccagcttcgtgatcgagggcctgaaggaggccgacaaggacgagttctgcagatgcgagctgaagctgcagaagtggtacggggacctgcggggaaagcccttcgccatcgaagccgagaacagcatcctggacatcagcggcttcagcaagcagtacaactgtgccttcatctggcagaaggacggcgtgaagaagctgaacctgtacctgatcatcaactacttcaagggcggcaagctgcggttcaagaagatcaaacctgaagccttcgaagccaacagattctacaccgtgatcaacaaaaagagcggcgagatcgtgcccatggaggtgaacttcaacttcgacgaccccaacctgatcatcctgcctctggcctttggcaagagacagggcagagaattcatctggaacgacctgctgtccctggaaaccggcagcctgaagctggccaacggaagagtgatcgagaagacactgtacaacagaagaacccggcaggatgagcctgccctgttcgtggccctgaccttcgagcggcgggaggtcctggactcctccaatatcaaaccaatgaacctgatcggcgtggcaagaggcgaaaacatccccgccgtgatcgccctgaccgaccccgagggctgcccactgagccggtttaaggatagcctgggaaacccaacccacatcctgagaatcggcgagagctataaggagaagcagcggaccatccaggccaagaaggaggtggagcagcggagagccggcggctacagccggaagtacgccagcaaagccaagaatctggcagacgatatggtgagaaacaccgctagagatctgctgtactacgccgtgacccaggatgccatgctgatcttcgccaacctgagccggggcttcggccggcagggcaagcggaccttcatggccgagagacagtacacacggatggaggactggctgaccgccaagctggcctacgagggcctgagcaagacctacctgtccaagacactggcccagtacacctccaagacatgcagcaactgtgggtttaccatcaccagcgccgactacgacagggtgctggagaagctgaagaagacagcaacaggctggatgaccacaattaacggcaaggagctgaaggtggagggccagattacctactacaacagatacaagagacagaacgtagtcaaggacctgtccgtcgagctggatagactgagcgaagaatctgtgaacaacgacatctcctcctggacaaagggcagaagcggagaagctctgagcctcctgaagaaaagattctcccatagacccgtgcaggagaagttcgtgtgcctgaactgcggcttcgagacacacgcagccgagcaagccgccctgaacatcgccagatcctggctgttcctgcggagccaggagtacaagaaataccagacaaacaagacaaccggcaacaccgataagagagccttcgtcgagacctggcagtccttttaccggaagaagcttaaggaggtgtggaaacctgccgtgcggtctggcggatctggcggaggctcctatgcccgccaacgaggacaccccccagcccggcggccacggcagcgcctgcgaggtgagcgtgagcttcgaggacgtgaccgtggacttcagcagggaggagtggcagcagctggacagcacccagaggaggctgtaccaggacgtgatgctggagaactacagccacctgctgagcgtgggcttcgaggtgcccaagcccgaggtgatcttcaagctggagcagggcgagggcccctggaccggatctggctccggcagcggccccaagaaaaagagaaaagtctaagctgccttctgcggggcttgccttctggccatgcccttcttctctcccttgcacctgtacctcttggtctttgaataaagcctgagtaggaaggctagcaaaaaaaaaaaaaaaaaaaaaaaaaaaaaaaaaaaaaaaaaaaaaaaaaaaaaaaaaaaaaaaaaaaaaaaaaaaaaaaa

SEQ ID NO: 16101 - RNA, 9485 nt, synthetic construct
  source 1..9485: mol_type = other RNA
aggaaataagagagaaaagaagagtaagaagaaatataagagccaccatggcccctaagaagaagcgtaaagtgagccggatggaacgcctcgtctacgaggtgcggcagaagtgcagaaacatcgaggacatctgcatctcctgcggatctctgaacgtgaccctggagcacccactgttcatcggcggcatgtgccagaactgtaaaaactgttttctggagtgtgcctatcaatacgacgatgacggctaccagagctactgcaccatctgttgcggcggaagagaggtgctgatgtgtggaaataacaactgctgccggtgcttctgcgtggaatgcgtggacctgctggtgggccccggcgccgcccaggccgctattaaggaagatccttggaactgctacatgtgcggccacaagggcacatacggcctgctgagacggagagaggactggcctagcagactgcagatgttcttcgccaataaccacgaccaggagttcgacccccctaaggtgtaccctcccgtccccgccgagaagagaaagcccatccgggtcctgagcctgttcgatggcatcgccaccggtctgctggtgctgaaggacctgggcatccaggtggataggtacattgcctccgaggtgtgcgaggactccatcaccgtgggaatggtgcgtcatcagggcaagatcatgtacgtgggcgacgtgcggagcgtgacacagaagcatatccaggagtggggccctttcgacctggtgatcggcggcagcccttgcaatgacctgagcatcgtgaacccagcccggaagggcctgtacgagggaaccggcagactgttcttcgagttttacagactgctgcacgacgcccggcctaaggaaggcgacgaccggcccttcttttggctgttcgagaatgtggtggccatgggagtcagcgacaagcgggatattagccggttcctggagagcaaccccgtgatgatcgatgccaaggaagtgagcgccgcccaccgggccagatacttctggggcaatctgcctggcatgaacagacccctggccagcaccgtgaacgacaagctggagctgcaggagtgcctggagcacggccggatcgccaagttcagcaaggtgagaaccatcaccacccgaagcaacagcatcaaacaaggcaaggaccagcactttcctgtgttcatgaacgagaaggaggacatcctgtggtgtaccgagatggagagagtgttcgggttcccagtccactacacagatgtcagcaacatgtctagactggccagacagagactgctgggaagaagctggtccgtccctgtgatcagacacctgttcgcccctctgaaggagtacttcgcctgcgtgagcagcggcaacagcaacgccaacagccggggccccagcttctctagcggcctggtgccactgtccctgagagggagccacatgggccccatggagatctacaaaaccgtgagcgcctggaagcggcagcctgtgcgcgtgctgagcctgtttcggaatatcgataaagtcctgaaaagcctgggattcctggagagcggctctggctccggcggtggcaccctgaagtacgtggaggatgtgacaaacgtggtcagacgggatgtggagaagtggggccccttcgatctggtgtacggcagcacccaacccctgggcagctcttgtgaccggtgccctggctggtacatgtttcagttccaccggatcctgcagtacgccctgccgagacaggagtcccagcggccattcttttggattttcatggacaacttgctgctgaccgaggatgaccaggaaactaccactcggttcctgcagaccgaagccgtgaccctgcaggacgtgagaggccgggactaccagaacgccatgcgggtgtggtccaacatccctggactgaaaagcaagcacgcacctctgacccctaaagaagaggagtacctgcaggcccaggtgcggagcagaagcaagctggacgcccctaaggtggatctgctggtgaagaattgcctcctgcccctgagagagtacttcaagtatttcagccagaatagtctgcccctgggaggcagcggcggcggcgccctggtgacatttgaggacgtcgccgtgcggttcacccaggaggaatgggctctgctggatccttctcagaaaatcctgtaccgggacgtgatgagagagacataccggaatctgacctccgtgggcatcaactgggaatgttgggaccttgaagcctgcttcagaagcctgggaagaaacctgagagtgcaggtggtgaagagaaagtgcgagctgaccaacagcggcccctgcgccgagggcggcccaagcagcggcgcccctcctcccagcggcggcagcccagccggctccccaacctctaccgaggagggcacctctgagtccgccacccccgagagcggccctggcacctccaccgagcccagcgagggcagcgcacccggcagccctgccggcagccccacctccacagaggagggaaccagcaccgagcccagcgaaggcagcgccccaggcaccagcaccgagcctagtgagcaggagattaaacggatcaacaagatcagaagaagacttgtgaaagacagcaacaccaagaaggccggcaagacaggccccatgaaaaccctgctggttagagtgatgacacccgatctgagagagcggctggaaaacctgagaaagaagcctgaaaatatcccccagcccatcagcaatacatctagagccaacctgaataagctgctgaccgattacaccgaaatgaagaaggcgatcctgcatgtgtactgggaagagttccagaaggaccctgtgggcctgatgagccgggtggcccagcctgccagcaagaagatcgatcagaacaagctgaaacctgagatggacgagaagggcaacctgaccaccgccggctttgcctgctctcagtgtggccagcccctgttcgtgtacaagctggagcaggtgtctgagaagggcaaggcttacaccaactacttcggacggtgcaatgtggccgagcacgaaaagctgatcctgctggcccagctgaagcccgagaaggatagcgacgaagccgtgacatatagcctgggaaagtttgggcagagggccctggatttctacagcattcatgtgaccaaggagtccacccaccccgtgaagcccctggcccagatcgccggaaacagatacgcctccggacctgtgggaaaggccctgagcgacgcatgtatgggcacaatcgcctccttcctgtctaagtaccaggacatcatcatcgaacaccagaaggtggtgaagggcaaccagaagagactggagagcctgcgggagctggccggcaaggaaaacctggaataccctagcgtgaccctgccacctcagcctcacaccaaggagggcgttgatgcctacaacgaagtgatcgcccgggtgcgaatgtgggtgaacctgaacctgtggcagaagctgaagctaagcagagatgatgccaagcctctgctgagactgaagggattcccttcctttcctctggtcgagagacaggccaacgaagtggactggtgggacatggtgtgtaacgtgaagaagctgatcaacgagaaaaaggaggatggcaaggtgttttggcagaatctggctggctacaagagacaggaagccctgagaccatacctgagcagcgaggaagatcggaagaagggaaagaaattcgctcggtaccagctgggcgacctgctgctgcacctggaaaagaagcacggcgaggactggggaaaggtgtacgacgaggcctgggagcggattgacaagaaagtggaaggcctgagcaagcacatcaagctggaagaggaacggagaagcgaggacgcccagagcaaggccgccctgaccgactggctgcgggctaaggccagcttcgtgatcgagggcctgaaggaggccgacaaggacgagttctgcagatgcgagctgaagctgcagaagtggtacggggacctgcggggaaagcccttcgccatcgaagccgagaacagcatcctggacatcagcggcttcagcaagcagtacaactgtgccttcatctggcagaaggacggcgtgaagaagctgaacctgtacctgatcatcaactacttcaagggcggcaagctgcggttcaagaagatcaaacctgaagccttcgaagccaacagattctacaccgtgatcaacaaaaagagcggcgagatcgtgcccatggaggtgaacttcaacttcgacgaccccaacctgatcatcctgcctctggcctttggcaagagacagggcagagaattcatctggaacgacctgctgtccctggaaaccggcagcctgaagctggccaacggaagagtgatcgagaagacactgtacaacagaagaacccggcaggatgagcctgccctgttcgtggccctgaccttcgagcggcgggaggtcctggactcctccaatatcaaaccaatgaacctgatcggcgtggcaagaggcgaaaacatccccgccgtgatcgccctgaccgaccccgagggctgcccactgagccggtttaaggatagcctgggaaacccaacccacatcctgagaatcggcgagagctataaggagaagcagcggaccatccaggccaagaaggaggtggagcagcggagagccggcggctacagccggaagtacgccagcaaagccaagaatctggcagacgatatggtgagaaacaccgctagagatctgctgtactacgccgtgacccaggatgccatgctgatcttcgccaacctgagccggggcttcggccggcagggcaagcggaccttcatggccgagagacagtacacacggatggaggactggctgaccgccaagctggcctacgagggcctgagcaagacctacctgtccaagacactggcccagtacacctccaagacatgcagcaactgtgggtttaccatcaccagcgccgactacgacagggtgctggagaagctgaagaagacagcaacaggctggatgaccacaattaacggcaaggagctgaaggtggagggccagattacctactacaacagatacaagagacagaacgtagtcaaggacctgtccgtcgagctggatagactgagcgaagaatctgtgaacaacgacatctcctcctggacaaagggcagaagcggagaagctctgagcctcctgaagaaaagattctcccatagacccgtgcaggagaagttcgtgtgcctgaactgcggcttcgagacacacgcagccgagcaagccgccctgaacatcgccagatcctggctgttcctgcggagccaggagtacaagaaataccagacaaacaagacaaccggcaacaccgataagagagccttcgtcgagacctggcagtccttttaccggaagaagcttaaggaggtgtggaaacctgccgtgcggtctggcggatctggcggaggctcccaggaccccagcgccgagcagctgagcgaggaggtgcccgtggtgttcgaggagctgcccgtggtgttcgaggacgtggccgtgtacttcaccagggaggagtggggcatgctggacaagaggcagaaggagctgtacagggacgtgatgaggatgaactacgagctgctggccagcctgggccccgccgccgccaagcccgacctgatcagcaagctggagaggagggccgccccctggatcggcggcccaagcagcggcgcccctcctcccagcggcggcagcccagccggctccccaacctctaccgaggagggcacctctgagtccgccacccccgagagcggccctggcacctccaccgagcccagcgagggcagcgcacccggcagccctgccggcagccccacctccacagaggagggaaccagcaccgagcccagcgaaggcagcgccccaggcaccagcaccgagcctagtgagcaggagattaaacggatcaacaagatcagaagaagacttgtgaaagacagcaacaccaagaaggccggcaagacaggccccatgaaaaccctgctggttagagtgatgacacccgatctgagagagcggctggaaaacctgagaaagaagcctgaaaatatcccccagcccatcagcaatacatctagagccaacctgaataagctgctgaccgattacaccgaaatgaagaaggcgatcctgcatgtgtactgggaagagttccagaaggaccctgtgggcctgatgagccgggtggcccagcctgccagcaagaagatcgatcagaacaagctgaaacctgagatggacgagaagggcaacctgaccaccgccggctttgcctgctctcagtgtggccagcccctgttcgtgtacaagctggagcaggtgtctgagaagggcaaggcttacaccaactacttcggacggtgcaatgtggccgagcacgaaaagctgatcctgctggcccagctgaagcccgagaaggatagcgacgaagccgtgacatatagcctgggaaagtttgggcagagggccctggatttctacagcattcatgtgaccaaggagtccacccaccccgtgaagcccctggcccagatcgccggaaacagatacgcctccggacctgtgggaaaggccctgagcgacgcatgtatgggcacaatcgcctccttcctgtctaagtaccaggacatcatcatcgaacaccagaaggtggtgaagggcaaccagaagagactggagagcctgcgggagctggccggcaaggaaaacctggaataccctagcgtgaccctgccacctcagcctcacaccaaggagggcgttgatgcctacaacgaagtgatcgcccgggtgcgaatgtgggtgaacctgaacctgtggcagaagctgaagctaagcagagatgatgccaagcctctgctgagactgaagggattcccttcctttcctctggtcgagagacaggccaacgaagtggactggtgggacatggtgtgtaacgtgaagaagctgatcaacgagaaaaaggaggatggcaaggtgttttggcagaatctggctggctacaagagacaggaagccctgagaccatacctgagcagcgaggaagatcggaagaagggaaagaaattcgctcggtaccagctgggcgacctgctgctgcacctggaaaagaagcacggcgaggactggggaaaggtgtacgacgaggcctgggagcggattgacaagaaagtggaaggcctgagcaagcacatcaagctggaagaggaacggagaagcgaggacgcccagagcaaggccgccctgaccgactggctgcgggctaaggccagcttcgtgatcgagggcctgaaggaggccgacaaggacgagttctgcagatgcgagctgaagctgcagaagtggtacggggacctgcggggaaagcccttcgccatcgaagccgagaacagcatcctggacatcagcggcttcagcaagcagtacaactgtgccttcatctggcagaaggacggcgtgaagaagctgaacctgtacctgatcatcaactacttcaagggcggcaagctgcggttcaagaagatcaaacctgaagccttcgaagccaacagattctacaccgtgatcaacaaaaagagcggcgagatcgtgcccatggaggtgaacttcaacttcgacgaccccaacctgatcatcctgcctctggcctttggcaagagacagggcagagaattcatctggaacgacctgctgtccctggaaaccggcagcctgaagctggccaacggaagagtgatcgagaagacactgtacaacagaagaacccggcaggatgagcctgccctgttcgtggccctgaccttcgagcggcgggaggtcctggactcctccaatatcaaaccaatgaacctgatcggcgtggcaagaggcgaaaacatccccgccgtgatcgccctgaccgaccccgagggctgcccactgagccggtttaaggatagcctgggaaacccaacccacatcctgagaatcggcgagagctataaggagaagcagcggaccatccaggccaagaaggaggtggagcagcggagagccggcggctacagccggaagtacgccagcaaagccaagaatctggcagacgatatggtgagaaacaccgctagagatctgctgtactacgccgtgacccaggatgccatgctgatcttcgccaacctgagccggggcttcggccggcagggcaagcggaccttcatggccgagagacagtacacacggatggaggactggctgaccgccaagctggcctacgagggcctgagcaagacctacctgtccaagacactggcccagtacacctccaagacatgcagcaactgtgggtttaccatcaccagcgccgactacgacagggtgctggagaagctgaagaagacagcaacaggctggatgaccacaattaacggcaaggagctgaaggtggagggccagattacctactacaacagatacaagagacagaacgtagtcaaggacctgtccgtcgagctggatagactgagcgaagaatctgtgaacaacgacatctcctcctggacaaagggcagaagcggagaagctctgagcctcctgaagaaaagattctcccatagacccgtgcaggagaagttcgtgtgcctgaactgcggcttcgagacacacgcagccgagcaagccgccctgaacatcgccagatcctggctgttcctgcggagccaggagtacaagaaataccagacaaacaagacaaccggcaacaccgataagagagccttcgtcgagacctggcagtccttttaccggaagaagcttaaggaggtgtggaaacctgccgtgcggtctggcggatctggcggaggctcctcaggaccccagcgccgagcagctgagcgaggaggtgcccgtggtgttcgaggagctgcccgtggtgttcgaggacgtggccgtgtacttcaccagggaggagtggggcatgctggacaagaggcagaaggagctgtacagggacgtgatgaggatgaactacgagctgctggccagcctgggccccgccgccgccaagcccgacctgatcagcaagctggagaggagggccgccccctggatcggatctggctccggcagcggccccaagaaaaagagaaaagtctaagctgccttctgcggggcttgccttctggccatgcccttcttctctcccttgcacctgtacctcttggtctttgaataaagcctgagtaggaaggctagcaaaaaaaaaaaaaaaaaaaaaaaaaaaaaaaaaaaaaaaaaaaaaaaaaaaaaaaaaaaaaaaaaaaaaaaaaaaaaaaa

SEQ ID NO: 16102 - RNA, 9485 nt, synthetic construct
  source 1..9485: mol_type = other RNA
aggaaataagagagaaaagaagagtaagaagaaatataagagccaccatggcccctaagaagaagcgtaaagtgagccggatggaacgcctcgtctacgaggtgcggcagaagtgcagaaacatcgaggacatctgcatctcctgcggatctctgaacgtgaccctggagcacccactgttcatcggcggcatgtgccagaactgtaaaaactgttttctggagtgtgcctatcaatacgacgatgacggctaccagagctactgcaccatctgttgcggcggaagagaggtgctgatgtgtggaaataacaactgctgccggtgcttctgcgtggaatgcgtggacctgctggtgggccccggcgccgcccaggccgctattaaggaagatccttggaactgctacatgtgcggccacaagggcacatacggcctgctgagacggagagaggactggcctagcagactgcagatgttcttcgccaataaccacgaccaggagttcgacccccctaaggtgtaccctcccgtccccgccgagaagagaaagcccatccgggtcctgagcctgttcgatggcatcgccaccggtctgctggtgctgaaggacctgggcatccaggtggataggtacattgcctccgaggtgtgcgaggactccatcaccgtgggaatggtgcgtcatcagggcaagatcatgtacgtgggcgacgtgcggagcgtgacacagaagcatatccaggagtggggccctttcgacctggtgatcggcggcagcccttgcaatgacctgagcatcgtgaacccagcccggaagggcctgtacgagggaaccggcagactgttcttcgagttttacagactgctgcacgacgcccggcctaaggaaggcgacgaccggcccttcttttggctgttcgagaatgtggtggccatgggagtcagcgacaagcgggatattagccggttcctggagagcaaccccgtgatgatcgatgccaaggaagtgagcgccgcccaccgggccagatacttctggggcaatctgcctggcatgaacagacccctggccagcaccgtgaacgacaagctggagctgcaggagtgcctggagcacggccggatcgccaagttcagcaaggtgagaaccatcaccacccgaagcaacagcatcaaacaaggcaaggaccagcactttcctgtgttcatgaacgagaaggaggacatcctgtggtgtaccgagatggagagagtgttcgggttcccagtccactacacagatgtcagcaacatgtctagactggccagacagagactgctgggaagaagctggtccgtccctgtgatcagacacctgttcgcccctctgaaggagtacttcgcctgcgtgagcagcggcaacagcaacgccaacagccggggccccagcttctctagcggcctggtgccactgtccctgagagggagccacatgggccccatggagatctacaaaaccgtgagcgcctggaagcggcagcctgtgcgcgtgctgagcctgtttcggaatatcgataaagtcctgaaaagcctgggattcctggagagcggctctggctccggcggtggcaccctgaagtacgtggaggatgtgacaaacgtggtcagacgggatgtggagaagtggggccccttcgatctggtgtacggcagcacccaacccctgggcagctcttgtgaccggtgccctggctggtacatgtttcagttccaccggatcctgcagtacgccctgccgagacaggagtcccagcggccattcttttggattttcatggacaacttgctgctgaccgaggatgaccaggaaactaccactcggttcctgcagaccgaagccgtgaccctgcaggacgtgagaggccgggactaccagaacgccatgcgggtgtggtccaacatccctggactgaaaagcaagcacgcacctctgacccctaaagaagaggagtacctgcaggcccaggtgcggagcagaagcaagctggacgcccctaaggtggatctgctggtgaagaattgcctcctgcccctgagagagtacttcaagtatttcagccagaatagtctgcccctgggaggcagcggcggcggcgccctggtgacatttgaggacgtcgccgtgcggttcacccaggaggaatgggctctgctggatccttctcagaaaatcctgtaccgggacgtgatgagagagacataccggaatctgacctccgtgggcatcaactgggaatgttgggaccttgaagcctgcttcagaagcctgggaagaaacctgagagtgcaggtggtgaagagaaagtgcgagctgaccaacagcggcccctgcgccgagggcggcccaagcagcggcgcccctcctcccagcggcggcagcccagccggctccccaacctctaccgaggagggcacctctgagtccgccacccccgagagcggccctggcacctccaccgagcccagcgagggcagcgcacccggcagccctgccggcagccccacctccacagaggagggaaccagcaccgagcccagcgaaggcagcgccccaggcaccagcaccgagcctagtgagcaggagattaaacggatcaacaagatcagaagaagacttgtgaaagacagcaacaccaagaaggccggcaagacaggccccatgaaaaccctgctggttagagtgatgacacccgatctgagagagcggctggaaaacctgagaaagaagcctgaaaatatcccccagcccatcagcaatacatctagagccaacctgaataagctgctgaccgattacaccgaaatgaagaaggcgatcctgcatgtgtactgggaagagttccagaaggaccctgtgggcctgatgagccgggtggcccagcctgccagcaagaagatcgatcagaacaagctgaaacctgagatggacgagaagggcaacctgaccaccgccggctttgcctgctctcagtgtggccagcccctgttcgtgtacaagctggagcaggtgtctgagaagggcaaggcttacaccaactacttcggacggtgcaatgtggccgagcacgaaaagctgatcctgctggcccagctgaagcccgagaaggatagcgacgaagccgtgacatatagcctgggaaagtttgggcagagggccctggatttctacagcattcatgtgaccaaggagtccacccaccccgtgaagcccctggcccagatcgccggaaacagatacgcctccggacctgtgggaaaggccctgagcgacgcatgtatgggcacaatcgcctccttcctgtctaagtaccaggacatcatcatcgaacaccagaaggtggtgaagggcaaccagaagagactggagagcctgcgggagctggccggcaaggaaaacctggaataccctagcgtgaccctgccacctcagcctcacaccaaggagggcgttgatgcctacaacgaagtgatcgcccgggtgcgaatgtgggtgaacctgaacctgtggcagaagctgaagctaagcagagatgatgccaagcctctgctgagactgaagggattcccttcctttcctctggtcgagagacaggccaacgaagtggactggtgggacatggtgtgtaacgtgaagaagctgatcaacgagaaaaaggaggatggcaaggtgttttggcagaatctggctggctacaagagacaggaagccctgagaccatacctgagcagcgaggaagatcggaagaagggaaagaaattcgctcggtaccagctgggcgacctgctgctgcacctggaaaagaagcacggcgaggactggggaaaggtgtacgacgaggcctgggagcggattgacaagaaagtggaaggcctgagcaagcacatcaagctggaagaggaacggagaagcgaggacgcccagagcaaggccgccctgaccgactggctgcgggctaaggccagcttcgtgatcgagggcctgaaggaggccgacaaggacgagttctgcagatgcgagctgaagctgcagaagtggtacggggacctgcggggaaagcccttcgccatcgaagccgagaacagcatcctggacatcagcggcttcagcaagcagtacaactgtgccttcatctggcagaaggacggcgtgaagaagctgaacctgtacctgatcatcaactacttcaagggcggcaagctgcggttcaagaagatcaaacctgaagccttcgaagccaacagattctacaccgtgatcaacaaaaagagcggcgagatcgtgcccatggaggtgaacttcaacttcgacgaccccaacctgatcatcctgcctctggcctttggcaagagacagggcagagaattcatctggaacgacctgctgtccctggaaaccggcagcctgaagctggccaacggaagagtgatcgagaagacactgtacaacagaagaacccggcaggatgagcctgccctgttcgtggccctgaccttcgagcggcgggaggtcctggactcctccaatatcaaaccaatgaacctgatcggcgtggcaagaggcgaaaacatccccgccgtgatcgccctgaccgaccccgagggctgcccactgagccggtttaaggatagcctgggaaacccaacccacatcctgagaatcggcgagagctataaggagaagcagcggaccatccaggccaagaaggaggtggagcagcggagagccggcggctacagccggaagtacgccagcaaagccaagaatctggcagacgatatggtgagaaacaccgctagagatctgctgtactacgccgtgacccaggatgccatgctgatcttcgccaacctgagccggggcttcggccggcagggcaagcggaccttcatggccgagagacagtacacacggatggaggactggctgaccgccaagctggcctacgagggcctgagcaagacctacctgtccaagacactggcccagtacacctccaagacatgcagcaactgtgggtttaccatcaccagcgccgactacgacagggtgctggagaagctgaagaagacagcaacaggctggatgaccacaattaacggcaaggagctgaaggtggagggccagattacctactacaacagatacaagagacagaacgtagtcaaggacctgtccgtcgagctggatagactgagcgaagaatctgtgaacaacgacatctcctcctggacaaagggcagaagcggagaagctctgagcctcctgaagaaaagattctcccatagacccgtgcaggagaagttcgtgtgcctgaactgcggcttcgagacacacgcagccgagcaagccgccctgaacatcgccagatcctggctgttcctgcggagccaggagtacaagaaataccagacaaacaagacaaccggcaacaccgataagagagccttcgtcgagacctggcagtccttttaccggaagaagcttaaggaggtgtggaaacctgccgtgcggtctggcggatctggcggaggctccctgctgaccttcgaggacgtggccctgagcttcaccgaggaggagtggcagctgctggaccccacccagaagatcctgtacaacgacgtgatgcaggagaactacgagaccgtgatcagcctgggcctgaagctgaagaacgacaccggcaacgaccagcccatcagcctgagcaccctggagatccagggcagcggctgcaaggtgctgaggaaggccagggtgaaggtggcccagaagaccggcggcccaagcagcggcgcccctcctcccagcggcggcagcccagccggctccccaacctctaccgaggagggcacctctgagtccgccacccccgagagcggccctggcacctccaccgagcccagcgagggcagcgcacccggcagccctgccggcagccccacctccacagaggagggaaccagcaccgagcccagcgaaggcagcgccccaggcaccagcaccgagcctagtgagcaggagattaaacggatcaacaagatcagaagaagacttgtgaaagacagcaacaccaagaaggccggcaagacaggccccatgaaaaccctgctggttagagtgatgacacccgatctgagagagcggctggaaaacctgagaaagaagcctgaaaatatcccccagcccatcagcaatacatctagagccaacctgaataagctgctgaccgattacaccgaaatgaagaaggcgatcctgcatgtgtactgggaagagttccagaaggaccctgtgggcctgatgagccgggtggcccagcctgccagcaagaagatcgatcagaacaagctgaaacctgagatggacgagaagggcaacctgaccaccgccggctttgcctgctctcagtgtggccagcccctgttcgtgtacaagctggagcaggtgtctgagaagggcaaggcttacaccaactacttcggacggtgcaatgtggccgagcacgaaaagctgatcctgctggcccagctgaagcccgagaaggatagcgacgaagccgtgacatatagcctgggaaagtttgggcagagggccctggatttctacagcattcatgtgaccaaggagtccacccaccccgtgaagcccctggcccagatcgccggaaacagatacgcctccggacctgtgggaaaggccctgagcgacgcatgtatgggcacaatcgcctccttcctgtctaagtaccaggacatcatcatcgaacaccagaaggtggtgaagggcaaccagaagagactggagagcctgcgggagctggccggcaaggaaaacctggaataccctagcgtgaccctgccacctcagcctcacaccaaggagggcgttgatgcctacaacgaagtgatcgcccgggtgcgaatgtgggtgaacctgaacctgtggcagaagctgaagctaagcagagatgatgccaagcctctgctgagactgaagggattcccttcctttcctctggtcgagagacaggccaacgaagtggactggtgggacatggtgtgtaacgtgaagaagctgatcaacgagaaaaaggaggatggcaaggtgttttggcagaatctggctggctacaagagacaggaagccctgagaccatacctgagcagcgaggaagatcggaagaagggaaagaaattcgctcggtaccagctgggcgacctgctgctgcacctggaaaagaagcacggcgaggactggggaaaggtgtacgacgaggcctgggagcggattgacaagaaagtggaaggcctgagcaagcacatcaagctggaagaggaacggagaagcgaggacgcccagagcaaggccgccctgaccgactggctgcgggctaaggccagcttcgtgatcgagggcctgaaggaggccgacaaggacgagttctgcagatgcgagctgaagctgcagaagtggtacggggacctgcggggaaagcccttcgccatcgaagccgagaacagcatcctggacatcagcggcttcagcaagcagtacaactgtgccttcatctggcagaaggacggcgtgaagaagctgaacctgtacctgatcatcaactacttcaagggcggcaagctgcggttcaagaagatcaaacctgaagccttcgaagccaacagattctacaccgtgatcaacaaaaagagcggcgagatcgtgcccatggaggtgaacttcaacttcgacgaccccaacctgatcatcctgcctctggcctttggcaagagacagggcagagaattcatctggaacgacctgctgtccctggaaaccggcagcctgaagctggccaacggaagagtgatcgagaagacactgtacaacagaagaacccggcaggatgagcctgccctgttcgtggccctgaccttcgagcggcgggaggtcctggactcctccaatatcaaaccaatgaacctgatcggcgtggcaagaggcgaaaacatccccgccgtgatcgccctgaccgaccccgagggctgcccactgagccggtttaaggatagcctgggaaacccaacccacatcctgagaatcggcgagagctataaggagaagcagcggaccatccaggccaagaaggaggtggagcagcggagagccggcggctacagccggaagtacgccagcaaagccaagaatctggcagacgatatggtgagaaacaccgctagagatctgctgtactacgccgtgacccaggatgccatgctgatcttcgccaacctgagccggggcttcggccggcagggcaagcggaccttcatggccgagagacagtacacacggatggaggactggctgaccgccaagctggcctacgagggcctgagcaagacctacctgtccaagacactggcccagtacacctccaagacatgcagcaactgtgggtttaccatcaccagcgccgactacgacagggtgctggagaagctgaagaagacagcaacaggctggatgaccacaattaacggcaaggagctgaaggtggagggccagattacctactacaacagatacaagagacagaacgtagtcaaggacctgtccgtcgagctggatagactgagcgaagaatctgtgaacaacgacatctcctcctggacaaagggcagaagcggagaagctctgagcctcctgaagaaaagattctcccatagacccgtgcaggagaagttcgtgtgcctgaactgcggcttcgagacacacgcagccgagcaagccgccctgaacatcgccagatcctggctgttcctgcggagccaggagtacaagaaataccagacaaacaagacaaccggcaacaccgataagagagccttcgtcgagacctggcagtccttttaccggaagaagcttaaggaggtgtggaaacctgccgtgcggtctggcggatctggcggaggctcctctgctgaccttcgaggacgtggccctgagcttcaccgaggaggagtggcagctgctggaccccacccagaagatcctgtacaacgacgtgatgcaggagaactacgagaccgtgatcagcctgggcctgaagctgaagaacgacaccggcaacgaccagcccatcagcctgagcaccctggagatccagggcagcggctgcaaggtgctgaggaaggccagggtgaaggtggcccagaagaccggatctggctccggcagcggccccaagaaaaagagaaaagtctaagctgccttctgcggggcttgccttctggccatgcccttcttctctcccttgcacctgtacctcttggtctttgaataaagcctgagtaggaaggctagcaaaaaaaaaaaaaaaaaaaaaaaaaaaaaaaaaaaaaaaaaaaaaaaaaaaaaaaaaaaaaaaaaaaaaaaaaaaaaaaa

SEQ ID NO: 16103 - RNA, 9485 nt, synthetic construct
  source 1..9485: mol_type = other RNA
aggaaataagagagaaaagaagagtaagaagaaatataagagccaccatggcccctaagaagaagcgtaaagtgagccggatggaacgcctcgtctacgaggtgcggcagaagtgcagaaacatcgaggacatctgcatctcctgcggatctctgaacgtgaccctggagcacccactgttcatcggcggcatgtgccagaactgtaaaaactgttttctggagtgtgcctatcaatacgacgatgacggctaccagagctactgcaccatctgttgcggcggaagagaggtgctgatgtgtggaaataacaactgctgccggtgcttctgcgtggaatgcgtggacctgctggtgggccccggcgccgcccaggccgctattaaggaagatccttggaactgctacatgtgcggccacaagggcacatacggcctgctgagacggagagaggactggcctagcagactgcagatgttcttcgccaataaccacgaccaggagttcgacccccctaaggtgtaccctcccgtccccgccgagaagagaaagcccatccgggtcctgagcctgttcgatggcatcgccaccggtctgctggtgctgaaggacctgggcatccaggtggataggtacattgcctccgaggtgtgcgaggactccatcaccgtgggaatggtgcgtcatcagggcaagatcatgtacgtgggcgacgtgcggagcgtgacacagaagcatatccaggagtggggccctttcgacctggtgatcggcggcagcccttgcaatgacctgagcatcgtgaacccagcccggaagggcctgtacgagggaaccggcagactgttcttcgagttttacagactgctgcacgacgcccggcctaaggaaggcgacgaccggcccttcttttggctgttcgagaatgtggtggccatgggagtcagcgacaagcgggatattagccggttcctggagagcaaccccgtgatgatcgatgccaaggaagtgagcgccgcccaccgggccagatacttctggggcaatctgcctggcatgaacagacccctggccagcaccgtgaacgacaagctggagctgcaggagtgcctggagcacggccggatcgccaagttcagcaaggtgagaaccatcaccacccgaagcaacagcatcaaacaaggcaaggaccagcactttcctgtgttcatgaacgagaaggaggacatcctgtggtgtaccgagatggagagagtgttcgggttcccagtccactacacagatgtcagcaacatgtctagactggccagacagagactgctgggaagaagctggtccgtccctgtgatcagacacctgttcgcccctctgaaggagtacttcgcctgcgtgagcagcggcaacagcaacgccaacagccggggccccagcttctctagcggcctggtgccactgtccctgagagggagccacatgggccccatggagatctacaaaaccgtgagcgcctggaagcggcagcctgtgcgcgtgctgagcctgtttcggaatatcgataaagtcctgaaaagcctgggattcctggagagcggctctggctccggcggtggcaccctgaagtacgtggaggatgtgacaaacgtggtcagacgggatgtggagaagtggggccccttcgatctggtgtacggcagcacccaacccctgggcagctcttgtgaccggtgccctggctggtacatgtttcagttccaccggatcctgcagtacgccctgccgagacaggagtcccagcggccattcttttggattttcatggacaacttgctgctgaccgaggatgaccaggaaactaccactcggttcctgcagaccgaagccgtgaccctgcaggacgtgagaggccgggactaccagaacgccatgcgggtgtggtccaacatccctggactgaaaagcaagcacgcacctctgacccctaaagaagaggagtacctgcaggcccaggtgcggagcagaagcaagctggacgcccctaaggtggatctgctggtgaagaattgcctcctgcccctgagagagtacttcaagtatttcagccagaatagtctgcccctgggaggcagcggcggcggcgccctggtgacatttgaggacgtcgccgtgcggttcacccaggaggaatgggctctgctggatccttctcagaaaatcctgtaccgggacgtgatgagagagacataccggaatctgacctccgtgggcatcaactgggaatgttgggaccttgaagcctgcttcagaagcctgggaagaaacctgagagtgcaggtggtgaagagaaagtgcgagctgaccaacagcggcccctgcgccgagggcggcccaagcagcggcgcccctcctcccagcggcggcagcccagccggctccccaacctctaccgaggagggcacctctgagtccgccacccccgagagcggccctggcacctccaccgagcccagcgagggcagcgcacccggcagccctgccggcagccccacctccacagaggagggaaccagcaccgagcccagcgaaggcagcgccccaggcaccagcaccgagcctagtgagcaggagattaaacggatcaacaagatcagaagaagacttgtgaaagacagcaacaccaagaaggccggcaagacaggccccatgaaaaccctgctggttagagtgatgacacccgatctgagagagcggctggaaaacctgagaaagaagcctgaaaatatcccccagcccatcagcaatacatctagagccaacctgaataagctgctgaccgattacaccgaaatgaagaaggcgatcctgcatgtgtactgggaagagttccagaaggaccctgtgggcctgatgagccgggtggcccagcctgccagcaagaagatcgatcagaacaagctgaaacctgagatggacgagaagggcaacctgaccaccgccggctttgcctgctctcagtgtggccagcccctgttcgtgtacaagctggagcaggtgtctgagaagggcaaggcttacaccaactacttcggacggtgcaatgtggccgagcacgaaaagctgatcctgctggcccagctgaagcccgagaaggatagcgacgaagccgtgacatatagcctgggaaagtttgggcagagggccctggatttctacagcattcatgtgaccaaggagtccacccaccccgtgaagcccctggcccagatcgccggaaacagatacgcctccggacctgtgggaaaggccctgagcgacgcatgtatgggcacaatcgcctccttcctgtctaagtaccaggacatcatcatcgaacaccagaaggtggtgaagggcaaccagaagagactggagagcctgcgggagctggccggcaaggaaaacctggaataccctagcgtgaccctgccacctcagcctcacaccaaggagggcgttgatgcctacaacgaagtgatcgcccgggtgcgaatgtgggtgaacctgaacctgtggcagaagctgaagctaagcagagatgatgccaagcctctgctgagactgaagggattcccttcctttcctctggtcgagagacaggccaacgaagtggactggtgggacatggtgtgtaacgtgaagaagctgatcaacgagaaaaaggaggatggcaaggtgttttggcagaatctggctggctacaagagacaggaagccctgagaccatacctgagcagcgaggaagatcggaagaagggaaagaaattcgctcggtaccagctgggcgacctgctgctgcacctggaaaagaagcacggcgaggactggggaaaggtgtacgacgaggcctgggagcggattgacaagaaagtggaaggcctgagcaagcacatcaagctggaagaggaacggagaagcgaggacgcccagagcaaggccgccctgaccgactggctgcgggctaaggccagcttcgtgatcgagggcctgaaggaggccgacaaggacgagttctgcagatgcgagctgaagctgcagaagtggtacggggacctgcggggaaagcccttcgccatcgaagccgagaacagcatcctggacatcagcggcttcagcaagcagtacaactgtgccttcatctggcagaaggacggcgtgaagaagctgaacctgtacctgatcatcaactacttcaagggcggcaagctgcggttcaagaagatcaaacctgaagccttcgaagccaacagattctacaccgtgatcaacaaaaagagcggcgagatcgtgcccatggaggtgaacttcaacttcgacgaccccaacctgatcatcctgcctctggcctttggcaagagacagggcagagaattcatctggaacgacctgctgtccctggaaaccggcagcctgaagctggccaacggaagagtgatcgagaagacactgtacaacagaagaacccggcaggatgagcctgccctgttcgtggccctgaccttcgagcggcgggaggtcctggactcctccaatatcaaaccaatgaacctgatcggcgtggcaagaggcgaaaacatccccgccgtgatcgccctgaccgaccccgagggctgcccactgagccggtttaaggatagcctgggaaacccaacccacatcctgagaatcggcgagagctataaggagaagcagcggaccatccaggccaagaaggaggtggagcagcggagagccggcggctacagccggaagtacgccagcaaagccaagaatctggcagacgatatggtgagaaacaccgctagagatctgctgtactacgccgtgacccaggatgccatgctgatcttcgccaacctgagccggggcttcggccggcagggcaagcggaccttcatggccgagagacagtacacacggatggaggactggctgaccgccaagctggcctacgagggcctgagcaagacctacctgtccaagacactggcccagtacacctccaagacatgcagcaactgtgggtttaccatcaccagcgccgactacgacagggtgctggagaagctgaagaagacagcaacaggctggatgaccacaattaacggcaaggagctgaaggtggagggccagattacctactacaacagatacaagagacagaacgtagtcaaggacctgtccgtcgagctggatagactgagcgaagaatctgtgaacaacgacatctcctcctggacaaagggcagaagcggagaagctctgagcctcctgaagaaaagattctcccatagacccgtgcaggagaagttcgtgtgcctgaactgcggcttcgagacacacgcagccgagcaagccgccctgaacatcgccagatcctggctgttcctgcggagccaggagtacaagaaataccagacaaacaagacaaccggcaacaccgataagagagccttcgtcgagacctggcagtccttttaccggaagaagcttaaggaggtgtggaaacctgccgtgcggtctggcggatctggcggaggctccagggccgaggaggccgtgaccttcaaggacgtggccgtggtgttcaccgaggaggagctgcagctgctggacctggcccagaggaagctgtacagggacgtgatgctggagaacttcaggaacctgctgagcgtgggccaccagcccttccacggcgacaccttccacttcctgagggaggagaagttctgggtgatggagaccaccagccagagggagggcaacagcggcggcaagatccagggcggcccaagcagcggcgcccctcctcccagcggcggcagcccagccggctccccaacctctaccgaggagggcacctctgagtccgccacccccgagagcggccctggcacctccaccgagcccagcgagggcagcgcacccggcagccctgccggcagccccacctccacagaggagggaaccagcaccgagcccagcgaaggcagcgccccaggcaccagcaccgagcctagtgagcaggagattaaacggatcaacaagatcagaagaagacttgtgaaagacagcaacaccaagaaggccggcaagacaggccccatgaaaaccctgctggttagagtgatgacacccgatctgagagagcggctggaaaacctgagaaagaagcctgaaaatatcccccagcccatcagcaatacatctagagccaacctgaataagctgctgaccgattacaccgaaatgaagaaggcgatcctgcatgtgtactgggaagagttccagaaggaccctgtgggcctgatgagccgggtggcccagcctgccagcaagaagatcgatcagaacaagctgaaacctgagatggacgagaagggcaacctgaccaccgccggctttgcctgctctcagtgtggccagcccctgttcgtgtacaagctggagcaggtgtctgagaagggcaaggcttacaccaactacttcggacggtgcaatgtggccgagcacgaaaagctgatcctgctggcccagctgaagcccgagaaggatagcgacgaagccgtgacatatagcctgggaaagtttgggcagagggccctggatttctacagcattcatgtgaccaaggagtccacccaccccgtgaagcccctggcccagatcgccggaaacagatacgcctccggacctgtgggaaaggccctgagcgacgcatgtatgggcacaatcgcctccttcctgtctaagtaccaggacatcatcatcgaacaccagaaggtggtgaagggcaaccagaagagactggagagcctgcgggagctggccggcaaggaaaacctggaataccctagcgtgaccctgccacctcagcctcacaccaaggagggcgttgatgcctacaacgaagtgatcgcccgggtgcgaatgtgggtgaacctgaacctgtggcagaagctgaagctaagcagagatgatgccaagcctctgctgagactgaagggattcccttcctttcctctggtcgagagacaggccaacgaagtggactggtgggacatggtgtgtaacgtgaagaagctgatcaacgagaaaaaggaggatggcaaggtgttttggcagaatctggctggctacaagagacaggaagccctgagaccatacctgagcagcgaggaagatcggaagaagggaaagaaattcgctcggtaccagctgggcgacctgctgctgcacctggaaaagaagcacggcgaggactggggaaaggtgtacgacgaggcctgggagcggattgacaagaaagtggaaggcctgagcaagcacatcaagctggaagaggaacggagaagcgaggacgcccagagcaaggccgccctgaccgactggctgcgggctaaggccagcttcgtgatcgagggcctgaaggaggccgacaaggacgagttctgcagatgcgagctgaagctgcagaagtggtacggggacctgcggggaaagcccttcgccatcgaagccgagaacagcatcctggacatcagcggcttcagcaagcagtacaactgtgccttcatctggcagaaggacggcgtgaagaagctgaacctgtacctgatcatcaactacttcaagggcggcaagctgcggttcaagaagatcaaacctgaagccttcgaagccaacagattctacaccgtgatcaacaaaaagagcggcgagatcgtgcccatggaggtgaacttcaacttcgacgaccccaacctgatcatcctgcctctggcctttggcaagagacagggcagagaattcatctggaacgacctgctgtccctggaaaccggcagcctgaagctggccaacggaagagtgatcgagaagacactgtacaacagaagaacccggcaggatgagcctgccctgttcgtggccctgaccttcgagcggcgggaggtcctggactcctccaatatcaaaccaatgaacctgatcggcgtggcaagaggcgaaaacatccccgccgtgatcgccctgaccgaccccgagggctgcccactgagccggtttaaggatagcctgggaaacccaacccacatcctgagaatcggcgagagctataaggagaagcagcggaccatccaggccaagaaggaggtggagcagcggagagccggcggctacagccggaagtacgccagcaaagccaagaatctggcagacgatatggtgagaaacaccgctagagatctgctgtactacgccgtgacccaggatgccatgctgatcttcgccaacctgagccggggcttcggccggcagggcaagcggaccttcatggccgagagacagtacacacggatggaggactggctgaccgccaagctggcctacgagggcctgagcaagacctacctgtccaagacactggcccagtacacctccaagacatgcagcaactgtgggtttaccatcaccagcgccgactacgacagggtgctggagaagctgaagaagacagcaacaggctggatgaccacaattaacggcaaggagctgaaggtggagggccagattacctactacaacagatacaagagacagaacgtagtcaaggacctgtccgtcgagctggatagactgagcgaagaatctgtgaacaacgacatctcctcctggacaaagggcagaagcggagaagctctgagcctcctgaagaaaagattctcccatagacccgtgcaggagaagttcgtgtgcctgaactgcggcttcgagacacacgcagccgagcaagccgccctgaacatcgccagatcctggctgttcctgcggagccaggagtacaagaaataccagacaaacaagacaaccggcaacaccgataagagagccttcgtcgagacctggcagtccttttaccggaagaagcttaaggaggtgtggaaacctgccgtgcggtctggcggatctggcggaggctcctagggccgaggaggccgtgaccttcaaggacgtggccgtggtgttcaccgaggaggagctgcagctgctggacctggcccagaggaagctgtacagggacgtgatgctggagaacttcaggaacctgctgagcgtgggccaccagcccttccacggcgacaccttccacttcctgagggaggagaagttctgggtgatggagaccaccagccagagggagggcaacagcggcggcaagatccagggatctggctccggcagcggccccaagaaaaagagaaaagtctaagctgccttctgcggggcttgccttctggccatgcccttcttctctcccttgcacctgtacctcttggtctttgaataaagcctgagtaggaaggctagcaaaaaaaaaaaaaaaaaaaaaaaaaaaaaaaaaaaaaaaaaaaaaaaaaaaaaaaaaaaaaaaaaaaaaaaaaaaaaaaa

SEQ ID NO: 16104 - RNA, 9485 nt, synthetic construct
  source 1..9485: mol_type = other RNA
aggaaataagagagaaaagaagagtaagaagaaatataagagccaccatggcccctaagaagaagcgtaaagtgagccggatggaacgcctcgtctacgaggtgcggcagaagtgcagaaacatcgaggacatctgcatctcctgcggatctctgaacgtgaccctggagcacccactgttcatcggcggcatgtgccagaactgtaaaaactgttttctggagtgtgcctatcaatacgacgatgacggctaccagagctactgcaccatctgttgcggcggaagagaggtgctgatgtgtggaaataacaactgctgccggtgcttctgcgtggaatgcgtggacctgctggtgggccccggcgccgcccaggccgctattaaggaagatccttggaactgctacatgtgcggccacaagggcacatacggcctgctgagacggagagaggactggcctagcagactgcagatgttcttcgccaataaccacgaccaggagttcgacccccctaaggtgtaccctcccgtccccgccgagaagagaaagcccatccgggtcctgagcctgttcgatggcatcgccaccggtctgctggtgctgaaggacctgggcatccaggtggataggtacattgcctccgaggtgtgcgaggactccatcaccgtgggaatggtgcgtcatcagggcaagatcatgtacgtgggcgacgtgcggagcgtgacacagaagcatatccaggagtggggccctttcgacctggtgatcggcggcagcccttgcaatgacctgagcatcgtgaacccagcccggaagggcctgtacgagggaaccggcagactgttcttcgagttttacagactgctgcacgacgcccggcctaaggaaggcgacgaccggcccttcttttggctgttcgagaatgtggtggccatgggagtcagcgacaagcgggatattagccggttcctggagagcaaccccgtgatgatcgatgccaaggaagtgagcgccgcccaccgggccagatacttctggggcaatctgcctggcatgaacagacccctggccagcaccgtgaacgacaagctggagctgcaggagtgcctggagcacggccggatcgccaagttcagcaaggtgagaaccatcaccacccgaagcaacagcatcaaacaaggcaaggaccagcactttcctgtgttcatgaacgagaaggaggacatcctgtggtgtaccgagatggagagagtgttcgggttcccagtccactacacagatgtcagcaacatgtctagactggccagacagagactgctgggaagaagctggtccgtccctgtgatcagacacctgttcgcccctctgaaggagtacttcgcctgcgtgagcagcggcaacagcaacgccaacagccggggccccagcttctctagcggcctggtgccactgtccctgagagggagccacatgggccccatggagatctacaaaaccgtgagcgcctggaagcggcagcctgtgcgcgtgctgagcctgtttcggaatatcgataaagtcctgaaaagcctgggattcctggagagcggctctggctccggcggtggcaccctgaagtacgtggaggatgtgacaaacgtggtcagacgggatgtggagaagtggggccccttcgatctggtgtacggcagcacccaacccctgggcagctcttgtgaccggtgccctggctggtacatgtttcagttccaccggatcctgcagtacgccctgccgagacaggagtcccagcggccattcttttggattttcatggacaacttgctgctgaccgaggatgaccaggaaactaccactcggttcctgcagaccgaagccgtgaccctgcaggacgtgagaggccgggactaccagaacgccatgcgggtgtggtccaacatccctggactgaaaagcaagcacgcacctctgacccctaaagaagaggagtacctgcaggcccaggtgcggagcagaagcaagctggacgcccctaaggtggatctgctggtgaagaattgcctcctgcccctgagagagtacttcaagtatttcagccagaatagtctgcccctgggaggcagcggcggcggcgccctggtgacatttgaggacgtcgccgtgcggttcacccaggaggaatgggctctgctggatccttctcagaaaatcctgtaccgggacgtgatgagagagacataccggaatctgacctccgtgggcatcaactgggaatgttgggaccttgaagcctgcttcagaagcctgggaagaaacctgagagtgcaggtggtgaagagaaagtgcgagctgaccaacagcggcccctgcgccgagggcggcccaagcagcggcgcccctcctcccagcggcggcagcccagccggctccccaacctctaccgaggagggcacctctgagtccgccacccccgagagcggccctggcacctccaccgagcccagcgagggcagcgcacccggcagccctgccggcagccccacctccacagaggagggaaccagcaccgagcccagcgaaggcagcgccccaggcaccagcaccgagcctagtgagcaggagattaaacggatcaacaagatcagaagaagacttgtgaaagacagcaacaccaagaaggccggcaagacaggccccatgaaaaccctgctggttagagtgatgacacccgatctgagagagcggctggaaaacctgagaaagaagcctgaaaatatcccccagcccatcagcaatacatctagagccaacctgaataagctgctgaccgattacaccgaaatgaagaaggcgatcctgcatgtgtactgggaagagttccagaaggaccctgtgggcctgatgagccgggtggcccagcctgccagcaagaagatcgatcagaacaagctgaaacctgagatggacgagaagggcaacctgaccaccgccggctttgcctgctctcagtgtggccagcccctgttcgtgtacaagctggagcaggtgtctgagaagggcaaggcttacaccaactacttcggacggtgcaatgtggccgagcacgaaaagctgatcctgctggcccagctgaagcccgagaaggatagcgacgaagccgtgacatatagcctgggaaagtttgggcagagggccctggatttctacagcattcatgtgaccaaggagtccacccaccccgtgaagcccctggcccagatcgccggaaacagatacgcctccggacctgtgggaaaggccctgagcgacgcatgtatgggcacaatcgcctccttcctgtctaagtaccaggacatcatcatcgaacaccagaaggtggtgaagggcaaccagaagagactggagagcctgcgggagctggccggcaaggaaaacctggaataccctagcgtgaccctgccacctcagcctcacaccaaggagggcgttgatgcctacaacgaagtgatcgcccgggtgcgaatgtgggtgaacctgaacctgtggcagaagctgaagctaagcagagatgatgccaagcctctgctgagactgaagggattcccttcctttcctctggtcgagagacaggccaacgaagtggactggtgggacatggtgtgtaacgtgaagaagctgatcaacgagaaaaaggaggatggcaaggtgttttggcagaatctggctggctacaagagacaggaagccctgagaccatacctgagcagcgaggaagatcggaagaagggaaagaaattcgctcggtaccagctgggcgacctgctgctgcacctggaaaagaagcacggcgaggactggggaaaggtgtacgacgaggcctgggagcggattgacaagaaagtggaaggcctgagcaagcacatcaagctggaagaggaacggagaagcgaggacgcccagagcaaggccgccctgaccgactggctgcgggctaaggccagcttcgtgatcgagggcctgaaggaggccgacaaggacgagttctgcagatgcgagctgaagctgcagaagtggtacggggacctgcggggaaagcccttcgccatcgaagccgagaacagcatcctggacatcagcggcttcagcaagcagtacaactgtgccttcatctggcagaaggacggcgtgaagaagctgaacctgtacctgatcatcaactacttcaagggcggcaagctgcggttcaagaagatcaaacctgaagccttcgaagccaacagattctacaccgtgatcaacaaaaagagcggcgagatcgtgcccatggaggtgaacttcaacttcgacgaccccaacctgatcatcctgcctctggcctttggcaagagacagggcagagaattcatctggaacgacctgctgtccctggaaaccggcagcctgaagctggccaacggaagagtgatcgagaagacactgtacaacagaagaacccggcaggatgagcctgccctgttcgtggccctgaccttcgagcggcgggaggtcctggactcctccaatatcaaaccaatgaacctgatcggcgtggcaagaggcgaaaacatccccgccgtgatcgccctgaccgaccccgagggctgcccactgagccggtttaaggatagcctgggaaacccaacccacatcctgagaatcggcgagagctataaggagaagcagcggaccatccaggccaagaaggaggtggagcagcggagagccggcggctacagccggaagtacgccagcaaagccaagaatctggcagacgatatggtgagaaacaccgctagagatctgctgtactacgccgtgacccaggatgccatgctgatcttcgccaacctgagccggggcttcggccggcagggcaagcggaccttcatggccgagagacagtacacacggatggaggactggctgaccgccaagctggcctacgagggcctgagcaagacctacctgtccaagacactggcccagtacacctccaagacatgcagcaactgtgggtttaccatcaccagcgccgactacgacagggtgctggagaagctgaagaagacagcaacaggctggatgaccacaattaacggcaaggagctgaaggtggagggccagattacctactacaacagatacaagagacagaacgtagtcaaggacctgtccgtcgagctggatagactgagcgaagaatctgtgaacaacgacatctcctcctggacaaagggcagaagcggagaagctctgagcctcctgaagaaaagattctcccatagacccgtgcaggagaagttcgtgtgcctgaactgcggcttcgagacacacgcagccgagcaagccgccctgaacatcgccagatcctggctgttcctgcggagccaggagtacaagaaataccagacaaacaagacaaccggcaacaccgataagagagccttcgtcgagacctggcagtccttttaccggaagaagcttaaggaggtgtggaaacctgccgtgcggtctggcggatctggcggaggctccatgttcccccccgccaggggcaaggagctgctgagcttcgaggacgtggccatgtacttcaccagggaggagtggggccacctgagctggggccagaaggacctgtacagggacgtgatgctggagaactacaggaacatggtgctgctgggcttccagttccccaagcccgaggtgatctgccagctggagaactgggacgagcagtggatcctggacctgcccagggccggcaacaggaagggcggcccaagcagcggcgcccctcctcccagcggcggcagcccagccggctccccaacctctaccgaggagggcacctctgagtccgccacccccgagagcggccctggcacctccaccgagcccagcgagggcagcgcacccggcagccctgccggcagccccacctccacagaggagggaaccagcaccgagcccagcgaaggcagcgccccaggcaccagcaccgagcctagtgagcaggagattaaacggatcaacaagatcagaagaagacttgtgaaagacagcaacaccaagaaggccggcaagacaggccccatgaaaaccctgctggttagagtgatgacacccgatctgagagagcggctggaaaacctgagaaagaagcctgaaaatatcccccagcccatcagcaatacatctagagccaacctgaataagctgctgaccgattacaccgaaatgaagaaggcgatcctgcatgtgtactgggaagagttccagaaggaccctgtgggcctgatgagccgggtggcccagcctgccagcaagaagatcgatcagaacaagctgaaacctgagatggacgagaagggcaacctgaccaccgccggctttgcctgctctcagtgtggccagcccctgttcgtgtacaagctggagcaggtgtctgagaagggcaaggcttacaccaactacttcggacggtgcaatgtggccgagcacgaaaagctgatcctgctggcccagctgaagcccgagaaggatagcgacgaagccgtgacatatagcctgggaaagtttgggcagagggccctggatttctacagcattcatgtgaccaaggagtccacccaccccgtgaagcccctggcccagatcgccggaaacagatacgcctccggacctgtgggaaaggccctgagcgacgcatgtatgggcacaatcgcctccttcctgtctaagtaccaggacatcatcatcgaacaccagaaggtggtgaagggcaaccagaagagactggagagcctgcgggagctggccggcaaggaaaacctggaataccctagcgtgaccctgccacctcagcctcacaccaaggagggcgttgatgcctacaacgaagtgatcgcccgggtgcgaatgtgggtgaacctgaacctgtggcagaagctgaagctaagcagagatgatgccaagcctctgctgagactgaagggattcccttcctttcctctggtcgagagacaggccaacgaagtggactggtgggacatggtgtgtaacgtgaagaagctgatcaacgagaaaaaggaggatggcaaggtgttttggcagaatctggctggctacaagagacaggaagccctgagaccatacctgagcagcgaggaagatcggaagaagggaaagaaattcgctcggtaccagctgggcgacctgctgctgcacctggaaaagaagcacggcgaggactggggaaaggtgtacgacgaggcctgggagcggattgacaagaaagtggaaggcctgagcaagcacatcaagctggaagaggaacggagaagcgaggacgcccagagcaaggccgccctgaccgactggctgcgggctaaggccagcttcgtgatcgagggcctgaaggaggccgacaaggacgagttctgcagatgcgagctgaagctgcagaagtggtacggggacctgcggggaaagcccttcgccatcgaagccgagaacagcatcctggacatcagcggcttcagcaagcagtacaactgtgccttcatctggcagaaggacggcgtgaagaagctgaacctgtacctgatcatcaactacttcaagggcggcaagctgcggttcaagaagatcaaacctgaagccttcgaagccaacagattctacaccgtgatcaacaaaaagagcggcgagatcgtgcccatggaggtgaacttcaacttcgacgaccccaacctgatcatcctgcctctggcctttggcaagagacagggcagagaattcatctggaacgacctgctgtccctggaaaccggcagcctgaagctggccaacggaagagtgatcgagaagacactgtacaacagaagaacccggcaggatgagcctgccctgttcgtggccctgaccttcgagcggcgggaggtcctggactcctccaatatcaaaccaatgaacctgatcggcgtggcaagaggcgaaaacatccccgccgtgatcgccctgaccgaccccgagggctgcccactgagccggtttaaggatagcctgggaaacccaacccacatcctgagaatcggcgagagctataaggagaagcagcggaccatccaggccaagaaggaggtggagcagcggagagccggcggctacagccggaagtacgccagcaaagccaagaatctggcagacgatatggtgagaaacaccgctagagatctgctgtactacgccgtgacccaggatgccatgctgatcttcgccaacctgagccggggcttcggccggcagggcaagcggaccttcatggccgagagacagtacacacggatggaggactggctgaccgccaagctggcctacgagggcctgagcaagacctacctgtccaagacactggcccagtacacctccaagacatgcagcaactgtgggtttaccatcaccagcgccgactacgacagggtgctggagaagctgaagaagacagcaacaggctggatgaccacaattaacggcaaggagctgaaggtggagggccagattacctactacaacagatacaagagacagaacgtagtcaaggacctgtccgtcgagctggatagactgagcgaagaatctgtgaacaacgacatctcctcctggacaaagggcagaagcggagaagctctgagcctcctgaagaaaagattctcccatagacccgtgcaggagaagttcgtgtgcctgaactgcggcttcgagacacacgcagccgagcaagccgccctgaacatcgccagatcctggctgttcctgcggagccaggagtacaagaaataccagacaaacaagacaaccggcaacaccgataagagagccttcgtcgagacctggcagtccttttaccggaagaagcttaaggaggtgtggaaacctgccgtgcggtctggcggatctggcggaggctcctatgttcccccccgccaggggcaaggagctgctgagcttcgaggacgtggccatgtacttcaccagggaggagtggggccacctgagctggggccagaaggacctgtacagggacgtgatgctggagaactacaggaacatggtgctgctgggcttccagttccccaagcccgaggtgatctgccagctggagaactgggacgagcagtggatcctggacctgcccagggccggcaacaggaagggatctggctccggcagcggccccaagaaaaagagaaaagtctaagctgccttctgcggggcttgccttctggccatgcccttcttctctcccttgcacctgtacctcttggtctttgaataaagcctgagtaggaaggctagcaaaaaaaaaaaaaaaaaaaaaaaaaaaaaaaaaaaaaaaaaaaaaaaaaaaaaaaaaaaaaaaaaaaaaaaaaaaaaaaa

SEQ ID NO: 16105 - RNA, 9485 nt, synthetic construct
  source 1..9485: mol_type = other RNA
aggaaataagagagaaaagaagagtaagaagaaatataagagccaccatggcccctaagaagaagcgtaaagtgagccggatggaacgcctcgtctacgaggtgcggcagaagtgcagaaacatcgaggacatctgcatctcctgcggatctctgaacgtgaccctggagcacccactgttcatcggcggcatgtgccagaactgtaaaaactgttttctggagtgtgcctatcaatacgacgatgacggctaccagagctactgcaccatctgttgcggcggaagagaggtgctgatgtgtggaaataacaactgctgccggtgcttctgcgtggaatgcgtggacctgctggtgggccccggcgccgcccaggccgctattaaggaagatccttggaactgctacatgtgcggccacaagggcacatacggcctgctgagacggagagaggactggcctagcagactgcagatgttcttcgccaataaccacgaccaggagttcgacccccctaaggtgtaccctcccgtccccgccgagaagagaaagcccatccgggtcctgagcctgttcgatggcatcgccaccggtctgctggtgctgaaggacctgggcatccaggtggataggtacattgcctccgaggtgtgcgaggactccatcaccgtgggaatggtgcgtcatcagggcaagatcatgtacgtgggcgacgtgcggagcgtgacacagaagcatatccaggagtggggccctttcgacctggtgatcggcggcagcccttgcaatgacctgagcatcgtgaacccagcccggaagggcctgtacgagggaaccggcagactgttcttcgagttttacagactgctgcacgacgcccggcctaaggaaggcgacgaccggcccttcttttggctgttcgagaatgtggtggccatgggagtcagcgacaagcgggatattagccggttcctggagagcaaccccgtgatgatcgatgccaaggaagtgagcgccgcccaccgggccagatacttctggggcaatctgcctggcatgaacagacccctggccagcaccgtgaacgacaagctggagctgcaggagtgcctggagcacggccggatcgccaagttcagcaaggtgagaaccatcaccacccgaagcaacagcatcaaacaaggcaaggaccagcactttcctgtgttcatgaacgagaaggaggacatcctgtggtgtaccgagatggagagagtgttcgggttcccagtccactacacagatgtcagcaacatgtctagactggccagacagagactgctgggaagaagctggtccgtccctgtgatcagacacctgttcgcccctctgaaggagtacttcgcctgcgtgagcagcggcaacagcaacgccaacagccggggccccagcttctctagcggcctggtgccactgtccctgagagggagccacatgggccccatggagatctacaaaaccgtgagcgcctggaagcggcagcctgtgcgcgtgctgagcctgtttcggaatatcgataaagtcctgaaaagcctgggattcctggagagcggctctggctccggcggtggcaccctgaagtacgtggaggatgtgacaaacgtggtcagacgggatgtggagaagtggggccccttcgatctggtgtacggcagcacccaacccctgggcagctcttgtgaccggtgccctggctggtacatgtttcagttccaccggatcctgcagtacgccctgccgagacaggagtcccagcggccattcttttggattttcatggacaacttgctgctgaccgaggatgaccaggaaactaccactcggttcctgcagaccgaagccgtgaccctgcaggacgtgagaggccgggactaccagaacgccatgcgggtgtggtccaacatccctggactgaaaagcaagcacgcacctctgacccctaaagaagaggagtacctgcaggcccaggtgcggagcagaagcaagctggacgcccctaaggtggatctgctggtgaagaattgcctcctgcccctgagagagtacttcaagtatttcagccagaatagtctgcccctgggaggcagcggcggcggcgccctggtgacatttgaggacgtcgccgtgcggttcacccaggaggaatgggctctgctggatccttctcagaaaatcctgtaccgggacgtgatgagagagacataccggaatctgacctccgtgggcatcaactgggaatgttgggaccttgaagcctgcttcagaagcctgggaagaaacctgagagtgcaggtggtgaagagaaagtgcgagctgaccaacagcggcccctgcgccgagggcggcccaagcagcggcgcccctcctcccagcggcggcagcccagccggctccccaacctctaccgaggagggcacctctgagtccgccacccccgagagcggccctggcacctccaccgagcccagcgagggcagcgcacccggcagccctgccggcagccccacctccacagaggagggaaccagcaccgagcccagcgaaggcagcgccccaggcaccagcaccgagcctagtgagcaggagattaaacggatcaacaagatcagaagaagacttgtgaaagacagcaacaccaagaaggccggcaagacaggccccatgaaaaccctgctggttagagtgatgacacccgatctgagagagcggctggaaaacctgagaaagaagcctgaaaatatcccccagcccatcagcaatacatctagagccaacctgaataagctgctgaccgattacaccgaaatgaagaaggcgatcctgcatgtgtactgggaagagttccagaaggaccctgtgggcctgatgagccgggtggcccagcctgccagcaagaagatcgatcagaacaagctgaaacctgagatggacgagaagggcaacctgaccaccgccggctttgcctgctctcagtgtggccagcccctgttcgtgtacaagctggagcaggtgtctgagaagggcaaggcttacaccaactacttcggacggtgcaatgtggccgagcacgaaaagctgatcctgctggcccagctgaagcccgagaaggatagcgacgaagccgtgacatatagcctgggaaagtttgggcagagggccctggatttctacagcattcatgtgaccaaggagtccacccaccccgtgaagcccctggcccagatcgccggaaacagatacgcctccggacctgtgggaaaggccctgagcgacgcatgtatgggcacaatcgcctccttcctgtctaagtaccaggacatcatcatcgaacaccagaaggtggtgaagggcaaccagaagagactggagagcctgcgggagctggccggcaaggaaaacctggaataccctagcgtgaccctgccacctcagcctcacaccaaggagggcgttgatgcctacaacgaagtgatcgcccgggtgcgaatgtgggtgaacctgaacctgtggcagaagctgaagctaagcagagatgatgccaagcctctgctgagactgaagggattcccttcctttcctctggtcgagagacaggccaacgaagtggactggtgggacatggtgtgtaacgtgaagaagctgatcaacgagaaaaaggaggatggcaaggtgttttggcagaatctggctggctacaagagacaggaagccctgagaccatacctgagcagcgaggaagatcggaagaagggaaagaaattcgctcggtaccagctgggcgacctgctgctgcacctggaaaagaagcacggcgaggactggggaaaggtgtacgacgaggcctgggagcggattgacaagaaagtggaaggcctgagcaagcacatcaagctggaagaggaacggagaagcgaggacgcccagagcaaggccgccctgaccgactggctgcgggctaaggccagcttcgtgatcgagggcctgaaggaggccgacaaggacgagttctgcagatgcgagctgaagctgcagaagtggtacggggacctgcggggaaagcccttcgccatcgaagccgagaacagcatcctggacatcagcggcttcagcaagcagtacaactgtgccttcatctggcagaaggacggcgtgaagaagctgaacctgtacctgatcatcaactacttcaagggcggcaagctgcggttcaagaagatcaaacctgaagccttcgaagccaacagattctacaccgtgatcaacaaaaagagcggcgagatcgtgcccatggaggtgaacttcaacttcgacgaccccaacctgatcatcctgcctctggcctttggcaagagacagggcagagaattcatctggaacgacctgctgtccctggaaaccggcagcctgaagctggccaacggaagagtgatcgagaagacactgtacaacagaagaacccggcaggatgagcctgccctgttcgtggccctgaccttcgagcggcgggaggtcctggactcctccaatatcaaaccaatgaacctgatcggcgtggcaagaggcgaaaacatccccgccgtgatcgccctgaccgaccccgagggctgcccactgagccggtttaaggatagcctgggaaacccaacccacatcctgagaatcggcgagagctataaggagaagcagcggaccatccaggccaagaaggaggtggagcagcggagagccggcggctacagccggaagtacgccagcaaagccaagaatctggcagacgatatggtgagaaacaccgctagagatctgctgtactacgccgtgacccaggatgccatgctgatcttcgccaacctgagccggggcttcggccggcagggcaagcggaccttcatggccgagagacagtacacacggatggaggactggctgaccgccaagctggcctacgagggcctgagcaagacctacctgtccaagacactggcccagtacacctccaagacatgcagcaactgtgggtttaccatcaccagcgccgactacgacagggtgctggagaagctgaagaagacagcaacaggctggatgaccacaattaacggcaaggagctgaaggtggagggccagattacctactacaacagatacaagagacagaacgtagtcaaggacctgtccgtcgagctggatagactgagcgaagaatctgtgaacaacgacatctcctcctggacaaagggcagaagcggagaagctctgagcctcctgaagaaaagattctcccatagacccgtgcaggagaagttcgtgtgcctgaactgcggcttcgagacacacgcagccgagcaagccgccctgaacatcgccagatcctggctgttcctgcggagccaggagtacaagaaataccagacaaacaagacaaccggcaacaccgataagagagccttcgtcgagacctggcagtccttttaccggaagaagcttaaggaggtgtggaaacctgccgtgcggtctggcggatctggcggaggctccatgaacgtggaggtggtgaaggtgatgccccaggacctggtgaccttcaaggacgtggccatcgacttcagccaggaggagtggcagtggatgaaccccgcccagaagcacctgtacaggagcatgatgctggagaactaccagagcctggtgagcctgggcctgtgcatcagcaagccctgcgtgatcagcctgctggagcagggcagggagccctgggagatgaccagcgagatgaccaggggcggcccaagcagcggcgcccctcctcccagcggcggcagcccagccggctccccaacctctaccgaggagggcacctctgagtccgccacccccgagagcggccctggcacctccaccgagcccagcgagggcagcgcacccggcagccctgccggcagccccacctccacagaggagggaaccagcaccgagcccagcgaaggcagcgccccaggcaccagcaccgagcctagtgagcaggagattaaacggatcaacaagatcagaagaagacttgtgaaagacagcaacaccaagaaggccggcaagacaggccccatgaaaaccctgctggttagagtgatgacacccgatctgagagagcggctggaaaacctgagaaagaagcctgaaaatatcccccagcccatcagcaatacatctagagccaacctgaataagctgctgaccgattacaccgaaatgaagaaggcgatcctgcatgtgtactgggaagagttccagaaggaccctgtgggcctgatgagccgggtggcccagcctgccagcaagaagatcgatcagaacaagctgaaacctgagatggacgagaagggcaacctgaccaccgccggctttgcctgctctcagtgtggccagcccctgttcgtgtacaagctggagcaggtgtctgagaagggcaaggcttacaccaactacttcggacggtgcaatgtggccgagcacgaaaagctgatcctgctggcccagctgaagcccgagaaggatagcgacgaagccgtgacatatagcctgggaaagtttgggcagagggccctggatttctacagcattcatgtgaccaaggagtccacccaccccgtgaagcccctggcccagatcgccggaaacagatacgcctccggacctgtgggaaaggccctgagcgacgcatgtatgggcacaatcgcctccttcctgtctaagtaccaggacatcatcatcgaacaccagaaggtggtgaagggcaaccagaagagactggagagcctgcgggagctggccggcaaggaaaacctggaataccctagcgtgaccctgccacctcagcctcacaccaaggagggcgttgatgcctacaacgaagtgatcgcccgggtgcgaatgtgggtgaacctgaacctgtggcagaagctgaagctaagcagagatgatgccaagcctctgctgagactgaagggattcccttcctttcctctggtcgagagacaggccaacgaagtggactggtgggacatggtgtgtaacgtgaagaagctgatcaacgagaaaaaggaggatggcaaggtgttttggcagaatctggctggctacaagagacaggaagccctgagaccatacctgagcagcgaggaagatcggaagaagggaaagaaattcgctcggtaccagctgggcgacctgctgctgcacctggaaaagaagcacggcgaggactggggaaaggtgtacgacgaggcctgggagcggattgacaagaaagtggaaggcctgagcaagcacatcaagctggaagaggaacggagaagcgaggacgcccagagcaaggccgccctgaccgactggctgcgggctaaggccagcttcgtgatcgagggcctgaaggaggccgacaaggacgagttctgcagatgcgagctgaagctgcagaagtggtacggggacctgcggggaaagcccttcgccatcgaagccgagaacagcatcctggacatcagcggcttcagcaagcagtacaactgtgccttcatctggcagaaggacggcgtgaagaagctgaacctgtacctgatcatcaactacttcaagggcggcaagctgcggttcaagaagatcaaacctgaagccttcgaagccaacagattctacaccgtgatcaacaaaaagagcggcgagatcgtgcccatggaggtgaacttcaacttcgacgaccccaacctgatcatcctgcctctggcctttggcaagagacagggcagagaattcatctggaacgacctgctgtccctggaaaccggcagcctgaagctggccaacggaagagtgatcgagaagacactgtacaacagaagaacccggcaggatgagcctgccctgttcgtggccctgaccttcgagcggcgggaggtcctggactcctccaatatcaaaccaatgaacctgatcggcgtggcaagaggcgaaaacatccccgccgtgatcgccctgaccgaccccgagggctgcccactgagccggtttaaggatagcctgggaaacccaacccacatcctgagaatcggcgagagctataaggagaagcagcggaccatccaggccaagaaggaggtggagcagcggagagccggcggctacagccggaagtacgccagcaaagccaagaatctggcagacgatatggtgagaaacaccgctagagatctgctgtactacgccgtgacccaggatgccatgctgatcttcgccaacctgagccggggcttcggccggcagggcaagcggaccttcatggccgagagacagtacacacggatggaggactggctgaccgccaagctggcctacgagggcctgagcaagacctacctgtccaagacactggcccagtacacctccaagacatgcagcaactgtgggtttaccatcaccagcgccgactacgacagggtgctggagaagctgaagaagacagcaacaggctggatgaccacaattaacggcaaggagctgaaggtggagggccagattacctactacaacagatacaagagacagaacgtagtcaaggacctgtccgtcgagctggatagactgagcgaagaatctgtgaacaacgacatctcctcctggacaaagggcagaagcggagaagctctgagcctcctgaagaaaagattctcccatagacccgtgcaggagaagttcgtgtgcctgaactgcggcttcgagacacacgcagccgagcaagccgccctgaacatcgccagatcctggctgttcctgcggagccaggagtacaagaaataccagacaaacaagacaaccggcaacaccgataagagagccttcgtcgagacctggcagtccttttaccggaagaagcttaaggaggtgtggaaacctgccgtgcggtctggcggatctggcggaggctcctatgaacgtggaggtggtgaaggtgatgccccaggacctggtgaccttcaaggacgtggccatcgacttcagccaggaggagtggcagtggatgaaccccgcccagaagcacctgtacaggagcatgatgctggagaactaccagagcctggtgagcctgggcctgtgcatcagcaagccctgcgtgatcagcctgctggagcagggcagggagccctgggagatgaccagcgagatgaccaggggatctggctccggcagcggccccaagaaaaagagaaaagtctaagctgccttctgcggggcttgccttctggccatgcccttcttctctcccttgcacctgtacctcttggtctttgaataaagcctgagtaggaaggctagcaaaaaaaaaaaaaaaaaaaaaaaaaaaaaaaaaaaaaaaaaaaaaaaaaaaaaaaaaaaaaaaaaaaaaaaaaaaaaaaa

SEQ ID NO: 16106 - RNA, 9485 nt, synthetic construct
  source 1..9485: mol_type = other RNA
aggaaataagagagaaaagaagagtaagaagaaatataagagccaccatggcccctaagaagaagcgtaaagtgagccggatggaacgcctcgtctacgaggtgcggcagaagtgcagaaacatcgaggacatctgcatctcctgcggatctctgaacgtgaccctggagcacccactgttcatcggcggcatgtgccagaactgtaaaaactgttttctggagtgtgcctatcaatacgacgatgacggctaccagagctactgcaccatctgttgcggcggaagagaggtgctgatgtgtggaaataacaactgctgccggtgcttctgcgtggaatgcgtggacctgctggtgggccccggcgccgcccaggccgctattaaggaagatccttggaactgctacatgtgcggccacaagggcacatacggcctgctgagacggagagaggactggcctagcagactgcagatgttcttcgccaataaccacgaccaggagttcgacccccctaaggtgtaccctcccgtccccgccgagaagagaaagcccatccgggtcctgagcctgttcgatggcatcgccaccggtctgctggtgctgaaggacctgggcatccaggtggataggtacattgcctccgaggtgtgcgaggactccatcaccgtgggaatggtgcgtcatcagggcaagatcatgtacgtgggcgacgtgcggagcgtgacacagaagcatatccaggagtggggccctttcgacctggtgatcggcggcagcccttgcaatgacctgagcatcgtgaacccagcccggaagggcctgtacgagggaaccggcagactgttcttcgagttttacagactgctgcacgacgcccggcctaaggaaggcgacgaccggcccttcttttggctgttcgagaatgtggtggccatgggagtcagcgacaagcgggatattagccggttcctggagagcaaccccgtgatgatcgatgccaaggaagtgagcgccgcccaccgggccagatacttctggggcaatctgcctggcatgaacagacccctggccagcaccgtgaacgacaagctggagctgcaggagtgcctggagcacggccggatcgccaagttcagcaaggtgagaaccatcaccacccgaagcaacagcatcaaacaaggcaaggaccagcactttcctgtgttcatgaacgagaaggaggacatcctgtggtgtaccgagatggagagagtgttcgggttcccagtccactacacagatgtcagcaacatgtctagactggccagacagagactgctgggaagaagctggtccgtccctgtgatcagacacctgttcgcccctctgaaggagtacttcgcctgcgtgagcagcggcaacagcaacgccaacagccggggccccagcttctctagcggcctggtgccactgtccctgagagggagccacatgggccccatggagatctacaaaaccgtgagcgcctggaagcggcagcctgtgcgcgtgctgagcctgtttcggaatatcgataaagtcctgaaaagcctgggattcctggagagcggctctggctccggcggtggcaccctgaagtacgtggaggatgtgacaaacgtggtcagacgggatgtggagaagtggggccccttcgatctggtgtacggcagcacccaacccctgggcagctcttgtgaccggtgccctggctggtacatgtttcagttccaccggatcctgcagtacgccctgccgagacaggagtcccagcggccattcttttggattttcatggacaacttgctgctgaccgaggatgaccaggaaactaccactcggttcctgcagaccgaagccgtgaccctgcaggacgtgagaggccgggactaccagaacgccatgcgggtgtggtccaacatccctggactgaaaagcaagcacgcacctctgacccctaaagaagaggagtacctgcaggcccaggtgcggagcagaagcaagctggacgcccctaaggtggatctgctggtgaagaattgcctcctgcccctgagagagtacttcaagtatttcagccagaatagtctgcccctgggaggcagcggcggcggcgccctggtgacatttgaggacgtcgccgtgcggttcacccaggaggaatgggctctgctggatccttctcagaaaatcctgtaccgggacgtgatgagagagacataccggaatctgacctccgtgggcatcaactgggaatgttgggaccttgaagcctgcttcagaagcctgggaagaaacctgagagtgcaggtggtgaagagaaagtgcgagctgaccaacagcggcccctgcgccgagggcggcccaagcagcggcgcccctcctcccagcggcggcagcccagccggctccccaacctctaccgaggagggcacctctgagtccgccacccccgagagcggccctggcacctccaccgagcccagcgagggcagcgcacccggcagccctgccggcagccccacctccacagaggagggaaccagcaccgagcccagcgaaggcagcgccccaggcaccagcaccgagcctagtgagcaggagattaaacggatcaacaagatcagaagaagacttgtgaaagacagcaacaccaagaaggccggcaagacaggccccatgaaaaccctgctggttagagtgatgacacccgatctgagagagcggctggaaaacctgagaaagaagcctgaaaatatcccccagcccatcagcaatacatctagagccaacctgaataagctgctgaccgattacaccgaaatgaagaaggcgatcctgcatgtgtactgggaagagttccagaaggaccctgtgggcctgatgagccgggtggcccagcctgccagcaagaagatcgatcagaacaagctgaaacctgagatggacgagaagggcaacctgaccaccgccggctttgcctgctctcagtgtggccagcccctgttcgtgtacaagctggagcaggtgtctgagaagggcaaggcttacaccaactacttcggacggtgcaatgtggccgagcacgaaaagctgatcctgctggcccagctgaagcccgagaaggatagcgacgaagccgtgacatatagcctgggaaagtttgggcagagggccctggatttctacagcattcatgtgaccaaggagtccacccaccccgtgaagcccctggcccagatcgccggaaacagatacgcctccggacctgtgggaaaggccctgagcgacgcatgtatgggcacaatcgcctccttcctgtctaagtaccaggacatcatcatcgaacaccagaaggtggtgaagggcaaccagaagagactggagagcctgcgggagctggccggcaaggaaaacctggaataccctagcgtgaccctgccacctcagcctcacaccaaggagggcgttgatgcctacaacgaagtgatcgcccgggtgcgaatgtgggtgaacctgaacctgtggcagaagctgaagctaagcagagatgatgccaagcctctgctgagactgaagggattcccttcctttcctctggtcgagagacaggccaacgaagtggactggtgggacatggtgtgtaacgtgaagaagctgatcaacgagaaaaaggaggatggcaaggtgttttggcagaatctggctggctacaagagacaggaagccctgagaccatacctgagcagcgaggaagatcggaagaagggaaagaaattcgctcggtaccagctgggcgacctgctgctgcacctggaaaagaagcacggcgaggactggggaaaggtgtacgacgaggcctgggagcggattgacaagaaagtggaaggcctgagcaagcacatcaagctggaagaggaacggagaagcgaggacgcccagagcaaggccgccctgaccgactggctgcgggctaaggccagcttcgtgatcgagggcctgaaggaggccgacaaggacgagttctgcagatgcgagctgaagctgcagaagtggtacggggacctgcggggaaagcccttcgccatcgaagccgagaacagcatcctggacatcagcggcttcagcaagcagtacaactgtgccttcatctggcagaaggacggcgtgaagaagctgaacctgtacctgatcatcaactacttcaagggcggcaagctgcggttcaagaagatcaaacctgaagccttcgaagccaacagattctacaccgtgatcaacaaaaagagcggcgagatcgtgcccatggaggtgaacttcaacttcgacgaccccaacctgatcatcctgcctctggcctttggcaagagacagggcagagaattcatctggaacgacctgctgtccctggaaaccggcagcctgaagctggccaacggaagagtgatcgagaagacactgtacaacagaagaacccggcaggatgagcctgccctgttcgtggccctgaccttcgagcggcgggaggtcctggactcctccaatatcaaaccaatgaacctgatcggcgtggcaagaggcgaaaacatccccgccgtgatcgccctgaccgaccccgagggctgcccactgagccggtttaaggatagcctgggaaacccaacccacatcctgagaatcggcgagagctataaggagaagcagcggaccatccaggccaagaaggaggtggagcagcggagagccggcggctacagccggaagtacgccagcaaagccaagaatctggcagacgatatggtgagaaacaccgctagagatctgctgtactacgccgtgacccaggatgccatgctgatcttcgccaacctgagccggggcttcggccggcagggcaagcggaccttcatggccgagagacagtacacacggatggaggactggctgaccgccaagctggcctacgagggcctgagcaagacctacctgtccaagacactggcccagtacacctccaagacatgcagcaactgtgggtttaccatcaccagcgccgactacgacagggtgctggagaagctgaagaagacagcaacaggctggatgaccacaattaacggcaaggagctgaaggtggagggccagattacctactacaacagatacaagagacagaacgtagtcaaggacctgtccgtcgagctggatagactgagcgaagaatctgtgaacaacgacatctcctcctggacaaagggcagaagcggagaagctctgagcctcctgaagaaaagattctcccatagacccgtgcaggagaagttcgtgtgcctgaactgcggcttcgagacacacgcagccgagcaagccgccctgaacatcgccagatcctggctgttcctgcggagccaggagtacaagaaataccagacaaacaagacaaccggcaacaccgataagagagccttcgtcgagacctggcagtccttttaccggaagaagcttaaggaggtgtggaaacctgccgtgcggtctggcggatctggcggaggctccaagcccgccgccgtgaggttcgccgacgtggccgtgtacttcagccccgaggagtggggctgcctgaggcccgcccagaggaccctgtacagggacgtgatgagggagacctacggccacctgggcgccctgggcttccccggccccaagcccgccctgatcagctggatggagcaggagagcgaggtgtggagccccgccgcccaggaccccgaggagggcgagagcctgggcggcgccaggggcggcccaagcagcggcgcccctcctcccagcggcggcagcccagccggctccccaacctctaccgaggagggcacctctgagtccgccacccccgagagcggccctggcacctccaccgagcccagcgagggcagcgcacccggcagccctgccggcagccccacctccacagaggagggaaccagcaccgagcccagcgaaggcagcgccccaggcaccagcaccgagcctagtgagcaggagattaaacggatcaacaagatcagaagaagacttgtgaaagacagcaacaccaagaaggccggcaagacaggccccatgaaaaccctgctggttagagtgatgacacccgatctgagagagcggctggaaaacctgagaaagaagcctgaaaatatcccccagcccatcagcaatacatctagagccaacctgaataagctgctgaccgattacaccgaaatgaagaaggcgatcctgcatgtgtactgggaagagttccagaaggaccctgtgggcctgatgagccgggtggcccagcctgccagcaagaagatcgatcagaacaagctgaaacctgagatggacgagaagggcaacctgaccaccgccggctttgcctgctctcagtgtggccagcccctgttcgtgtacaagctggagcaggtgtctgagaagggcaaggcttacaccaactacttcggacggtgcaatgtggccgagcacgaaaagctgatcctgctggcccagctgaagcccgagaaggatagcgacgaagccgtgacatatagcctgggaaagtttgggcagagggccctggatttctacagcattcatgtgaccaaggagtccacccaccccgtgaagcccctggcccagatcgccggaaacagatacgcctccggacctgtgggaaaggccctgagcgacgcatgtatgggcacaatcgcctccttcctgtctaagtaccaggacatcatcatcgaacaccagaaggtggtgaagggcaaccagaagagactggagagcctgcgggagctggccggcaaggaaaacctggaataccctagcgtgaccctgccacctcagcctcacaccaaggagggcgttgatgcctacaacgaagtgatcgcccgggtgcgaatgtgggtgaacctgaacctgtggcagaagctgaagctaagcagagatgatgccaagcctctgctgagactgaagggattcccttcctttcctctggtcgagagacaggccaacgaagtggactggtgggacatggtgtgtaacgtgaagaagctgatcaacgagaaaaaggaggatggcaaggtgttttggcagaatctggctggctacaagagacaggaagccctgagaccatacctgagcagcgaggaagatcggaagaagggaaagaaattcgctcggtaccagctgggcgacctgctgctgcacctggaaaagaagcacggcgaggactggggaaaggtgtacgacgaggcctgggagcggattgacaagaaagtggaaggcctgagcaagcacatcaagctggaagaggaacggagaagcgaggacgcccagagcaaggccgccctgaccgactggctgcgggctaaggccagcttcgtgatcgagggcctgaaggaggccgacaaggacgagttctgcagatgcgagctgaagctgcagaagtggtacggggacctgcggggaaagcccttcgccatcgaagccgagaacagcatcctggacatcagcggcttcagcaagcagtacaactgtgccttcatctggcagaaggacggcgtgaagaagctgaacctgtacctgatcatcaactacttcaagggcggcaagctgcggttcaagaagatcaaacctgaagccttcgaagccaacagattctacaccgtgatcaacaaaaagagcggcgagatcgtgcccatggaggtgaacttcaacttcgacgaccccaacctgatcatcctgcctctggcctttggcaagagacagggcagagaattcatctggaacgacctgctgtccctggaaaccggcagcctgaagctggccaacggaagagtgatcgagaagacactgtacaacagaagaacccggcaggatgagcctgccctgttcgtggccctgaccttcgagcggcgggaggtcctggactcctccaatatcaaaccaatgaacctgatcggcgtggcaagaggcgaaaacatccccgccgtgatcgccctgaccgaccccgagggctgcccactgagccggtttaaggatagcctgggaaacccaacccacatcctgagaatcggcgagagctataaggagaagcagcggaccatccaggccaagaaggaggtggagcagcggagagccggcggctacagccggaagtacgccagcaaagccaagaatctggcagacgatatggtgagaaacaccgctagagatctgctgtactacgccgtgacccaggatgccatgctgatcttcgccaacctgagccggggcttcggccggcagggcaagcggaccttcatggccgagagacagtacacacggatggaggactggctgaccgccaagctggcctacgagggcctgagcaagacctacctgtccaagacactggcccagtacacctccaagacatgcagcaactgtgggtttaccatcaccagcgccgactacgacagggtgctggagaagctgaagaagacagcaacaggctggatgaccacaattaacggcaaggagctgaaggtggagggccagattacctactacaacagatacaagagacagaacgtagtcaaggacctgtccgtcgagctggatagactgagcgaagaatctgtgaacaacgacatctcctcctggacaaagggcagaagcggagaagctctgagcctcctgaagaaaagattctcccatagacccgtgcaggagaagttcgtgtgcctgaactgcggcttcgagacacacgcagccgagcaagccgccctgaacatcgccagatcctggctgttcctgcggagccaggagtacaagaaataccagacaaacaagacaaccggcaacaccgataagagagccttcgtcgagacctggcagtccttttaccggaagaagcttaaggaggtgtggaaacctgccgtgcggtctggcggatctggcggaggctcctaagcccgccgccgtgaggttcgccgacgtggccgtgtacttcagccccgaggagtggggctgcctgaggcccgcccagaggaccctgtacagggacgtgatgagggagacctacggccacctgggcgccctgggcttccccggccccaagcccgccctgatcagctggatggagcaggagagcgaggtgtggagccccgccgcccaggaccccgaggagggcgagagcctgggcggcgccaggggatctggctccggcagcggccccaagaaaaagagaaaagtctaagctgccttctgcggggcttgccttctggccatgcccttcttctctcccttgcacctgtacctcttggtctttgaataaagcctgagtaggaaggctagcaaaaaaaaaaaaaaaaaaaaaaaaaaaaaaaaaaaaaaaaaaaaaaaaaaaaaaaaaaaaaaaaaaaaaaaaaaaaaaaa

SEQ ID NO: 16107 - RNA, 9485 nt, synthetic construct
  source 1..9485: mol_type = other RNA
aggaaataagagagaaaagaagagtaagaagaaatataagagccaccatggcccctaagaagaagcgtaaagtgagccggatggaacgcctcgtctacgaggtgcggcagaagtgcagaaacatcgaggacatctgcatctcctgcggatctctgaacgtgaccctggagcacccactgttcatcggcggcatgtgccagaactgtaaaaactgttttctggagtgtgcctatcaatacgacgatgacggctaccagagctactgcaccatctgttgcggcggaagagaggtgctgatgtgtggaaataacaactgctgccggtgcttctgcgtggaatgcgtggacctgctggtgggccccggcgccgcccaggccgctattaaggaagatccttggaactgctacatgtgcggccacaagggcacatacggcctgctgagacggagagaggactggcctagcagactgcagatgttcttcgccaataaccacgaccaggagttcgacccccctaaggtgtaccctcccgtccccgccgagaagagaaagcccatccgggtcctgagcctgttcgatggcatcgccaccggtctgctggtgctgaaggacctgggcatccaggtggataggtacattgcctccgaggtgtgcgaggactccatcaccgtgggaatggtgcgtcatcagggcaagatcatgtacgtgggcgacgtgcggagcgtgacacagaagcatatccaggagtggggccctttcgacctggtgatcggcggcagcccttgcaatgacctgagcatcgtgaacccagcccggaagggcctgtacgagggaaccggcagactgttcttcgagttttacagactgctgcacgacgcccggcctaaggaaggcgacgaccggcccttcttttggctgttcgagaatgtggtggccatgggagtcagcgacaagcgggatattagccggttcctggagagcaaccccgtgatgatcgatgccaaggaagtgagcgccgcccaccgggccagatacttctggggcaatctgcctggcatgaacagacccctggccagcaccgtgaacgacaagctggagctgcaggagtgcctggagcacggccggatcgccaagttcagcaaggtgagaaccatcaccacccgaagcaacagcatcaaacaaggcaaggaccagcactttcctgtgttcatgaacgagaaggaggacatcctgtggtgtaccgagatggagagagtgttcgggttcccagtccactacacagatgtcagcaacatgtctagactggccagacagagactgctgggaagaagctggtccgtccctgtgatcagacacctgttcgcccctctgaaggagtacttcgcctgcgtgagcagcggcaacagcaacgccaacagccggggccccagcttctctagcggcctggtgccactgtccctgagagggagccacatgggccccatggagatctacaaaaccgtgagcgcctggaagcggcagcctgtgcgcgtgctgagcctgtttcggaatatcgataaagtcctgaaaagcctgggattcctggagagcggctctggctccggcggtggcaccctgaagtacgtggaggatgtgacaaacgtggtcagacgggatgtggagaagtggggccccttcgatctggtgtacggcagcacccaacccctgggcagctcttgtgaccggtgccctggctggtacatgtttcagttccaccggatcctgcagtacgccctgccgagacaggagtcccagcggccattcttttggattttcatggacaacttgctgctgaccgaggatgaccaggaaactaccactcggttcctgcagaccgaagccgtgaccctgcaggacgtgagaggccgggactaccagaacgccatgcgggtgtggtccaacatccctggactgaaaagcaagcacgcacctctgacccctaaagaagaggagtacctgcaggcccaggtgcggagcagaagcaagctggacgcccctaaggtggatctgctggtgaagaattgcctcctgcccctgagagagtacttcaagtatttcagccagaatagtctgcccctgggaggcagcggcggcggcgccctggtgacatttgaggacgtcgccgtgcggttcacccaggaggaatgggctctgctggatccttctcagaaaatcctgtaccgggacgtgatgagagagacataccggaatctgacctccgtgggcatcaactgggaatgttgggaccttgaagcctgcttcagaagcctgggaagaaacctgagagtgcaggtggtgaagagaaagtgcgagctgaccaacagcggcccctgcgccgagggcggcccaagcagcggcgcccctcctcccagcggcggcagcccagccggctccccaacctctaccgaggagggcacctctgagtccgccacccccgagagcggccctggcacctccaccgagcccagcgagggcagcgcacccggcagccctgccggcagccccacctccacagaggagggaaccagcaccgagcccagcgaaggcagcgccccaggcaccagcaccgagcctagtgagcaggagattaaacggatcaacaagatcagaagaagacttgtgaaagacagcaacaccaagaaggccggcaagacaggccccatgaaaaccctgctggttagagtgatgacacccgatctgagagagcggctggaaaacctgagaaagaagcctgaaaatatcccccagcccatcagcaatacatctagagccaacctgaataagctgctgaccgattacaccgaaatgaagaaggcgatcctgcatgtgtactgggaagagttccagaaggaccctgtgggcctgatgagccgggtggcccagcctgccagcaagaagatcgatcagaacaagctgaaacctgagatggacgagaagggcaacctgaccaccgccggctttgcctgctctcagtgtggccagcccctgttcgtgtacaagctggagcaggtgtctgagaagggcaaggcttacaccaactacttcggacggtgcaatgtggccgagcacgaaaagctgatcctgctggcccagctgaagcccgagaaggatagcgacgaagccgtgacatatagcctgggaaagtttgggcagagggccctggatttctacagcattcatgtgaccaaggagtccacccaccccgtgaagcccctggcccagatcgccggaaacagatacgcctccggacctgtgggaaaggccctgagcgacgcatgtatgggcacaatcgcctccttcctgtctaagtaccaggacatcatcatcgaacaccagaaggtggtgaagggcaaccagaagagactggagagcctgcgggagctggccggcaaggaaaacctggaataccctagcgtgaccctgccacctcagcctcacaccaaggagggcgttgatgcctacaacgaagtgatcgcccgggtgcgaatgtgggtgaacctgaacctgtggcagaagctgaagctaagcagagatgatgccaagcctctgctgagactgaagggattcccttcctttcctctggtcgagagacaggccaacgaagtggactggtgggacatggtgtgtaacgtgaagaagctgatcaacgagaaaaaggaggatggcaaggtgttttggcagaatctggctggctacaagagacaggaagccctgagaccatacctgagcagcgaggaagatcggaagaagggaaagaaattcgctcggtaccagctgggcgacctgctgctgcacctggaaaagaagcacggcgaggactggggaaaggtgtacgacgaggcctgggagcggattgacaagaaagtggaaggcctgagcaagcacatcaagctggaagaggaacggagaagcgaggacgcccagagcaaggccgccctgaccgactggctgcgggctaaggccagcttcgtgatcgagggcctgaaggaggccgacaaggacgagttctgcagatgcgagctgaagctgcagaagtggtacggggacctgcggggaaagcccttcgccatcgaagccgagaacagcatcctggacatcagcggcttcagcaagcagtacaactgtgccttcatctggcagaaggacggcgtgaagaagctgaacctgtacctgatcatcaactacttcaagggcggcaagctgcggttcaagaagatcaaacctgaagccttcgaagccaacagattctacaccgtgatcaacaaaaagagcggcgagatcgtgcccatggaggtgaacttcaacttcgacgaccccaacctgatcatcctgcctctggcctttggcaagagacagggcagagaattcatctggaacgacctgctgtccctggaaaccggcagcctgaagctggccaacggaagagtgatcgagaagacactgtacaacagaagaacccggcaggatgagcctgccctgttcgtggccctgaccttcgagcggcgggaggtcctggactcctccaatatcaaaccaatgaacctgatcggcgtggcaagaggcgaaaacatccccgccgtgatcgccctgaccgaccccgagggctgcccactgagccggtttaaggatagcctgggaaacccaacccacatcctgagaatcggcgagagctataaggagaagcagcggaccatccaggccaagaaggaggtggagcagcggagagccggcggctacagccggaagtacgccagcaaagccaagaatctggcagacgatatggtgagaaacaccgctagagatctgctgtactacgccgtgacccaggatgccatgctgatcttcgccaacctgagccggggcttcggccggcagggcaagcggaccttcatggccgagagacagtacacacggatggaggactggctgaccgccaagctggcctacgagggcctgagcaagacctacctgtccaagacactggcccagtacacctccaagacatgcagcaactgtgggtttaccatcaccagcgccgactacgacagggtgctggagaagctgaagaagacagcaacaggctggatgaccacaattaacggcaaggagctgaaggtggagggccagattacctactacaacagatacaagagacagaacgtagtcaaggacctgtccgtcgagctggatagactgagcgaagaatctgtgaacaacgacatctcctcctggacaaagggcagaagcggagaagctctgagcctcctgaagaaaagattctcccatagacccgtgcaggagaagttcgtgtgcctgaactgcggcttcgagacacacgcagccgagcaagccgccctgaacatcgccagatcctggctgttcctgcggagccaggagtacaagaaataccagacaaacaagacaaccggcaacaccgataagagagccttcgtcgagacctggcagtccttttaccggaagaagcttaaggaggtgtggaaacctgccgtgcggtctggcggatctggcggaggctccatgggcctggtgagcttcaaggacgtggccgtggacttcacccaggaggagtggcagcagctggaccccagccagaggaccctgtacagggacgtgatgctggagaactacagccacctggtgagcatgggctaccccgtgagcaagcccgacgtgatcagcaagctggagcagggcgaggagccctggatcatcaagggcgacatcagcaactggatctaccccgacgagtaccaggccgacggcggcccaagcagcggcgcccctcctcccagcggcggcagcccagccggctccccaacctctaccgaggagggcacctctgagtccgccacccccgagagcggccctggcacctccaccgagcccagcgagggcagcgcacccggcagccctgccggcagccccacctccacagaggagggaaccagcaccgagcccagcgaaggcagcgccccaggcaccagcaccgagcctagtgagcaggagattaaacggatcaacaagatcagaagaagacttgtgaaagacagcaacaccaagaaggccggcaagacaggccccatgaaaaccctgctggttagagtgatgacacccgatctgagagagcggctggaaaacctgagaaagaagcctgaaaatatcccccagcccatcagcaatacatctagagccaacctgaataagctgctgaccgattacaccgaaatgaagaaggcgatcctgcatgtgtactgggaagagttccagaaggaccctgtgggcctgatgagccgggtggcccagcctgccagcaagaagatcgatcagaacaagctgaaacctgagatggacgagaagggcaacctgaccaccgccggctttgcctgctctcagtgtggccagcccctgttcgtgtacaagctggagcaggtgtctgagaagggcaaggcttacaccaactacttcggacggtgcaatgtggccgagcacgaaaagctgatcctgctggcccagctgaagcccgagaaggatagcgacgaagccgtgacatatagcctgggaaagtttgggcagagggccctggatttctacagcattcatgtgaccaaggagtccacccaccccgtgaagcccctggcccagatcgccggaaacagatacgcctccggacctgtgggaaaggccctgagcgacgcatgtatgggcacaatcgcctccttcctgtctaagtaccaggacatcatcatcgaacaccagaaggtggtgaagggcaaccagaagagactggagagcctgcgggagctggccggcaaggaaaacctggaataccctagcgtgaccctgccacctcagcctcacaccaaggagggcgttgatgcctacaacgaagtgatcgcccgggtgcgaatgtgggtgaacctgaacctgtggcagaagctgaagctaagcagagatgatgccaagcctctgctgagactgaagggattcccttcctttcctctggtcgagagacaggccaacgaagtggactggtgggacatggtgtgtaacgtgaagaagctgatcaacgagaaaaaggaggatggcaaggtgttttggcagaatctggctggctacaagagacaggaagccctgagaccatacctgagcagcgaggaagatcggaagaagggaaagaaattcgctcggtaccagctgggcgacctgctgctgcacctggaaaagaagcacggcgaggactggggaaaggtgtacgacgaggcctgggagcggattgacaagaaagtggaaggcctgagcaagcacatcaagctggaagaggaacggagaagcgaggacgcccagagcaaggccgccctgaccgactggctgcgggctaaggccagcttcgtgatcgagggcctgaaggaggccgacaaggacgagttctgcagatgcgagctgaagctgcagaagtggtacggggacctgcggggaaagcccttcgccatcgaagccgagaacagcatcctggacatcagcggcttcagcaagcagtacaactgtgccttcatctggcagaaggacggcgtgaagaagctgaacctgtacctgatcatcaactacttcaagggcggcaagctgcggttcaagaagatcaaacctgaagccttcgaagccaacagattctacaccgtgatcaacaaaaagagcggcgagatcgtgcccatggaggtgaacttcaacttcgacgaccccaacctgatcatcctgcctctggcctttggcaagagacagggcagagaattcatctggaacgacctgctgtccctggaaaccggcagcctgaagctggccaacggaagagtgatcgagaagacactgtacaacagaagaacccggcaggatgagcctgccctgttcgtggccctgaccttcgagcggcgggaggtcctggactcctccaatatcaaaccaatgaacctgatcggcgtggcaagaggcgaaaacatccccgccgtgatcgccctgaccgaccccgagggctgcccactgagccggtttaaggatagcctgggaaacccaacccacatcctgagaatcggcgagagctataaggagaagcagcggaccatccaggccaagaaggaggtggagcagcggagagccggcggctacagccggaagtacgccagcaaagccaagaatctggcagacgatatggtgagaaacaccgctagagatctgctgtactacgccgtgacccaggatgccatgctgatcttcgccaacctgagccggggcttcggccggcagggcaagcggaccttcatggccgagagacagtacacacggatggaggactggctgaccgccaagctggcctacgagggcctgagcaagacctacctgtccaagacactggcccagtacacctccaagacatgcagcaactgtgggtttaccatcaccagcgccgactacgacagggtgctggagaagctgaagaagacagcaacaggctggatgaccacaattaacggcaaggagctgaaggtggagggccagattacctactacaacagatacaagagacagaacgtagtcaaggacctgtccgtcgagctggatagactgagcgaagaatctgtgaacaacgacatctcctcctggacaaagggcagaagcggagaagctctgagcctcctgaagaaaagattctcccatagacccgtgcaggagaagttcgtgtgcctgaactgcggcttcgagacacacgcagccgagcaagccgccctgaacatcgccagatcctggctgttcctgcggagccaggagtacaagaaataccagacaaacaagacaaccggcaacaccgataagagagccttcgtcgagacctggcagtccttttaccggaagaagcttaaggaggtgtggaaacctgccgtgcggtctggcggatctggcggaggctcctatgggcctggtgagcttcaaggacgtggccgtggacttcacccaggaggagtggcagcagctggaccccagccagaggaccctgtacagggacgtgatgctggagaactacagccacctggtgagcatgggctaccccgtgagcaagcccgacgtgatcagcaagctggagcagggcgaggagccctggatcatcaagggcgacatcagcaactggatctaccccgacgagtaccaggccgacggatctggctccggcagcggccccaagaaaaagagaaaagtctaagctgccttctgcggggcttgccttctggccatgcccttcttctctcccttgcacctgtacctcttggtctttgaataaagcctgagtaggaaggctagcaaaaaaaaaaaaaaaaaaaaaaaaaaaaaaaaaaaaaaaaaaaaaaaaaaaaaaaaaaaaaaaaaaaaaaaaaaaaaaaa

SEQ ID NO: 16108 - RNA, 9485 nt, synthetic construct
  source 1..9485: mol_type = other RNA
aggaaataagagagaaaagaagagtaagaagaaatataagagccaccatggcccctaagaagaagcgtaaagtgagccggatggaacgcctcgtctacgaggtgcggcagaagtgcagaaacatcgaggacatctgcatctcctgcggatctctgaacgtgaccctggagcacccactgttcatcggcggcatgtgccagaactgtaaaaactgttttctggagtgtgcctatcaatacgacgatgacggctaccagagctactgcaccatctgttgcggcggaagagaggtgctgatgtgtggaaataacaactgctgccggtgcttctgcgtggaatgcgtggacctgctggtgggccccggcgccgcccaggccgctattaaggaagatccttggaactgctacatgtgcggccacaagggcacatacggcctgctgagacggagagaggactggcctagcagactgcagatgttcttcgccaataaccacgaccaggagttcgacccccctaaggtgtaccctcccgtccccgccgagaagagaaagcccatccgggtcctgagcctgttcgatggcatcgccaccggtctgctggtgctgaaggacctgggcatccaggtggataggtacattgcctccgaggtgtgcgaggactccatcaccgtgggaatggtgcgtcatcagggcaagatcatgtacgtgggcgacgtgcggagcgtgacacagaagcatatccaggagtggggccctttcgacctggtgatcggcggcagcccttgcaatgacctgagcatcgtgaacccagcccggaagggcctgtacgagggaaccggcagactgttcttcgagttttacagactgctgcacgacgcccggcctaaggaaggcgacgaccggcccttcttttggctgttcgagaatgtggtggccatgggagtcagcgacaagcgggatattagccggttcctggagagcaaccccgtgatgatcgatgccaaggaagtgagcgccgcccaccgggccagatacttctggggcaatctgcctggcatgaacagacccctggccagcaccgtgaacgacaagctggagctgcaggagtgcctggagcacggccggatcgccaagttcagcaaggtgagaaccatcaccacccgaagcaacagcatcaaacaaggcaaggaccagcactttcctgtgttcatgaacgagaaggaggacatcctgtggtgtaccgagatggagagagtgttcgggttcccagtccactacacagatgtcagcaacatgtctagactggccagacagagactgctgggaagaagctggtccgtccctgtgatcagacacctgttcgcccctctgaaggagtacttcgcctgcgtgagcagcggcaacagcaacgccaacagccggggccccagcttctctagcggcctggtgccactgtccctgagagggagccacatgggccccatggagatctacaaaaccgtgagcgcctggaagcggcagcctgtgcgcgtgctgagcctgtttcggaatatcgataaagtcctgaaaagcctgggattcctggagagcggctctggctccggcggtggcaccctgaagtacgtggaggatgtgacaaacgtggtcagacgggatgtggagaagtggggccccttcgatctggtgtacggcagcacccaacccctgggcagctcttgtgaccggtgccctggctggtacatgtttcagttccaccggatcctgcagtacgccctgccgagacaggagtcccagcggccattcttttggattttcatggacaacttgctgctgaccgaggatgaccaggaaactaccactcggttcctgcagaccgaagccgtgaccctgcaggacgtgagaggccgggactaccagaacgccatgcgggtgtggtccaacatccctggactgaaaagcaagcacgcacctctgacccctaaagaagaggagtacctgcaggcccaggtgcggagcagaagcaagctggacgcccctaaggtggatctgctggtgaagaattgcctcctgcccctgagagagtacttcaagtatttcagccagaatagtctgcccctgggaggcagcggcggcggcgccctggtgacatttgaggacgtcgccgtgcggttcacccaggaggaatgggctctgctggatccttctcagaaaatcctgtaccgggacgtgatgagagagacataccggaatctgacctccgtgggcatcaactgggaatgttgggaccttgaagcctgcttcagaagcctgggaagaaacctgagagtgcaggtggtgaagagaaagtgcgagctgaccaacagcggcccctgcgccgagggcggcccaagcagcggcgcccctcctcccagcggcggcagcccagccggctccccaacctctaccgaggagggcacctctgagtccgccacccccgagagcggccctggcacctccaccgagcccagcgagggcagcgcacccggcagccctgccggcagccccacctccacagaggagggaaccagcaccgagcccagcgaaggcagcgccccaggcaccagcaccgagcctagtgagcaggagattaaacggatcaacaagatcagaagaagacttgtgaaagacagcaacaccaagaaggccggcaagacaggccccatgaaaaccctgctggttagagtgatgacacccgatctgagagagcggctggaaaacctgagaaagaagcctgaaaatatcccccagcccatcagcaatacatctagagccaacctgaataagctgctgaccgattacaccgaaatgaagaaggcgatcctgcatgtgtactgggaagagttccagaaggaccctgtgggcctgatgagccgggtggcccagcctgccagcaagaagatcgatcagaacaagctgaaacctgagatggacgagaagggcaacctgaccaccgccggctttgcctgctctcagtgtggccagcccctgttcgtgtacaagctggagcaggtgtctgagaagggcaaggcttacaccaactacttcggacggtgcaatgtggccgagcacgaaaagctgatcctgctggcccagctgaagcccgagaaggatagcgacgaagccgtgacatatagcctgggaaagtttgggcagagggccctggatttctacagcattcatgtgaccaaggagtccacccaccccgtgaagcccctggcccagatcgccggaaacagatacgcctccggacctgtgggaaaggccctgagcgacgcatgtatgggcacaatcgcctccttcctgtctaagtaccaggacatcatcatcgaacaccagaaggtggtgaagggcaaccagaagagactggagagcctgcgggagctggccggcaaggaaaacctggaataccctagcgtgaccctgccacctcagcctcacaccaaggagggcgttgatgcctacaacgaagtgatcgcccgggtgcgaatgtgggtgaacctgaacctgtggcagaagctgaagctaagcagagatgatgccaagcctctgctgagactgaagggattcccttcctttcctctggtcgagagacaggccaacgaagtggactggtgggacatggtgtgtaacgtgaagaagctgatcaacgagaaaaaggaggatggcaaggtgttttggcagaatctggctggctacaagagacaggaagccctgagaccatacctgagcagcgaggaagatcggaagaagggaaagaaattcgctcggtaccagctgggcgacctgctgctgcacctggaaaagaagcacggcgaggactggggaaaggtgtacgacgaggcctgggagcggattgacaagaaagtggaaggcctgagcaagcacatcaagctggaagaggaacggagaagcgaggacgcccagagcaaggccgccctgaccgactggctgcgggctaaggccagcttcgtgatcgagggcctgaaggaggccgacaaggacgagttctgcagatgcgagctgaagctgcagaagtggtacggggacctgcggggaaagcccttcgccatcgaagccgagaacagcatcctggacatcagcggcttcagcaagcagtacaactgtgccttcatctggcagaaggacggcgtgaagaagctgaacctgtacctgatcatcaactacttcaagggcggcaagctgcggttcaagaagatcaaacctgaagccttcgaagccaacagattctacaccgtgatcaacaaaaagagcggcgagatcgtgcccatggaggtgaacttcaacttcgacgaccccaacctgatcatcctgcctctggcctttggcaagagacagggcagagaattcatctggaacgacctgctgtccctggaaaccggcagcctgaagctggccaacggaagagtgatcgagaagacactgtacaacagaagaacccggcaggatgagcctgccctgttcgtggccctgaccttcgagcggcgggaggtcctggactcctccaatatcaaaccaatgaacctgatcggcgtggcaagaggcgaaaacatccccgccgtgatcgccctgaccgaccccgagggctgcccactgagccggtttaaggatagcctgggaaacccaacccacatcctgagaatcggcgagagctataaggagaagcagcggaccatccaggccaagaaggaggtggagcagcggagagccggcggctacagccggaagtacgccagcaaagccaagaatctggcagacgatatggtgagaaacaccgctagagatctgctgtactacgccgtgacccaggatgccatgctgatcttcgccaacctgagccggggcttcggccggcagggcaagcggaccttcatggccgagagacagtacacacggatggaggactggctgaccgccaagctggcctacgagggcctgagcaagacctacctgtccaagacactggcccagtacacctccaagacatgcagcaactgtgggtttaccatcaccagcgccgactacgacagggtgctggagaagctgaagaagacagcaacaggctggatgaccacaattaacggcaaggagctgaaggtggagggccagattacctactacaacagatacaagagacagaacgtagtcaaggacctgtccgtcgagctggatagactgagcgaagaatctgtgaacaacgacatctcctcctggacaaagggcagaagcggagaagctctgagcctcctgaagaaaagattctcccatagacccgtgcaggagaagttcgtgtgcctgaactgcggcttcgagacacacgcagccgagcaagccgccctgaacatcgccagatcctggctgttcctgcggagccaggagtacaagaaataccagacaaacaagacaaccggcaacaccgataagagagccttcgtcgagacctggcagtccttttaccggaagaagcttaaggaggtgtggaaacctgccgtgcggtctggcggatctggcggaggctccctgcaggagcccgtgagcttcgccgaggtggccgtgtgcttcagcagggaggagtgggccctgctggaccccgcccagagggtgctgtacagggacgtgatgctggagacctaccagtgcgtggccagcctggccagcctgctgacccccaagcccgtgctgatcagcctgctggagggcggcgaggagccctggatccccgacgtgaggagccccgaggccacccccggcgacctgagccccggcggcccaagcagcggcgcccctcctcccagcggcggcagcccagccggctccccaacctctaccgaggagggcacctctgagtccgccacccccgagagcggccctggcacctccaccgagcccagcgagggcagcgcacccggcagccctgccggcagccccacctccacagaggagggaaccagcaccgagcccagcgaaggcagcgccccaggcaccagcaccgagcctagtgagcaggagattaaacggatcaacaagatcagaagaagacttgtgaaagacagcaacaccaagaaggccggcaagacaggccccatgaaaaccctgctggttagagtgatgacacccgatctgagagagcggctggaaaacctgagaaagaagcctgaaaatatcccccagcccatcagcaatacatctagagccaacctgaataagctgctgaccgattacaccgaaatgaagaaggcgatcctgcatgtgtactgggaagagttccagaaggaccctgtgggcctgatgagccgggtggcccagcctgccagcaagaagatcgatcagaacaagctgaaacctgagatggacgagaagggcaacctgaccaccgccggctttgcctgctctcagtgtggccagcccctgttcgtgtacaagctggagcaggtgtctgagaagggcaaggcttacaccaactacttcggacggtgcaatgtggccgagcacgaaaagctgatcctgctggcccagctgaagcccgagaaggatagcgacgaagccgtgacatatagcctgggaaagtttgggcagagggccctggatttctacagcattcatgtgaccaaggagtccacccaccccgtgaagcccctggcccagatcgccggaaacagatacgcctccggacctgtgggaaaggccctgagcgacgcatgtatgggcacaatcgcctccttcctgtctaagtaccaggacatcatcatcgaacaccagaaggtggtgaagggcaaccagaagagactggagagcctgcgggagctggccggcaaggaaaacctggaataccctagcgtgaccctgccacctcagcctcacaccaaggagggcgttgatgcctacaacgaagtgatcgcccgggtgcgaatgtgggtgaacctgaacctgtggcagaagctgaagctaagcagagatgatgccaagcctctgctgagactgaagggattcccttcctttcctctggtcgagagacaggccaacgaagtggactggtgggacatggtgtgtaacgtgaagaagctgatcaacgagaaaaaggaggatggcaaggtgttttggcagaatctggctggctacaagagacaggaagccctgagaccatacctgagcagcgaggaagatcggaagaagggaaagaaattcgctcggtaccagctgggcgacctgctgctgcacctggaaaagaagcacggcgaggactggggaaaggtgtacgacgaggcctgggagcggattgacaagaaagtggaaggcctgagcaagcacatcaagctggaagaggaacggagaagcgaggacgcccagagcaaggccgccctgaccgactggctgcgggctaaggccagcttcgtgatcgagggcctgaaggaggccgacaaggacgagttctgcagatgcgagctgaagctgcagaagtggtacggggacctgcggggaaagcccttcgccatcgaagccgagaacagcatcctggacatcagcggcttcagcaagcagtacaactgtgccttcatctggcagaaggacggcgtgaagaagctgaacctgtacctgatcatcaactacttcaagggcggcaagctgcggttcaagaagatcaaacctgaagccttcgaagccaacagattctacaccgtgatcaacaaaaagagcggcgagatcgtgcccatggaggtgaacttcaacttcgacgaccccaacctgatcatcctgcctctggcctttggcaagagacagggcagagaattcatctggaacgacctgctgtccctggaaaccggcagcctgaagctggccaacggaagagtgatcgagaagacactgtacaacagaagaacccggcaggatgagcctgccctgttcgtggccctgaccttcgagcggcgggaggtcctggactcctccaatatcaaaccaatgaacctgatcggcgtggcaagaggcgaaaacatccccgccgtgatcgccctgaccgaccccgagggctgcccactgagccggtttaaggatagcctgggaaacccaacccacatcctgagaatcggcgagagctataaggagaagcagcggaccatccaggccaagaaggaggtggagcagcggagagccggcggctacagccggaagtacgccagcaaagccaagaatctggcagacgatatggtgagaaacaccgctagagatctgctgtactacgccgtgacccaggatgccatgctgatcttcgccaacctgagccggggcttcggccggcagggcaagcggaccttcatggccgagagacagtacacacggatggaggactggctgaccgccaagctggcctacgagggcctgagcaagacctacctgtccaagacactggcccagtacacctccaagacatgcagcaactgtgggtttaccatcaccagcgccgactacgacagggtgctggagaagctgaagaagacagcaacaggctggatgaccacaattaacggcaaggagctgaaggtggagggccagattacctactacaacagatacaagagacagaacgtagtcaaggacctgtccgtcgagctggatagactgagcgaagaatctgtgaacaacgacatctcctcctggacaaagggcagaagcggagaagctctgagcctcctgaagaaaagattctcccatagacccgtgcaggagaagttcgtgtgcctgaactgcggcttcgagacacacgcagccgagcaagccgccctgaacatcgccagatcctggctgttcctgcggagccaggagtacaagaaataccagacaaacaagacaaccggcaacaccgataagagagccttcgtcgagacctggcagtccttttaccggaagaagcttaaggaggtgtggaaacctgccgtgcggtctggcggatctggcggaggctcctctgcaggagcccgtgagcttcgccgaggtggccgtgtgcttcagcagggaggagtgggccctgctggaccccgcccagagggtgctgtacagggacgtgatgctggagacctaccagtgcgtggccagcctggccagcctgctgacccccaagcccgtgctgatcagcctgctggagggcggcgaggagccctggatccccgacgtgaggagccccgaggccacccccggcgacctgagccccggatctggctccggcagcggccccaagaaaaagagaaaagtctaagctgccttctgcggggcttgccttctggccatgcccttcttctctcccttgcacctgtacctcttggtctttgaataaagcctgagtaggaaggctagcaaaaaaaaaaaaaaaaaaaaaaaaaaaaaaaaaaaaaaaaaaaaaaaaaaaaaaaaaaaaaaaaaaaaaaaaaaaaaaaa

SEQ ID NO: 16109 - RNA, 9479 nt, synthetic construct
  source 1..9479: mol_type = other RNA
aggaaataagagagaaaagaagagtaagaagaaatataagagccaccatggcccctaagaagaagcgtaaagtgagccggatggaacgcctcgtctacgaggtgcggcagaagtgcagaaacatcgaggacatctgcatctcctgcggatctctgaacgtgaccctggagcacccactgttcatcggcggcatgtgccagaactgtaaaaactgttttctggagtgtgcctatcaatacgacgatgacggctaccagagctactgcaccatctgttgcggcggaagagaggtgctgatgtgtggaaataacaactgctgccggtgcttctgcgtggaatgcgtggacctgctggtgggccccggcgccgcccaggccgctattaaggaagatccttggaactgctacatgtgcggccacaagggcacatacggcctgctgagacggagagaggactggcctagcagactgcagatgttcttcgccaataaccacgaccaggagttcgacccccctaaggtgtaccctcccgtccccgccgagaagagaaagcccatccgggtcctgagcctgttcgatggcatcgccaccggtctgctggtgctgaaggacctgggcatccaggtggataggtacattgcctccgaggtgtgcgaggactccatcaccgtgggaatggtgcgtcatcagggcaagatcatgtacgtgggcgacgtgcggagcgtgacacagaagcatatccaggagtggggccctttcgacctggtgatcggcggcagcccttgcaatgacctgagcatcgtgaacccagcccggaagggcctgtacgagggaaccggcagactgttcttcgagttttacagactgctgcacgacgcccggcctaaggaaggcgacgaccggcccttcttttggctgttcgagaatgtggtggccatgggagtcagcgacaagcgggatattagccggttcctggagagcaaccccgtgatgatcgatgccaaggaagtgagcgccgcccaccgggccagatacttctggggcaatctgcctggcatgaacagacccctggccagcaccgtgaacgacaagctggagctgcaggagtgcctggagcacggccggatcgccaagttcagcaaggtgagaaccatcaccacccgaagcaacagcatcaaacaaggcaaggaccagcactttcctgtgttcatgaacgagaaggaggacatcctgtggtgtaccgagatggagagagtgttcgggttcccagtccactacacagatgtcagcaacatgtctagactggccagacagagactgctgggaagaagctggtccgtccctgtgatcagacacctgttcgcccctctgaaggagtacttcgcctgcgtgagcagcggcaacagcaacgccaacagccggggccccagcttctctagcggcctggtgccactgtccctgagagggagccacatgggccccatggagatctacaaaaccgtgagcgcctggaagcggcagcctgtgcgcgtgctgagcctgtttcggaatatcgataaagtcctgaaaagcctgggattcctggagagcggctctggctccggcggtggcaccctgaagtacgtggaggatgtgacaaacgtggtcagacgggatgtggagaagtggggccccttcgatctggtgtacggcagcacccaacccctgggcagctcttgtgaccggtgccctggctggtacatgtttcagttccaccggatcctgcagtacgccctgccgagacaggagtcccagcggccattcttttggattttcatggacaacttgctgctgaccgaggatgaccaggaaactaccactcggttcctgcagaccgaagccgtgaccctgcaggacgtgagaggccgggactaccagaacgccatgcgggtgtggtccaacatccctggactgaaaagcaagcacgcacctctgacccctaaagaagaggagtacctgcaggcccaggtgcggagcagaagcaagctggacgcccctaaggtggatctgctggtgaagaattgcctcctgcccctgagagagtacttcaagtatttcagccagaatagtctgcccctgggaggcagcggcggcggcgccctggtgacatttgaggacgtcgccgtgcggttcacccaggaggaatgggctctgctggatccttctcagaaaatcctgtaccgggacgtgatgagagagacataccggaatctgacctccgtgggcatcaactgggaatgttgggaccttgaagcctgcttcagaagcctgggaagaaacctgagagtgcaggtggtgaagagaaagtgcgagctgaccaacagcggcccctgcgccgagggcggcccaagcagcggcgcccctcctcccagcggcggcagcccagccggctccccaacctctaccgaggagggcacctctgagtccgccacccccgagagcggccctggcacctccaccgagcccagcgagggcagcgcacccggcagccctgccggcagccccacctccacagaggagggaaccagcaccgagcccagcgaaggcagcgccccaggcaccagcaccgagcctagtgagcaggagattaaacggatcaacaagatcagaagaagacttgtgaaagacagcaacaccaagaaggccggcaagacaggccccatgaaaaccctgctggttagagtgatgacacccgatctgagagagcggctggaaaacctgagaaagaagcctgaaaatatcccccagcccatcagcaatacatctagagccaacctgaataagctgctgaccgattacaccgaaatgaagaaggcgatcctgcatgtgtactgggaagagttccagaaggaccctgtgggcctgatgagccgggtggcccagcctgccagcaagaagatcgatcagaacaagctgaaacctgagatggacgagaagggcaacctgaccaccgccggctttgcctgctctcagtgtggccagcccctgttcgtgtacaagctggagcaggtgtctgagaagggcaaggcttacaccaactacttcggacggtgcaatgtggccgagcacgaaaagctgatcctgctggcccagctgaagcccgagaaggatagcgacgaagccgtgacatatagcctgggaaagtttgggcagagggccctggatttctacagcattcatgtgaccaaggagtccacccaccccgtgaagcccctggcccagatcgccggaaacagatacgcctccggacctgtgggaaaggccctgagcgacgcatgtatgggcacaatcgcctccttcctgtctaagtaccaggacatcatcatcgaacaccagaaggtggtgaagggcaaccagaagagactggagagcctgcgggagctggccggcaaggaaaacctggaataccctagcgtgaccctgccacctcagcctcacaccaaggagggcgttgatgcctacaacgaagtgatcgcccgggtgcgaatgtgggtgaacctgaacctgtggcagaagctgaagctaagcagagatgatgccaagcctctgctgagactgaagggattcccttcctttcctctggtcgagagacaggccaacgaagtggactggtgggacatggtgtgtaacgtgaagaagctgatcaacgagaaaaaggaggatggcaaggtgttttggcagaatctggctggctacaagagacaggaagccctgagaccatacctgagcagcgaggaagatcggaagaagggaaagaaattcgctcggtaccagctgggcgacctgctgctgcacctggaaaagaagcacggcgaggactggggaaaggtgtacgacgaggcctgggagcggattgacaagaaagtggaaggcctgagcaagcacatcaagctggaagaggaacggagaagcgaggacgcccagagcaaggccgccctgaccgactggctgcgggctaaggccagcttcgtgatcgagggcctgaaggaggccgacaaggacgagttctgcagatgcgagctgaagctgcagaagtggtacggggacctgcggggaaagcccttcgccatcgaagccgagaacagcatcctggacatcagcggcttcagcaagcagtacaactgtgccttcatctggcagaaggacggcgtgaagaagctgaacctgtacctgatcatcaactacttcaagggcggcaagctgcggttcaagaagatcaaacctgaagccttcgaagccaacagattctacaccgtgatcaacaaaaagagcggcgagatcgtgcccatggaggtgaacttcaacttcgacgaccccaacctgatcatcctgcctctggcctttggcaagagacagggcagagaattcatctggaacgacctgctgtccctggaaaccggcagcctgaagctggccaacggaagagtgatcgagaagacactgtacaacagaagaacccggcaggatgagcctgccctgttcgtggccctgaccttcgagcggcgggaggtcctggactcctccaatatcaaaccaatgaacctgatcggcgtggcaagaggcgaaaacatccccgccgtgatcgccctgaccgaccccgagggctgcccactgagccggtttaaggatagcctgggaaacccaacccacatcctgagaatcggcgagagctataaggagaagcagcggaccatccaggccaagaaggaggtggagcagcggagagccggcggctacagccggaagtacgccagcaaagccaagaatctggcagacgatatggtgagaaacaccgctagagatctgctgtactacgccgtgacccaggatgccatgctgatcttcgccaacctgagccggggcttcggccggcagggcaagcggaccttcatggccgagagacagtacacacggatggaggactggctgaccgccaagctggcctacgagggcctgagcaagacctacctgtccaagacactggcccagtacacctccaagacatgcagcaactgtgggtttaccatcaccagcgccgactacgacagggtgctggagaagctgaagaagacagcaacaggctggatgaccacaattaacggcaaggagctgaaggtggagggccagattacctactacaacagatacaagagacagaacgtagtcaaggacctgtccgtcgagctggatagactgagcgaagaatctgtgaacaacgacatctcctcctggacaaagggcagaagcggagaagctctgagcctcctgaagaaaagattctcccatagacccgtgcaggagaagttcgtgtgcctgaactgcggcttcgagacacacgcagccgagcaagccgccctgaacatcgccagatcctggctgttcctgcggagccaggagtacaagaaataccagacaaacaagacaaccggcaacaccgataagagagccttcgtcgagacctggcagtccttttaccggaagaagcttaaggaggtgtggaaacctgccgtgcggtctggcggatctggcggaggctccgccctgagaagcgtgatgttcagcgacgtgagcatcgacttcagccccgaggagtgggagtacctggacctggagcagaaggacctgtacagagacgtgatgctggagaactacagcaacctggtgagcctgggctgcttcatcagcaagcccgacgtgatcagcagcctggagcagggcaaggagccctggaaggtggtgagaaagggcagaagacagtaccccgacctggagaccaagggcggcccaagcagcggcgcccctcctcccagcggcggcagcccagccggctccccaacctctaccgaggagggcacctctgagtccgccacccccgagagcggccctggcacctccaccgagcccagcgagggcagcgcacccggcagccctgccggcagccccacctccacagaggagggaaccagcaccgagcccagcgaaggcagcgccccaggcaccagcaccgagcctagtgagcaggagattaaacggatcaacaagatcagaagaagacttgtgaaagacagcaacaccaagaaggccggcaagacaggccccatgaaaaccctgctggttagagtgatgacacccgatctgagagagcggctggaaaacctgagaaagaagcctgaaaatatcccccagcccatcagcaatacatctagagccaacctgaataagctgctgaccgattacaccgaaatgaagaaggcgatcctgcatgtgtactgggaagagttccagaaggaccctgtgggcctgatgagccgggtggcccagcctgccagcaagaagatcgatcagaacaagctgaaacctgagatggacgagaagggcaacctgaccaccgccggctttgcctgctctcagtgtggccagcccctgttcgtgtacaagctggagcaggtgtctgagaagggcaaggcttacaccaactacttcggacggtgcaatgtggccgagcacgaaaagctgatcctgctggcccagctgaagcccgagaaggatagcgacgaagccgtgacatatagcctgggaaagtttgggcagagggccctggatttctacagcattcatgtgaccaaggagtccacccaccccgtgaagcccctggcccagatcgccggaaacagatacgcctccggacctgtgggaaaggccctgagcgacgcatgtatgggcacaatcgcctccttcctgtctaagtaccaggacatcatcatcgaacaccagaaggtggtgaagggcaaccagaagagactggagagcctgcgggagctggccggcaaggaaaacctggaataccctagcgtgaccctgccacctcagcctcacaccaaggagggcgttgatgcctacaacgaagtgatcgcccgggtgcgaatgtgggtgaacctgaacctgtggcagaagctgaagctaagcagagatgatgccaagcctctgctgagactgaagggattcccttcctttcctctggtcgagagacaggccaacgaagtggactggtgggacatggtgtgtaacgtgaagaagctgatcaacgagaaaaaggaggatggcaaggtgttttggcagaatctggctggctacaagagacaggaagccctgagaccatacctgagcagcgaggaagatcggaagaagggaaagaaattcgctcggtaccagctgggcgacctgctgctgcacctggaaaagaagcacggcgaggactggggaaaggtgtacgacgaggcctgggagcggattgacaagaaagtggaaggcctgagcaagcacatcaagctggaagaggaacggagaagcgaggacgcccagagcaaggccgccctgaccgactggctgcgggctaaggccagcttcgtgatcgagggcctgaaggaggccgacaaggacgagttctgcagatgcgagctgaagctgcagaagtggtacggggacctgcggggaaagcccttcgccatcgaagccgagaacagcatcctggacatcagcggcttcagcaagcagtacaactgtgccttcatctggcagaaggacggcgtgaagaagctgaacctgtacctgatcatcaactacttcaagggcggcaagctgcggttcaagaagatcaaacctgaagccttcgaagccaacagattctacaccgtgatcaacaaaaagagcggcgagatcgtgcccatggaggtgaacttcaacttcgacgaccccaacctgatcatcctgcctctggcctttggcaagagacagggcagagaattcatctggaacgacctgctgtccctggaaaccggcagcctgaagctggccaacggaagagtgatcgagaagacactgtacaacagaagaacccggcaggatgagcctgccctgttcgtggccctgaccttcgagcggcgggaggtcctggactcctccaatatcaaaccaatgaacctgatcggcgtggcaagaggcgaaaacatccccgccgtgatcgccctgaccgaccccgagggctgcccactgagccggtttaaggatagcctgggaaacccaacccacatcctgagaatcggcgagagctataaggagaagcagcggaccatccaggccaagaaggaggtggagcagcggagagccggcggctacagccggaagtacgccagcaaagccaagaatctggcagacgatatggtgagaaacaccgctagagatctgctgtactacgccgtgacccaggatgccatgctgatcttcgccaacctgagccggggcttcggccggcagggcaagcggaccttcatggccgagagacagtacacacggatggaggactggctgaccgccaagctggcctacgagggcctgagcaagacctacctgtccaagacactggcccagtacacctccaagacatgcagcaactgtgggtttaccatcaccagcgccgactacgacagggtgctggagaagctgaagaagacagcaacaggctggatgaccacaattaacggcaaggagctgaaggtggagggccagattacctactacaacagatacaagagacagaacgtagtcaaggacctgtccgtcgagctggatagactgagcgaagaatctgtgaacaacgacatctcctcctggacaaagggcagaagcggagaagctctgagcctcctgaagaaaagattctcccatagacccgtgcaggagaagttcgtgtgcctgaactgcggcttcgagacacacgcagccgagcaagccgccctgaacatcgccagatcctggctgttcctgcggagccaggagtacaagaaataccagacaaacaagacaaccggcaacaccgataagagagccttcgtcgagacctggcagtccttttaccggaagaagcttaaggaggtgtggaaacctgccgtgcggtctggcggatctggcggaggctcctgccctgagaagcgtgatgttcagcgacgtgagcatcgacttcagccccgaggagtgggagtacctggacctggagcagaaggacctgtacagagacgtgatgctggagaactacagcaacctggtgagcctgggctgcttcatcagcaagcccgacgtgatcagcagcctggagcagggcaaggagccctggaaggtggtgagaaagggcagaagacagtaccccgacctggagaccaagggatctggctccggcagcggccccaagaaaaagagaaaagtctaagctgccttctgcggggcttgccttctggccatgcccttcttctctcccttgcacctgtacctcttggtctttgaataaagcctgagtaggaaggctagcaaaaaaaaaaaaaaaaaaaaaaaaaaaaaaaaaaaaaaaaaaaaaaaaaaaaaaaaaaaaaaaaaaaaaaaaaaaaaaaa

SEQ ID NO: 16110 - RNA, 9485 nt, synthetic construct
  source 1..9485: mol_type = other RNA
aggaaataagagagaaaagaagagtaagaagaaatataagagccaccatggcccctaagaagaagcgtaaagtgagccggatggaacgcctcgtctacgaggtgcggcagaagtgcagaaacatcgaggacatctgcatctcctgcggatctctgaacgtgaccctggagcacccactgttcatcggcggcatgtgccagaactgtaaaaactgttttctggagtgtgcctatcaatacgacgatgacggctaccagagctactgcaccatctgttgcggcggaagagaggtgctgatgtgtggaaataacaactgctgccggtgcttctgcgtggaatgcgtggacctgctggtgggccccggcgccgcccaggccgctattaaggaagatccttggaactgctacatgtgcggccacaagggcacatacggcctgctgagacggagagaggactggcctagcagactgcagatgttcttcgccaataaccacgaccaggagttcgacccccctaaggtgtaccctcccgtccccgccgagaagagaaagcccatccgggtcctgagcctgttcgatggcatcgccaccggtctgctggtgctgaaggacctgggcatccaggtggataggtacattgcctccgaggtgtgcgaggactccatcaccgtgggaatggtgcgtcatcagggcaagatcatgtacgtgggcgacgtgcggagcgtgacacagaagcatatccaggagtggggccctttcgacctggtgatcggcggcagcccttgcaatgacctgagcatcgtgaacccagcccggaagggcctgtacgagggaaccggcagactgttcttcgagttttacagactgctgcacgacgcccggcctaaggaaggcgacgaccggcccttcttttggctgttcgagaatgtggtggccatgggagtcagcgacaagcgggatattagccggttcctggagagcaaccccgtgatgatcgatgccaaggaagtgagcgccgcccaccgggccagatacttctggggcaatctgcctggcatgaacagacccctggccagcaccgtgaacgacaagctggagctgcaggagtgcctggagcacggccggatcgccaagttcagcaaggtgagaaccatcaccacccgaagcaacagcatcaaacaaggcaaggaccagcactttcctgtgttcatgaacgagaaggaggacatcctgtggtgtaccgagatggagagagtgttcgggttcccagtccactacacagatgtcagcaacatgtctagactggccagacagagactgctgggaagaagctggtccgtccctgtgatcagacacctgttcgcccctctgaaggagtacttcgcctgcgtgagcagcggcaacagcaacgccaacagccggggccccagcttctctagcggcctggtgccactgtccctgagagggagccacatgggccccatggagatctacaaaaccgtgagcgcctggaagcggcagcctgtgcgcgtgctgagcctgtttcggaatatcgataaagtcctgaaaagcctgggattcctggagagcggctctggctccggcggtggcaccctgaagtacgtggaggatgtgacaaacgtggtcagacgggatgtggagaagtggggccccttcgatctggtgtacggcagcacccaacccctgggcagctcttgtgaccggtgccctggctggtacatgtttcagttccaccggatcctgcagtacgccctgccgagacaggagtcccagcggccattcttttggattttcatggacaacttgctgctgaccgaggatgaccaggaaactaccactcggttcctgcagaccgaagccgtgaccctgcaggacgtgagaggccgggactaccagaacgccatgcgggtgtggtccaacatccctggactgaaaagcaagcacgcacctctgacccctaaagaagaggagtacctgcaggcccaggtgcggagcagaagcaagctggacgcccctaaggtggatctgctggtgaagaattgcctcctgcccctgagagagtacttcaagtatttcagccagaatagtctgcccctgggaggcagcggcggcggcgccctggtgacatttgaggacgtcgccgtgcggttcacccaggaggaatgggctctgctggatccttctcagaaaatcctgtaccgggacgtgatgagagagacataccggaatctgacctccgtgggcatcaactgggaatgttgggaccttgaagcctgcttcagaagcctgggaagaaacctgagagtgcaggtggtgaagagaaagtgcgagctgaccaacagcggcccctgcgccgagggcggcccaagcagcggcgcccctcctcccagcggcggcagcccagccggctccccaacctctaccgaggagggcacctctgagtccgccacccccgagagcggccctggcacctccaccgagcccagcgagggcagcgcacccggcagccctgccggcagccccacctccacagaggagggaaccagcaccgagcccagcgaaggcagcgccccaggcaccagcaccgagcctagtgagcaggagattaaacggatcaacaagatcagaagaagacttgtgaaagacagcaacaccaagaaggccggcaagacaggccccatgaaaaccctgctggttagagtgatgacacccgatctgagagagcggctggaaaacctgagaaagaagcctgaaaatatcccccagcccatcagcaatacatctagagccaacctgaataagctgctgaccgattacaccgaaatgaagaaggcgatcctgcatgtgtactgggaagagttccagaaggaccctgtgggcctgatgagccgggtggcccagcctgccagcaagaagatcgatcagaacaagctgaaacctgagatggacgagaagggcaacctgaccaccgccggctttgcctgctctcagtgtggccagcccctgttcgtgtacaagctggagcaggtgtctgagaagggcaaggcttacaccaactacttcggacggtgcaatgtggccgagcacgaaaagctgatcctgctggcccagctgaagcccgagaaggatagcgacgaagccgtgacatatagcctgggaaagtttgggcagagggccctggatttctacagcattcatgtgaccaaggagtccacccaccccgtgaagcccctggcccagatcgccggaaacagatacgcctccggacctgtgggaaaggccctgagcgacgcatgtatgggcacaatcgcctccttcctgtctaagtaccaggacatcatcatcgaacaccagaaggtggtgaagggcaaccagaagagactggagagcctgcgggagctggccggcaaggaaaacctggaataccctagcgtgaccctgccacctcagcctcacaccaaggagggcgttgatgcctacaacgaagtgatcgcccgggtgcgaatgtgggtgaacctgaacctgtggcagaagctgaagctaagcagagatgatgccaagcctctgctgagactgaagggattcccttcctttcctctggtcgagagacaggccaacgaagtggactggtgggacatggtgtgtaacgtgaagaagctgatcaacgagaaaaaggaggatggcaaggtgttttggcagaatctggctggctacaagagacaggaagccctgagaccatacctgagcagcgaggaagatcggaagaagggaaagaaattcgctcggtaccagctgggcgacctgctgctgcacctggaaaagaagcacggcgaggactggggaaaggtgtacgacgaggcctgggagcggattgacaagaaagtggaaggcctgagcaagcacatcaagctggaagaggaacggagaagcgaggacgcccagagcaaggccgccctgaccgactggctgcgggctaaggccagcttcgtgatcgagggcctgaaggaggccgacaaggacgagttctgcagatgcgagctgaagctgcagaagtggtacggggacctgcggggaaagcccttcgccatcgaagccgagaacagcatcctggacatcagcggcttcagcaagcagtacaactgtgccttcatctggcagaaggacggcgtgaagaagctgaacctgtacctgatcatcaactacttcaagggcggcaagctgcggttcaagaagatcaaacctgaagccttcgaagccaacagattctacaccgtgatcaacaaaaagagcggcgagatcgtgcccatggaggtgaacttcaacttcgacgaccccaacctgatcatcctgcctctggcctttggcaagagacagggcagagaattcatctggaacgacctgctgtccctggaaaccggcagcctgaagctggccaacggaagagtgatcgagaagacactgtacaacagaagaacccggcaggatgagcctgccctgttcgtggccctgaccttcgagcggcgggaggtcctggactcctccaatatcaaaccaatgaacctgatcggcgtggcaagaggcgaaaacatccccgccgtgatcgccctgaccgaccccgagggctgcccactgagccggtttaaggatagcctgggaaacccaacccacatcctgagaatcggcgagagctataaggagaagcagcggaccatccaggccaagaaggaggtggagcagcggagagccggcggctacagccggaagtacgccagcaaagccaagaatctggcagacgatatggtgagaaacaccgctagagatctgctgtactacgccgtgacccaggatgccatgctgatcttcgccaacctgagccggggcttcggccggcagggcaagcggaccttcatggccgagagacagtacacacggatggaggactggctgaccgccaagctggcctacgagggcctgagcaagacctacctgtccaagacactggcccagtacacctccaagacatgcagcaactgtgggtttaccatcaccagcgccgactacgacagggtgctggagaagctgaagaagacagcaacaggctggatgaccacaattaacggcaaggagctgaaggtggagggccagattacctactacaacagatacaagagacagaacgtagtcaaggacctgtccgtcgagctggatagactgagcgaagaatctgtgaacaacgacatctcctcctggacaaagggcagaagcggagaagctctgagcctcctgaagaaaagattctcccatagacccgtgcaggagaagttcgtgtgcctgaactgcggcttcgagacacacgcagccgagcaagccgccctgaacatcgccagatcctggctgttcctgcggagccaggagtacaagaaataccagacaaacaagacaaccggcaacaccgataagagagccttcgtcgagacctggcagtccttttaccggaagaagcttaaggaggtgtggaaacctgccgtgcggtctggcggatctggcggaggctcccagctgaccttcgaggacgtggccctgagcttcagcaaggaggagtggcagatcatggaccccaaccagaagaccctgtacatcgacgtgatgcaggagatctacgagaccgtgaccagcctgggcctgaagctgaagaacgacaccggcaacgaccagcccgtgagcctgagcaccagcgagatccagcccagcggctgcaaggtgctgaggaaggccaggatgaaggtggcccagaccaccggcggcccaagcagcggcgcccctcctcccagcggcggcagcccagccggctccccaacctctaccgaggagggcacctctgagtccgccacccccgagagcggccctggcacctccaccgagcccagcgagggcagcgcacccggcagccctgccggcagccccacctccacagaggagggaaccagcaccgagcccagcgaaggcagcgccccaggcaccagcaccgagcctagtgagcaggagattaaacggatcaacaagatcagaagaagacttgtgaaagacagcaacaccaagaaggccggcaagacaggccccatgaaaaccctgctggttagagtgatgacacccgatctgagagagcggctggaaaacctgagaaagaagcctgaaaatatcccccagcccatcagcaatacatctagagccaacctgaataagctgctgaccgattacaccgaaatgaagaaggcgatcctgcatgtgtactgggaagagttccagaaggaccctgtgggcctgatgagccgggtggcccagcctgccagcaagaagatcgatcagaacaagctgaaacctgagatggacgagaagggcaacctgaccaccgccggctttgcctgctctcagtgtggccagcccctgttcgtgtacaagctggagcaggtgtctgagaagggcaaggcttacaccaactacttcggacggtgcaatgtggccgagcacgaaaagctgatcctgctggcccagctgaagcccgagaaggatagcgacgaagccgtgacatatagcctgggaaagtttgggcagagggccctggatttctacagcattcatgtgaccaaggagtccacccaccccgtgaagcccctggcccagatcgccggaaacagatacgcctccggacctgtgggaaaggccctgagcgacgcatgtatgggcacaatcgcctccttcctgtctaagtaccaggacatcatcatcgaacaccagaaggtggtgaagggcaaccagaagagactggagagcctgcgggagctggccggcaaggaaaacctggaataccctagcgtgaccctgccacctcagcctcacaccaaggagggcgttgatgcctacaacgaagtgatcgcccgggtgcgaatgtgggtgaacctgaacctgtggcagaagctgaagctaagcagagatgatgccaagcctctgctgagactgaagggattcccttcctttcctctggtcgagagacaggccaacgaagtggactggtgggacatggtgtgtaacgtgaagaagctgatcaacgagaaaaaggaggatggcaaggtgttttggcagaatctggctggctacaagagacaggaagccctgagaccatacctgagcagcgaggaagatcggaagaagggaaagaaattcgctcggtaccagctgggcgacctgctgctgcacctggaaaagaagcacggcgaggactggggaaaggtgtacgacgaggcctgggagcggattgacaagaaagtggaaggcctgagcaagcacatcaagctggaagaggaacggagaagcgaggacgcccagagcaaggccgccctgaccgactggctgcgggctaaggccagcttcgtgatcgagggcctgaaggaggccgacaaggacgagttctgcagatgcgagctgaagctgcagaagtggtacggggacctgcggggaaagcccttcgccatcgaagccgagaacagcatcctggacatcagcggcttcagcaagcagtacaactgtgccttcatctggcagaaggacggcgtgaagaagctgaacctgtacctgatcatcaactacttcaagggcggcaagctgcggttcaagaagatcaaacctgaagccttcgaagccaacagattctacaccgtgatcaacaaaaagagcggcgagatcgtgcccatggaggtgaacttcaacttcgacgaccccaacctgatcatcctgcctctggcctttggcaagagacagggcagagaattcatctggaacgacctgctgtccctggaaaccggcagcctgaagctggccaacggaagagtgatcgagaagacactgtacaacagaagaacccggcaggatgagcctgccctgttcgtggccctgaccttcgagcggcgggaggtcctggactcctccaatatcaaaccaatgaacctgatcggcgtggcaagaggcgaaaacatccccgccgtgatcgccctgaccgaccccgagggctgcccactgagccggtttaaggatagcctgggaaacccaacccacatcctgagaatcggcgagagctataaggagaagcagcggaccatccaggccaagaaggaggtggagcagcggagagccggcggctacagccggaagtacgccagcaaagccaagaatctggcagacgatatggtgagaaacaccgctagagatctgctgtactacgccgtgacccaggatgccatgctgatcttcgccaacctgagccggggcttcggccggcagggcaagcggaccttcatggccgagagacagtacacacggatggaggactggctgaccgccaagctggcctacgagggcctgagcaagacctacctgtccaagacactggcccagtacacctccaagacatgcagcaactgtgggtttaccatcaccagcgccgactacgacagggtgctggagaagctgaagaagacagcaacaggctggatgaccacaattaacggcaaggagctgaaggtggagggccagattacctactacaacagatacaagagacagaacgtagtcaaggacctgtccgtcgagctggatagactgagcgaagaatctgtgaacaacgacatctcctcctggacaaagggcagaagcggagaagctctgagcctcctgaagaaaagattctcccatagacccgtgcaggagaagttcgtgtgcctgaactgcggcttcgagacacacgcagccgagcaagccgccctgaacatcgccagatcctggctgttcctgcggagccaggagtacaagaaataccagacaaacaagacaaccggcaacaccgataagagagccttcgtcgagacctggcagtccttttaccggaagaagcttaaggaggtgtggaaacctgccgtgcggtctggcggatctggcggaggctcctcagctgaccttcgaggacgtggccctgagcttcagcaaggaggagtggcagatcatggaccccaaccagaagaccctgtacatcgacgtgatgcaggagatctacgagaccgtgaccagcctgggcctgaagctgaagaacgacaccggcaacgaccagcccgtgagcctgagcaccagcgagatccagcccagcggctgcaaggtgctgaggaaggccaggatgaaggtggcccagaccaccggatctggctccggcagcggccccaagaaaaagagaaaagtctaagctgccttctgcggggcttgccttctggccatgcccttcttctctcccttgcacctgtacctcttggtctttgaataaagcctgagtaggaaggctagcaaaaaaaaaaaaaaaaaaaaaaaaaaaaaaaaaaaaaaaaaaaaaaaaaaaaaaaaaaaaaaaaaaaaaaaaaaaaaaaa

SEQ ID NO: 16111 - RNA, 9485 nt, synthetic construct
  source 1..9485: mol_type = other RNA
aggaaataagagagaaaagaagagtaagaagaaatataagagccaccatggcccctaagaagaagcgtaaagtgagccggatggaacgcctcgtctacgaggtgcggcagaagtgcagaaacatcgaggacatctgcatctcctgcggatctctgaacgtgaccctggagcacccactgttcatcggcggcatgtgccagaactgtaaaaactgttttctggagtgtgcctatcaatacgacgatgacggctaccagagctactgcaccatctgttgcggcggaagagaggtgctgatgtgtggaaataacaactgctgccggtgcttctgcgtggaatgcgtggacctgctggtgggccccggcgccgcccaggccgctattaaggaagatccttggaactgctacatgtgcggccacaagggcacatacggcctgctgagacggagagaggactggcctagcagactgcagatgttcttcgccaataaccacgaccaggagttcgacccccctaaggtgtaccctcccgtccccgccgagaagagaaagcccatccgggtcctgagcctgttcgatggcatcgccaccggtctgctggtgctgaaggacctgggcatccaggtggataggtacattgcctccgaggtgtgcgaggactccatcaccgtgggaatggtgcgtcatcagggcaagatcatgtacgtgggcgacgtgcggagcgtgacacagaagcatatccaggagtggggccctttcgacctggtgatcggcggcagcccttgcaatgacctgagcatcgtgaacccagcccggaagggcctgtacgagggaaccggcagactgttcttcgagttttacagactgctgcacgacgcccggcctaaggaaggcgacgaccggcccttcttttggctgttcgagaatgtggtggccatgggagtcagcgacaagcgggatattagccggttcctggagagcaaccccgtgatgatcgatgccaaggaagtgagcgccgcccaccgggccagatacttctggggcaatctgcctggcatgaacagacccctggccagcaccgtgaacgacaagctggagctgcaggagtgcctggagcacggccggatcgccaagttcagcaaggtgagaaccatcaccacccgaagcaacagcatcaaacaaggcaaggaccagcactttcctgtgttcatgaacgagaaggaggacatcctgtggtgtaccgagatggagagagtgttcgggttcccagtccactacacagatgtcagcaacatgtctagactggccagacagagactgctgggaagaagctggtccgtccctgtgatcagacacctgttcgcccctctgaaggagtacttcgcctgcgtgagcagcggcaacagcaacgccaacagccggggccccagcttctctagcggcctggtgccactgtccctgagagggagccacatgggccccatggagatctacaaaaccgtgagcgcctggaagcggcagcctgtgcgcgtgctgagcctgtttcggaatatcgataaagtcctgaaaagcctgggattcctggagagcggctctggctccggcggtggcaccctgaagtacgtggaggatgtgacaaacgtggtcagacgggatgtggagaagtggggccccttcgatctggtgtacggcagcacccaacccctgggcagctcttgtgaccggtgccctggctggtacatgtttcagttccaccggatcctgcagtacgccctgccgagacaggagtcccagcggccattcttttggattttcatggacaacttgctgctgaccgaggatgaccaggaaactaccactcggttcctgcagaccgaagccgtgaccctgcaggacgtgagaggccgggactaccagaacgccatgcgggtgtggtccaacatccctggactgaaaagcaagcacgcacctctgacccctaaagaagaggagtacctgcaggcccaggtgcggagcagaagcaagctggacgcccctaaggtggatctgctggtgaagaattgcctcctgcccctgagagagtacttcaagtatttcagccagaatagtctgcccctgggaggcagcggcggcggcgccctggtgacatttgaggacgtcgccgtgcggttcacccaggaggaatgggctctgctggatccttctcagaaaatcctgtaccgggacgtgatgagagagacataccggaatctgacctccgtgggcatcaactgggaatgttgggaccttgaagcctgcttcagaagcctgggaagaaacctgagagtgcaggtggtgaagagaaagtgcgagctgaccaacagcggcccctgcgccgagggcggcccaagcagcggcgcccctcctcccagcggcggcagcccagccggctccccaacctctaccgaggagggcacctctgagtccgccacccccgagagcggccctggcacctccaccgagcccagcgagggcagcgcacccggcagccctgccggcagccccacctccacagaggagggaaccagcaccgagcccagcgaaggcagcgccccaggcaccagcaccgagcctagtgagcaggagattaaacggatcaacaagatcagaagaagacttgtgaaagacagcaacaccaagaaggccggcaagacaggccccatgaaaaccctgctggttagagtgatgacacccgatctgagagagcggctggaaaacctgagaaagaagcctgaaaatatcccccagcccatcagcaatacatctagagccaacctgaataagctgctgaccgattacaccgaaatgaagaaggcgatcctgcatgtgtactgggaagagttccagaaggaccctgtgggcctgatgagccgggtggcccagcctgccagcaagaagatcgatcagaacaagctgaaacctgagatggacgagaagggcaacctgaccaccgccggctttgcctgctctcagtgtggccagcccctgttcgtgtacaagctggagcaggtgtctgagaagggcaaggcttacaccaactacttcggacggtgcaatgtggccgagcacgaaaagctgatcctgctggcccagctgaagcccgagaaggatagcgacgaagccgtgacatatagcctgggaaagtttgggcagagggccctggatttctacagcattcatgtgaccaaggagtccacccaccccgtgaagcccctggcccagatcgccggaaacagatacgcctccggacctgtgggaaaggccctgagcgacgcatgtatgggcacaatcgcctccttcctgtctaagtaccaggacatcatcatcgaacaccagaaggtggtgaagggcaaccagaagagactggagagcctgcgggagctggccggcaaggaaaacctggaataccctagcgtgaccctgccacctcagcctcacaccaaggagggcgttgatgcctacaacgaagtgatcgcccgggtgcgaatgtgggtgaacctgaacctgtggcagaagctgaagctaagcagagatgatgccaagcctctgctgagactgaagggattcccttcctttcctctggtcgagagacaggccaacgaagtggactggtgggacatggtgtgtaacgtgaagaagctgatcaacgagaaaaaggaggatggcaaggtgttttggcagaatctggctggctacaagagacaggaagccctgagaccatacctgagcagcgaggaagatcggaagaagggaaagaaattcgctcggtaccagctgggcgacctgctgctgcacctggaaaagaagcacggcgaggactggggaaaggtgtacgacgaggcctgggagcggattgacaagaaagtggaaggcctgagcaagcacatcaagctggaagaggaacggagaagcgaggacgcccagagcaaggccgccctgaccgactggctgcgggctaaggccagcttcgtgatcgagggcctgaaggaggccgacaaggacgagttctgcagatgcgagctgaagctgcagaagtggtacggggacctgcggggaaagcccttcgccatcgaagccgagaacagcatcctggacatcagcggcttcagcaagcagtacaactgtgccttcatctggcagaaggacggcgtgaagaagctgaacctgtacctgatcatcaactacttcaagggcggcaagctgcggttcaagaagatcaaacctgaagccttcgaagccaacagattctacaccgtgatcaacaaaaagagcggcgagatcgtgcccatggaggtgaacttcaacttcgacgaccccaacctgatcatcctgcctctggcctttggcaagagacagggcagagaattcatctggaacgacctgctgtccctggaaaccggcagcctgaagctggccaacggaagagtgatcgagaagacactgtacaacagaagaacccggcaggatgagcctgccctgttcgtggccctgaccttcgagcggcgggaggtcctggactcctccaatatcaaaccaatgaacctgatcggcgtggcaagaggcgaaaacatccccgccgtgatcgccctgaccgaccccgagggctgcccactgagccggtttaaggatagcctgggaaacccaacccacatcctgagaatcggcgagagctataaggagaagcagcggaccatccaggccaagaaggaggtggagcagcggagagccggcggctacagccggaagtacgccagcaaagccaagaatctggcagacgatatggtgagaaacaccgctagagatctgctgtactacgccgtgacccaggatgccatgctgatcttcgccaacctgagccggggcttcggccggcagggcaagcggaccttcatggccgagagacagtacacacggatggaggactggctgaccgccaagctggcctacgagggcctgagcaagacctacctgtccaagacactggcccagtacacctccaagacatgcagcaactgtgggtttaccatcaccagcgccgactacgacagggtgctggagaagctgaagaagacagcaacaggctggatgaccacaattaacggcaaggagctgaaggtggagggccagattacctactacaacagatacaagagacagaacgtagtcaaggacctgtccgtcgagctggatagactgagcgaagaatctgtgaacaacgacatctcctcctggacaaagggcagaagcggagaagctctgagcctcctgaagaaaagattctcccatagacccgtgcaggagaagttcgtgtgcctgaactgcggcttcgagacacacgcagccgagcaagccgccctgaacatcgccagatcctggctgttcctgcggagccaggagtacaagaaataccagacaaacaagacaaccggcaacaccgataagagagccttcgtcgagacctggcagtccttttaccggaagaagcttaaggaggtgtggaaacctgccgtgcggtctggcggatctggcggaggctcccagctgcaggagaccatgaccttcaaggacgtggaggtgaccttcagccaggacgagtggggctggctggacagcgcccagaggaacctgtacagggacgtgatgctggagaactacaggaacatggccagcctggtgggccccttcaccaagcccgccctgatcagctggctggaggccagggagccctggggcctgaacatgcaggccgcccagcccaagggcaaccccgtggccgcccccggcggcccaagcagcggcgcccctcctcccagcggcggcagcccagccggctccccaacctctaccgaggagggcacctctgagtccgccacccccgagagcggccctggcacctccaccgagcccagcgagggcagcgcacccggcagccctgccggcagccccacctccacagaggagggaaccagcaccgagcccagcgaaggcagcgccccaggcaccagcaccgagcctagtgagcaggagattaaacggatcaacaagatcagaagaagacttgtgaaagacagcaacaccaagaaggccggcaagacaggccccatgaaaaccctgctggttagagtgatgacacccgatctgagagagcggctggaaaacctgagaaagaagcctgaaaatatcccccagcccatcagcaatacatctagagccaacctgaataagctgctgaccgattacaccgaaatgaagaaggcgatcctgcatgtgtactgggaagagttccagaaggaccctgtgggcctgatgagccgggtggcccagcctgccagcaagaagatcgatcagaacaagctgaaacctgagatggacgagaagggcaacctgaccaccgccggctttgcctgctctcagtgtggccagcccctgttcgtgtacaagctggagcaggtgtctgagaagggcaaggcttacaccaactacttcggacggtgcaatgtggccgagcacgaaaagctgatcctgctggcccagctgaagcccgagaaggatagcgacgaagccgtgacatatagcctgggaaagtttgggcagagggccctggatttctacagcattcatgtgaccaaggagtccacccaccccgtgaagcccctggcccagatcgccggaaacagatacgcctccggacctgtgggaaaggccctgagcgacgcatgtatgggcacaatcgcctccttcctgtctaagtaccaggacatcatcatcgaacaccagaaggtggtgaagggcaaccagaagagactggagagcctgcgggagctggccggcaaggaaaacctggaataccctagcgtgaccctgccacctcagcctcacaccaaggagggcgttgatgcctacaacgaagtgatcgcccgggtgcgaatgtgggtgaacctgaacctgtggcagaagctgaagctaagcagagatgatgccaagcctctgctgagactgaagggattcccttcctttcctctggtcgagagacaggccaacgaagtggactggtgggacatggtgtgtaacgtgaagaagctgatcaacgagaaaaaggaggatggcaaggtgttttggcagaatctggctggctacaagagacaggaagccctgagaccatacctgagcagcgaggaagatcggaagaagggaaagaaattcgctcggtaccagctgggcgacctgctgctgcacctggaaaagaagcacggcgaggactggggaaaggtgtacgacgaggcctgggagcggattgacaagaaagtggaaggcctgagcaagcacatcaagctggaagaggaacggagaagcgaggacgcccagagcaaggccgccctgaccgactggctgcgggctaaggccagcttcgtgatcgagggcctgaaggaggccgacaaggacgagttctgcagatgcgagctgaagctgcagaagtggtacggggacctgcggggaaagcccttcgccatcgaagccgagaacagcatcctggacatcagcggcttcagcaagcagtacaactgtgccttcatctggcagaaggacggcgtgaagaagctgaacctgtacctgatcatcaactacttcaagggcggcaagctgcggttcaagaagatcaaacctgaagccttcgaagccaacagattctacaccgtgatcaacaaaaagagcggcgagatcgtgcccatggaggtgaacttcaacttcgacgaccccaacctgatcatcctgcctctggcctttggcaagagacagggcagagaattcatctggaacgacctgctgtccctggaaaccggcagcctgaagctggccaacggaagagtgatcgagaagacactgtacaacagaagaacccggcaggatgagcctgccctgttcgtggccctgaccttcgagcggcgggaggtcctggactcctccaatatcaaaccaatgaacctgatcggcgtggcaagaggcgaaaacatccccgccgtgatcgccctgaccgaccccgagggctgcccactgagccggtttaaggatagcctgggaaacccaacccacatcctgagaatcggcgagagctataaggagaagcagcggaccatccaggccaagaaggaggtggagcagcggagagccggcggctacagccggaagtacgccagcaaagccaagaatctggcagacgatatggtgagaaacaccgctagagatctgctgtactacgccgtgacccaggatgccatgctgatcttcgccaacctgagccggggcttcggccggcagggcaagcggaccttcatggccgagagacagtacacacggatggaggactggctgaccgccaagctggcctacgagggcctgagcaagacctacctgtccaagacactggcccagtacacctccaagacatgcagcaactgtgggtttaccatcaccagcgccgactacgacagggtgctggagaagctgaagaagacagcaacaggctggatgaccacaattaacggcaaggagctgaaggtggagggccagattacctactacaacagatacaagagacagaacgtagtcaaggacctgtccgtcgagctggatagactgagcgaagaatctgtgaacaacgacatctcctcctggacaaagggcagaagcggagaagctctgagcctcctgaagaaaagattctcccatagacccgtgcaggagaagttcgtgtgcctgaactgcggcttcgagacacacgcagccgagcaagccgccctgaacatcgccagatcctggctgttcctgcggagccaggagtacaagaaataccagacaaacaagacaaccggcaacaccgataagagagccttcgtcgagacctggcagtccttttaccggaagaagcttaaggaggtgtggaaacctgccgtgcggtctggcggatctggcggaggctcctcagctgcaggagaccatgaccttcaaggacgtggaggtgaccttcagccaggacgagtggggctggctggacagcgcccagaggaacctgtacagggacgtgatgctggagaactacaggaacatggccagcctggtgggccccttcaccaagcccgccctgatcagctggctggaggccagggagccctggggcctgaacatgcaggccgcccagcccaagggcaaccccgtggccgcccccggatctggctccggcagcggccccaagaaaaagagaaaagtctaagctgccttctgcggggcttgccttctggccatgcccttcttctctcccttgcacctgtacctcttggtctttgaataaagcctgagtaggaaggctagcaaaaaaaaaaaaaaaaaaaaaaaaaaaaaaaaaaaaaaaaaaaaaaaaaaaaaaaaaaaaaaaaaaaaaaaaaaaaaaaa

SEQ ID NO: 16112 - RNA, 9485 nt, synthetic construct
  source 1..9485: mol_type = other RNA
aggaaataagagagaaaagaagagtaagaagaaatataagagccaccatggcccctaagaagaagcgtaaagtgagccggatggaacgcctcgtctacgaggtgcggcagaagtgcagaaacatcgaggacatctgcatctcctgcggatctctgaacgtgaccctggagcacccactgttcatcggcggcatgtgccagaactgtaaaaactgttttctggagtgtgcctatcaatacgacgatgacggctaccagagctactgcaccatctgttgcggcggaagagaggtgctgatgtgtggaaataacaactgctgccggtgcttctgcgtggaatgcgtggacctgctggtgggccccggcgccgcccaggccgctattaaggaagatccttggaactgctacatgtgcggccacaagggcacatacggcctgctgagacggagagaggactggcctagcagactgcagatgttcttcgccaataaccacgaccaggagttcgacccccctaaggtgtaccctcccgtccccgccgagaagagaaagcccatccgggtcctgagcctgttcgatggcatcgccaccggtctgctggtgctgaaggacctgggcatccaggtggataggtacattgcctccgaggtgtgcgaggactccatcaccgtgggaatggtgcgtcatcagggcaagatcatgtacgtgggcgacgtgcggagcgtgacacagaagcatatccaggagtggggccctttcgacctggtgatcggcggcagcccttgcaatgacctgagcatcgtgaacccagcccggaagggcctgtacgagggaaccggcagactgttcttcgagttttacagactgctgcacgacgcccggcctaaggaaggcgacgaccggcccttcttttggctgttcgagaatgtggtggccatgggagtcagcgacaagcgggatattagccggttcctggagagcaaccccgtgatgatcgatgccaaggaagtgagcgccgcccaccgggccagatacttctggggcaatctgcctggcatgaacagacccctggccagcaccgtgaacgacaagctggagctgcaggagtgcctggagcacggccggatcgccaagttcagcaaggtgagaaccatcaccacccgaagcaacagcatcaaacaaggcaaggaccagcactttcctgtgttcatgaacgagaaggaggacatcctgtggtgtaccgagatggagagagtgttcgggttcccagtccactacacagatgtcagcaacatgtctagactggccagacagagactgctgggaagaagctggtccgtccctgtgatcagacacctgttcgcccctctgaaggagtacttcgcctgcgtgagcagcggcaacagcaacgccaacagccggggccccagcttctctagcggcctggtgccactgtccctgagagggagccacatgggccccatggagatctacaaaaccgtgagcgcctggaagcggcagcctgtgcgcgtgctgagcctgtttcggaatatcgataaagtcctgaaaagcctgggattcctggagagcggctctggctccggcggtggcaccctgaagtacgtggaggatgtgacaaacgtggtcagacgggatgtggagaagtggggccccttcgatctggtgtacggcagcacccaacccctgggcagctcttgtgaccggtgccctggctggtacatgtttcagttccaccggatcctgcagtacgccctgccgagacaggagtcccagcggccattcttttggattttcatggacaacttgctgctgaccgaggatgaccaggaaactaccactcggttcctgcagaccgaagccgtgaccctgcaggacgtgagaggccgggactaccagaacgccatgcgggtgtggtccaacatccctggactgaaaagcaagcacgcacctctgacccctaaagaagaggagtacctgcaggcccaggtgcggagcagaagcaagctggacgcccctaaggtggatctgctggtgaagaattgcctcctgcccctgagagagtacttcaagtatttcagccagaatagtctgcccctgggaggcagcggcggcggcgccctggtgacatttgaggacgtcgccgtgcggttcacccaggaggaatgggctctgctggatccttctcagaaaatcctgtaccgggacgtgatgagagagacataccggaatctgacctccgtgggcatcaactgggaatgttgggaccttgaagcctgcttcagaagcctgggaagaaacctgagagtgcaggtggtgaagagaaagtgcgagctgaccaacagcggcccctgcgccgagggcggcccaagcagcggcgcccctcctcccagcggcggcagcccagccggctccccaacctctaccgaggagggcacctctgagtccgccacccccgagagcggccctggcacctccaccgagcccagcgagggcagcgcacccggcagccctgccggcagccccacctccacagaggagggaaccagcaccgagcccagcgaaggcagcgccccaggcaccagcaccgagcctagtgagcaggagattaaacggatcaacaagatcagaagaagacttgtgaaagacagcaacaccaagaaggccggcaagacaggccccatgaaaaccctgctggttagagtgatgacacccgatctgagagagcggctggaaaacctgagaaagaagcctgaaaatatcccccagcccatcagcaatacatctagagccaacctgaataagctgctgaccgattacaccgaaatgaagaaggcgatcctgcatgtgtactgggaagagttccagaaggaccctgtgggcctgatgagccgggtggcccagcctgccagcaagaagatcgatcagaacaagctgaaacctgagatggacgagaagggcaacctgaccaccgccggctttgcctgctctcagtgtggccagcccctgttcgtgtacaagctggagcaggtgtctgagaagggcaaggcttacaccaactacttcggacggtgcaatgtggccgagcacgaaaagctgatcctgctggcccagctgaagcccgagaaggatagcgacgaagccgtgacatatagcctgggaaagtttgggcagagggccctggatttctacagcattcatgtgaccaaggagtccacccaccccgtgaagcccctggcccagatcgccggaaacagatacgcctccggacctgtgggaaaggccctgagcgacgcatgtatgggcacaatcgcctccttcctgtctaagtaccaggacatcatcatcgaacaccagaaggtggtgaagggcaaccagaagagactggagagcctgcgggagctggccggcaaggaaaacctggaataccctagcgtgaccctgccacctcagcctcacaccaaggagggcgttgatgcctacaacgaagtgatcgcccgggtgcgaatgtgggtgaacctgaacctgtggcagaagctgaagctaagcagagatgatgccaagcctctgctgagactgaagggattcccttcctttcctctggtcgagagacaggccaacgaagtggactggtgggacatggtgtgtaacgtgaagaagctgatcaacgagaaaaaggaggatggcaaggtgttttggcagaatctggctggctacaagagacaggaagccctgagaccatacctgagcagcgaggaagatcggaagaagggaaagaaattcgctcggtaccagctgggcgacctgctgctgcacctggaaaagaagcacggcgaggactggggaaaggtgtacgacgaggcctgggagcggattgacaagaaagtggaaggcctgagcaagcacatcaagctggaagaggaacggagaagcgaggacgcccagagcaaggccgccctgaccgactggctgcgggctaaggccagcttcgtgatcgagggcctgaaggaggccgacaaggacgagttctgcagatgcgagctgaagctgcagaagtggtacggggacctgcggggaaagcccttcgccatcgaagccgagaacagcatcctggacatcagcggcttcagcaagcagtacaactgtgccttcatctggcagaaggacggcgtgaagaagctgaacctgtacctgatcatcaactacttcaagggcggcaagctgcggttcaagaagatcaaacctgaagccttcgaagccaacagattctacaccgtgatcaacaaaaagagcggcgagatcgtgcccatggaggtgaacttcaacttcgacgaccccaacctgatcatcctgcctctggcctttggcaagagacagggcagagaattcatctggaacgacctgctgtccctggaaaccggcagcctgaagctggccaacggaagagtgatcgagaagacactgtacaacagaagaacccggcaggatgagcctgccctgttcgtggccctgaccttcgagcggcgggaggtcctggactcctccaatatcaaaccaatgaacctgatcggcgtggcaagaggcgaaaacatccccgccgtgatcgccctgaccgaccccgagggctgcccactgagccggtttaaggatagcctgggaaacccaacccacatcctgagaatcggcgagagctataaggagaagcagcggaccatccaggccaagaaggaggtggagcagcggagagccggcggctacagccggaagtacgccagcaaagccaagaatctggcagacgatatggtgagaaacaccgctagagatctgctgtactacgccgtgacccaggatgccatgctgatcttcgccaacctgagccggggcttcggccggcagggcaagcggaccttcatggccgagagacagtacacacggatggaggactggctgaccgccaagctggcctacgagggcctgagcaagacctacctgtccaagacactggcccagtacacctccaagacatgcagcaactgtgggtttaccatcaccagcgccgactacgacagggtgctggagaagctgaagaagacagcaacaggctggatgaccacaattaacggcaaggagctgaaggtggagggccagattacctactacaacagatacaagagacagaacgtagtcaaggacctgtccgtcgagctggatagactgagcgaagaatctgtgaacaacgacatctcctcctggacaaagggcagaagcggagaagctctgagcctcctgaagaaaagattctcccatagacccgtgcaggagaagttcgtgtgcctgaactgcggcttcgagacacacgcagccgagcaagccgccctgaacatcgccagatcctggctgttcctgcggagccaggagtacaagaaataccagacaaacaagacaaccggcaacaccgataagagagccttcgtcgagacctggcagtccttttaccggaagaagcttaaggaggtgtggaaacctgccgtgcggtctggcggatctggcggaggctccttccagggcagcgtgagcttcaaggacgtgaccgtgggcttcaccctggaggagtggcagcacctggacagcacccagaggagcctgtacagggacgtgatgctggagaactacagcaacctggtgagcctgggctactgcgtgaccaagcccgaggtgatcttcaggctggagcagggcgaggagccctggatcctggaggaggagttccccagccagagcttccccgagagctgggagaccggcggcccaagcagcggcgcccctcctcccagcggcggcagcccagccggctccccaacctctaccgaggagggcacctctgagtccgccacccccgagagcggccctggcacctccaccgagcccagcgagggcagcgcacccggcagccctgccggcagccccacctccacagaggagggaaccagcaccgagcccagcgaaggcagcgccccaggcaccagcaccgagcctagtgagcaggagattaaacggatcaacaagatcagaagaagacttgtgaaagacagcaacaccaagaaggccggcaagacaggccccatgaaaaccctgctggttagagtgatgacacccgatctgagagagcggctggaaaacctgagaaagaagcctgaaaatatcccccagcccatcagcaatacatctagagccaacctgaataagctgctgaccgattacaccgaaatgaagaaggcgatcctgcatgtgtactgggaagagttccagaaggaccctgtgggcctgatgagccgggtggcccagcctgccagcaagaagatcgatcagaacaagctgaaacctgagatggacgagaagggcaacctgaccaccgccggctttgcctgctctcagtgtggccagcccctgttcgtgtacaagctggagcaggtgtctgagaagggcaaggcttacaccaactacttcggacggtgcaatgtggccgagcacgaaaagctgatcctgctggcccagctgaagcccgagaaggatagcgacgaagccgtgacatatagcctgggaaagtttgggcagagggccctggatttctacagcattcatgtgaccaaggagtccacccaccccgtgaagcccctggcccagatcgccggaaacagatacgcctccggacctgtgggaaaggccctgagcgacgcatgtatgggcacaatcgcctccttcctgtctaagtaccaggacatcatcatcgaacaccagaaggtggtgaagggcaaccagaagagactggagagcctgcgggagctggccggcaaggaaaacctggaataccctagcgtgaccctgccacctcagcctcacaccaaggagggcgttgatgcctacaacgaagtgatcgcccgggtgcgaatgtgggtgaacctgaacctgtggcagaagctgaagctaagcagagatgatgccaagcctctgctgagactgaagggattcccttcctttcctctggtcgagagacaggccaacgaagtggactggtgggacatggtgtgtaacgtgaagaagctgatcaacgagaaaaaggaggatggcaaggtgttttggcagaatctggctggctacaagagacaggaagccctgagaccatacctgagcagcgaggaagatcggaagaagggaaagaaattcgctcggtaccagctgggcgacctgctgctgcacctggaaaagaagcacggcgaggactggggaaaggtgtacgacgaggcctgggagcggattgacaagaaagtggaaggcctgagcaagcacatcaagctggaagaggaacggagaagcgaggacgcccagagcaaggccgccctgaccgactggctgcgggctaaggccagcttcgtgatcgagggcctgaaggaggccgacaaggacgagttctgcagatgcgagctgaagctgcagaagtggtacggggacctgcggggaaagcccttcgccatcgaagccgagaacagcatcctggacatcagcggcttcagcaagcagtacaactgtgccttcatctggcagaaggacggcgtgaagaagctgaacctgtacctgatcatcaactacttcaagggcggcaagctgcggttcaagaagatcaaacctgaagccttcgaagccaacagattctacaccgtgatcaacaaaaagagcggcgagatcgtgcccatggaggtgaacttcaacttcgacgaccccaacctgatcatcctgcctctggcctttggcaagagacagggcagagaattcatctggaacgacctgctgtccctggaaaccggcagcctgaagctggccaacggaagagtgatcgagaagacactgtacaacagaagaacccggcaggatgagcctgccctgttcgtggccctgaccttcgagcggcgggaggtcctggactcctccaatatcaaaccaatgaacctgatcggcgtggcaagaggcgaaaacatccccgccgtgatcgccctgaccgaccccgagggctgcccactgagccggtttaaggatagcctgggaaacccaacccacatcctgagaatcggcgagagctataaggagaagcagcggaccatccaggccaagaaggaggtggagcagcggagagccggcggctacagccggaagtacgccagcaaagccaagaatctggcagacgatatggtgagaaacaccgctagagatctgctgtactacgccgtgacccaggatgccatgctgatcttcgccaacctgagccggggcttcggccggcagggcaagcggaccttcatggccgagagacagtacacacggatggaggactggctgaccgccaagctggcctacgagggcctgagcaagacctacctgtccaagacactggcccagtacacctccaagacatgcagcaactgtgggtttaccatcaccagcgccgactacgacagggtgctggagaagctgaagaagacagcaacaggctggatgaccacaattaacggcaaggagctgaaggtggagggccagattacctactacaacagatacaagagacagaacgtagtcaaggacctgtccgtcgagctggatagactgagcgaagaatctgtgaacaacgacatctcctcctggacaaagggcagaagcggagaagctctgagcctcctgaagaaaagattctcccatagacccgtgcaggagaagttcgtgtgcctgaactgcggcttcgagacacacgcagccgagcaagccgccctgaacatcgccagatcctggctgttcctgcggagccaggagtacaagaaataccagacaaacaagacaaccggcaacaccgataagagagccttcgtcgagacctggcagtccttttaccggaagaagcttaaggaggtgtggaaacctgccgtgcggtctggcggatctggcggaggctcctttccagggcagcgtgagcttcaaggacgtgaccgtgggcttcaccctggaggagtggcagcacctggacagcacccagaggagcctgtacagggacgtgatgctggagaactacagcaacctggtgagcctgggctactgcgtgaccaagcccgaggtgatcttcaggctggagcagggcgaggagccctggatcctggaggaggagttccccagccagagcttccccgagagctgggagaccggatctggctccggcagcggccccaagaaaaagagaaaagtctaagctgccttctgcggggcttgccttctggccatgcccttcttctctcccttgcacctgtacctcttggtctttgaataaagcctgagtaggaaggctagcaaaaaaaaaaaaaaaaaaaaaaaaaaaaaaaaaaaaaaaaaaaaaaaaaaaaaaaaaaaaaaaaaaaaaaaaaaaaaaaa

SEQ ID NO: 16113 - RNA, 9485 nt, synthetic construct
  source 1..9485: mol_type = other RNA
aggaaataagagagaaaagaagagtaagaagaaatataagagccaccatggcccctaagaagaagcgtaaagtgagccggatggaacgcctcgtctacgaggtgcggcagaagtgcagaaacatcgaggacatctgcatctcctgcggatctctgaacgtgaccctggagcacccactgttcatcggcggcatgtgccagaactgtaaaaactgttttctggagtgtgcctatcaatacgacgatgacggctaccagagctactgcaccatctgttgcggcggaagagaggtgctgatgtgtggaaataacaactgctgccggtgcttctgcgtggaatgcgtggacctgctggtgggccccggcgccgcccaggccgctattaaggaagatccttggaactgctacatgtgcggccacaagggcacatacggcctgctgagacggagagaggactggcctagcagactgcagatgttcttcgccaataaccacgaccaggagttcgacccccctaaggtgtaccctcccgtccccgccgagaagagaaagcccatccgggtcctgagcctgttcgatggcatcgccaccggtctgctggtgctgaaggacctgggcatccaggtggataggtacattgcctccgaggtgtgcgaggactccatcaccgtgggaatggtgcgtcatcagggcaagatcatgtacgtgggcgacgtgcggagcgtgacacagaagcatatccaggagtggggccctttcgacctggtgatcggcggcagcccttgcaatgacctgagcatcgtgaacccagcccggaagggcctgtacgagggaaccggcagactgttcttcgagttttacagactgctgcacgacgcccggcctaaggaaggcgacgaccggcccttcttttggctgttcgagaatgtggtggccatgggagtcagcgacaagcgggatattagccggttcctggagagcaaccccgtgatgatcgatgccaaggaagtgagcgccgcccaccgggccagatacttctggggcaatctgcctggcatgaacagacccctggccagcaccgtgaacgacaagctggagctgcaggagtgcctggagcacggccggatcgccaagttcagcaaggtgagaaccatcaccacccgaagcaacagcatcaaacaaggcaaggaccagcactttcctgtgttcatgaacgagaaggaggacatcctgtggtgtaccgagatggagagagtgttcgggttcccagtccactacacagatgtcagcaacatgtctagactggccagacagagactgctgggaagaagctggtccgtccctgtgatcagacacctgttcgcccctctgaaggagtacttcgcctgcgtgagcagcggcaacagcaacgccaacagccggggccccagcttctctagcggcctggtgccactgtccctgagagggagccacatgggccccatggagatctacaaaaccgtgagcgcctggaagcggcagcctgtgcgcgtgctgagcctgtttcggaatatcgataaagtcctgaaaagcctgggattcctggagagcggctctggctccggcggtggcaccctgaagtacgtggaggatgtgacaaacgtggtcagacgggatgtggagaagtggggccccttcgatctggtgtacggcagcacccaacccctgggcagctcttgtgaccggtgccctggctggtacatgtttcagttccaccggatcctgcagtacgccctgccgagacaggagtcccagcggccattcttttggattttcatggacaacttgctgctgaccgaggatgaccaggaaactaccactcggttcctgcagaccgaagccgtgaccctgcaggacgtgagaggccgggactaccagaacgccatgcgggtgtggtccaacatccctggactgaaaagcaagcacgcacctctgacccctaaagaagaggagtacctgcaggcccaggtgcggagcagaagcaagctggacgcccctaaggtggatctgctggtgaagaattgcctcctgcccctgagagagtacttcaagtatttcagccagaatagtctgcccctgggaggcagcggcggcggcgccctggtgacatttgaggacgtcgccgtgcggttcacccaggaggaatgggctctgctggatccttctcagaaaatcctgtaccgggacgtgatgagagagacataccggaatctgacctccgtgggcatcaactgggaatgttgggaccttgaagcctgcttcagaagcctgggaagaaacctgagagtgcaggtggtgaagagaaagtgcgagctgaccaacagcggcccctgcgccgagggcggcccaagcagcggcgcccctcctcccagcggcggcagcccagccggctccccaacctctaccgaggagggcacctctgagtccgccacccccgagagcggccctggcacctccaccgagcccagcgagggcagcgcacccggcagccctgccggcagccccacctccacagaggagggaaccagcaccgagcccagcgaaggcagcgccccaggcaccagcaccgagcctagtgagcaggagattaaacggatcaacaagatcagaagaagacttgtgaaagacagcaacaccaagaaggccggcaagacaggccccatgaaaaccctgctggttagagtgatgacacccgatctgagagagcggctggaaaacctgagaaagaagcctgaaaatatcccccagcccatcagcaatacatctagagccaacctgaataagctgctgaccgattacaccgaaatgaagaaggcgatcctgcatgtgtactgggaagagttccagaaggaccctgtgggcctgatgagccgggtggcccagcctgccagcaagaagatcgatcagaacaagctgaaacctgagatggacgagaagggcaacctgaccaccgccggctttgcctgctctcagtgtggccagcccctgttcgtgtacaagctggagcaggtgtctgagaagggcaaggcttacaccaactacttcggacggtgcaatgtggccgagcacgaaaagctgatcctgctggcccagctgaagcccgagaaggatagcgacgaagccgtgacatatagcctgggaaagtttgggcagagggccctggatttctacagcattcatgtgaccaaggagtccacccaccccgtgaagcccctggcccagatcgccggaaacagatacgcctccggacctgtgggaaaggccctgagcgacgcatgtatgggcacaatcgcctccttcctgtctaagtaccaggacatcatcatcgaacaccagaaggtggtgaagggcaaccagaagagactggagagcctgcgggagctggccggcaaggaaaacctggaataccctagcgtgaccctgccacctcagcctcacaccaaggagggcgttgatgcctacaacgaagtgatcgcccgggtgcgaatgtgggtgaacctgaacctgtggcagaagctgaagctaagcagagatgatgccaagcctctgctgagactgaagggattcccttcctttcctctggtcgagagacaggccaacgaagtggactggtgggacatggtgtgtaacgtgaagaagctgatcaacgagaaaaaggaggatggcaaggtgttttggcagaatctggctggctacaagagacaggaagccctgagaccatacctgagcagcgaggaagatcggaagaagggaaagaaattcgctcggtaccagctgggcgacctgctgctgcacctggaaaagaagcacggcgaggactggggaaaggtgtacgacgaggcctgggagcggattgacaagaaagtggaaggcctgagcaagcacatcaagctggaagaggaacggagaagcgaggacgcccagagcaaggccgccctgaccgactggctgcgggctaaggccagcttcgtgatcgagggcctgaaggaggccgacaaggacgagttctgcagatgcgagctgaagctgcagaagtggtacggggacctgcggggaaagcccttcgccatcgaagccgagaacagcatcctggacatcagcggcttcagcaagcagtacaactgtgccttcatctggcagaaggacggcgtgaagaagctgaacctgtacctgatcatcaactacttcaagggcggcaagctgcggttcaagaagatcaaacctgaagccttcgaagccaacagattctacaccgtgatcaacaaaaagagcggcgagatcgtgcccatggaggtgaacttcaacttcgacgaccccaacctgatcatcctgcctctggcctttggcaagagacagggcagagaattcatctggaacgacctgctgtccctggaaaccggcagcctgaagctggccaacggaagagtgatcgagaagacactgtacaacagaagaacccggcaggatgagcctgccctgttcgtggccctgaccttcgagcggcgggaggtcctggactcctccaatatcaaaccaatgaacctgatcggcgtggcaagaggcgaaaacatccccgccgtgatcgccctgaccgaccccgagggctgcccactgagccggtttaaggatagcctgggaaacccaacccacatcctgagaatcggcgagagctataaggagaagcagcggaccatccaggccaagaaggaggtggagcagcggagagccggcggctacagccggaagtacgccagcaaagccaagaatctggcagacgatatggtgagaaacaccgctagagatctgctgtactacgccgtgacccaggatgccatgctgatcttcgccaacctgagccggggcttcggccggcagggcaagcggaccttcatggccgagagacagtacacacggatggaggactggctgaccgccaagctggcctacgagggcctgagcaagacctacctgtccaagacactggcccagtacacctccaagacatgcagcaactgtgggtttaccatcaccagcgccgactacgacagggtgctggagaagctgaagaagacagcaacaggctggatgaccacaattaacggcaaggagctgaaggtggagggccagattacctactacaacagatacaagagacagaacgtagtcaaggacctgtccgtcgagctggatagactgagcgaagaatctgtgaacaacgacatctcctcctggacaaagggcagaagcggagaagctctgagcctcctgaagaaaagattctcccatagacccgtgcaggagaagttcgtgtgcctgaactgcggcttcgagacacacgcagccgagcaagccgccctgaacatcgccagatcctggctgttcctgcggagccaggagtacaagaaataccagacaaacaagacaaccggcaacaccgataagagagccttcgtcgagacctggcagtccttttaccggaagaagcttaaggaggtgtggaaacctgccgtgcggtctggcggatctggcggaggctccatggcccacgacctggtgatgttcagggacgtggccgtggacttcagccaggaggagtgggagtgcctgaacagctaccagaggaacctgtacaaggacgtgatcctggagaactacagcaacctggtgagcctgggctgcagcatcagcaagcccgacgtgatcaccctgctggagcagggcaaggagccctggctggtggtgagggacgagaagaggaggtggagcctggcccccaccttcggcggcccaagcagcggcgcccctcctcccagcggcggcagcccagccggctccccaacctctaccgaggagggcacctctgagtccgccacccccgagagcggccctggcacctccaccgagcccagcgagggcagcgcacccggcagccctgccggcagccccacctccacagaggagggaaccagcaccgagcccagcgaaggcagcgccccaggcaccagcaccgagcctagtgagcaggagattaaacggatcaacaagatcagaagaagacttgtgaaagacagcaacaccaagaaggccggcaagacaggccccatgaaaaccctgctggttagagtgatgacacccgatctgagagagcggctggaaaacctgagaaagaagcctgaaaatatcccccagcccatcagcaatacatctagagccaacctgaataagctgctgaccgattacaccgaaatgaagaaggcgatcctgcatgtgtactgggaagagttccagaaggaccctgtgggcctgatgagccgggtggcccagcctgccagcaagaagatcgatcagaacaagctgaaacctgagatggacgagaagggcaacctgaccaccgccggctttgcctgctctcagtgtggccagcccctgttcgtgtacaagctggagcaggtgtctgagaagggcaaggcttacaccaactacttcggacggtgcaatgtggccgagcacgaaaagctgatcctgctggcccagctgaagcccgagaaggatagcgacgaagccgtgacatatagcctgggaaagtttgggcagagggccctggatttctacagcattcatgtgaccaaggagtccacccaccccgtgaagcccctggcccagatcgccggaaacagatacgcctccggacctgtgggaaaggccctgagcgacgcatgtatgggcacaatcgcctccttcctgtctaagtaccaggacatcatcatcgaacaccagaaggtggtgaagggcaaccagaagagactggagagcctgcgggagctggccggcaaggaaaacctggaataccctagcgtgaccctgccacctcagcctcacaccaaggagggcgttgatgcctacaacgaagtgatcgcccgggtgcgaatgtgggtgaacctgaacctgtggcagaagctgaagctaagcagagatgatgccaagcctctgctgagactgaagggattcccttcctttcctctggtcgagagacaggccaacgaagtggactggtgggacatggtgtgtaacgtgaagaagctgatcaacgagaaaaaggaggatggcaaggtgttttggcagaatctggctggctacaagagacaggaagccctgagaccatacctgagcagcgaggaagatcggaagaagggaaagaaattcgctcggtaccagctgggcgacctgctgctgcacctggaaaagaagcacggcgaggactggggaaaggtgtacgacgaggcctgggagcggattgacaagaaagtggaaggcctgagcaagcacatcaagctggaagaggaacggagaagcgaggacgcccagagcaaggccgccctgaccgactggctgcgggctaaggccagcttcgtgatcgagggcctgaaggaggccgacaaggacgagttctgcagatgcgagctgaagctgcagaagtggtacggggacctgcggggaaagcccttcgccatcgaagccgagaacagcatcctggacatcagcggcttcagcaagcagtacaactgtgccttcatctggcagaaggacggcgtgaagaagctgaacctgtacctgatcatcaactacttcaagggcggcaagctgcggttcaagaagatcaaacctgaagccttcgaagccaacagattctacaccgtgatcaacaaaaagagcggcgagatcgtgcccatggaggtgaacttcaacttcgacgaccccaacctgatcatcctgcctctggcctttggcaagagacagggcagagaattcatctggaacgacctgctgtccctggaaaccggcagcctgaagctggccaacggaagagtgatcgagaagacactgtacaacagaagaacccggcaggatgagcctgccctgttcgtggccctgaccttcgagcggcgggaggtcctggactcctccaatatcaaaccaatgaacctgatcggcgtggcaagaggcgaaaacatccccgccgtgatcgccctgaccgaccccgagggctgcccactgagccggtttaaggatagcctgggaaacccaacccacatcctgagaatcggcgagagctataaggagaagcagcggaccatccaggccaagaaggaggtggagcagcggagagccggcggctacagccggaagtacgccagcaaagccaagaatctggcagacgatatggtgagaaacaccgctagagatctgctgtactacgccgtgacccaggatgccatgctgatcttcgccaacctgagccggggcttcggccggcagggcaagcggaccttcatggccgagagacagtacacacggatggaggactggctgaccgccaagctggcctacgagggcctgagcaagacctacctgtccaagacactggcccagtacacctccaagacatgcagcaactgtgggtttaccatcaccagcgccgactacgacagggtgctggagaagctgaagaagacagcaacaggctggatgaccacaattaacggcaaggagctgaaggtggagggccagattacctactacaacagatacaagagacagaacgtagtcaaggacctgtccgtcgagctggatagactgagcgaagaatctgtgaacaacgacatctcctcctggacaaagggcagaagcggagaagctctgagcctcctgaagaaaagattctcccatagacccgtgcaggagaagttcgtgtgcctgaactgcggcttcgagacacacgcagccgagcaagccgccctgaacatcgccagatcctggctgttcctgcggagccaggagtacaagaaataccagacaaacaagacaaccggcaacaccgataagagagccttcgtcgagacctggcagtccttttaccggaagaagcttaaggaggtgtggaaacctgccgtgcggtctggcggatctggcggaggctcctatggcccacgacctggtgatgttcagggacgtggccgtggacttcagccaggaggagtgggagtgcctgaacagctaccagaggaacctgtacaaggacgtgatcctggagaactacagcaacctggtgagcctgggctgcagcatcagcaagcccgacgtgatcaccctgctggagcagggcaaggagccctggctggtggtgagggacgagaagaggaggtggagcctggcccccaccttcggatctggctccggcagcggccccaagaaaaagagaaaagtctaagctgccttctgcggggcttgccttctggccatgcccttcttctctcccttgcacctgtacctcttggtctttgaataaagcctgagtaggaaggctagcaaaaaaaaaaaaaaaaaaaaaaaaaaaaaaaaaaaaaaaaaaaaaaaaaaaaaaaaaaaaaaaaaaaaaaaaaaaaaaaa

SEQ ID NO: 16114 - RNA, 9485 nt, synthetic construct
  source 1..9485: mol_type = other RNA
aggaaataagagagaaaagaagagtaagaagaaatataagagccaccatggcccctaagaagaagcgtaaagtgagccggatggaacgcctcgtctacgaggtgcggcagaagtgcagaaacatcgaggacatctgcatctcctgcggatctctgaacgtgaccctggagcacccactgttcatcggcggcatgtgccagaactgtaaaaactgttttctggagtgtgcctatcaatacgacgatgacggctaccagagctactgcaccatctgttgcggcggaagagaggtgctgatgtgtggaaataacaactgctgccggtgcttctgcgtggaatgcgtggacctgctggtgggccccggcgccgcccaggccgctattaaggaagatccttggaactgctacatgtgcggccacaagggcacatacggcctgctgagacggagagaggactggcctagcagactgcagatgttcttcgccaataaccacgaccaggagttcgacccccctaaggtgtaccctcccgtccccgccgagaagagaaagcccatccgggtcctgagcctgttcgatggcatcgccaccggtctgctggtgctgaaggacctgggcatccaggtggataggtacattgcctccgaggtgtgcgaggactccatcaccgtgggaatggtgcgtcatcagggcaagatcatgtacgtgggcgacgtgcggagcgtgacacagaagcatatccaggagtggggccctttcgacctggtgatcggcggcagcccttgcaatgacctgagcatcgtgaacccagcccggaagggcctgtacgagggaaccggcagactgttcttcgagttttacagactgctgcacgacgcccggcctaaggaaggcgacgaccggcccttcttttggctgttcgagaatgtggtggccatgggagtcagcgacaagcgggatattagccggttcctggagagcaaccccgtgatgatcgatgccaaggaagtgagcgccgcccaccgggccagatacttctggggcaatctgcctggcatgaacagacccctggccagcaccgtgaacgacaagctggagctgcaggagtgcctggagcacggccggatcgccaagttcagcaaggtgagaaccatcaccacccgaagcaacagcatcaaacaaggcaaggaccagcactttcctgtgttcatgaacgagaaggaggacatcctgtggtgtaccgagatggagagagtgttcgggttcccagtccactacacagatgtcagcaacatgtctagactggccagacagagactgctgggaagaagctggtccgtccctgtgatcagacacctgttcgcccctctgaaggagtacttcgcctgcgtgagcagcggcaacagcaacgccaacagccggggccccagcttctctagcggcctggtgccactgtccctgagagggagccacatgggccccatggagatctacaaaaccgtgagcgcctggaagcggcagcctgtgcgcgtgctgagcctgtttcggaatatcgataaagtcctgaaaagcctgggattcctggagagcggctctggctccggcggtggcaccctgaagtacgtggaggatgtgacaaacgtggtcagacgggatgtggagaagtggggccccttcgatctggtgtacggcagcacccaacccctgggcagctcttgtgaccggtgccctggctggtacatgtttcagttccaccggatcctgcagtacgccctgccgagacaggagtcccagcggccattcttttggattttcatggacaacttgctgctgaccgaggatgaccaggaaactaccactcggttcctgcagaccgaagccgtgaccctgcaggacgtgagaggccgggactaccagaacgccatgcgggtgtggtccaacatccctggactgaaaagcaagcacgcacctctgacccctaaagaagaggagtacctgcaggcccaggtgcggagcagaagcaagctggacgcccctaaggtggatctgctggtgaagaattgcctcctgcccctgagagagtacttcaagtatttcagccagaatagtctgcccctgggaggcagcggcggcggcgccctggtgacatttgaggacgtcgccgtgcggttcacccaggaggaatgggctctgctggatccttctcagaaaatcctgtaccgggacgtgatgagagagacataccggaatctgacctccgtgggcatcaactgggaatgttgggaccttgaagcctgcttcagaagcctgggaagaaacctgagagtgcaggtggtgaagagaaagtgcgagctgaccaacagcggcccctgcgccgagggcggcccaagcagcggcgcccctcctcccagcggcggcagcccagccggctccccaacctctaccgaggagggcacctctgagtccgccacccccgagagcggccctggcacctccaccgagcccagcgagggcagcgcacccggcagccctgccggcagccccacctccacagaggagggaaccagcaccgagcccagcgaaggcagcgccccaggcaccagcaccgagcctagtgagcaggagattaaacggatcaacaagatcagaagaagacttgtgaaagacagcaacaccaagaaggccggcaagacaggccccatgaaaaccctgctggttagagtgatgacacccgatctgagagagcggctggaaaacctgagaaagaagcctgaaaatatcccccagcccatcagcaatacatctagagccaacctgaataagctgctgaccgattacaccgaaatgaagaaggcgatcctgcatgtgtactgggaagagttccagaaggaccctgtgggcctgatgagccgggtggcccagcctgccagcaagaagatcgatcagaacaagctgaaacctgagatggacgagaagggcaacctgaccaccgccggctttgcctgctctcagtgtggccagcccctgttcgtgtacaagctggagcaggtgtctgagaagggcaaggcttacaccaactacttcggacggtgcaatgtggccgagcacgaaaagctgatcctgctggcccagctgaagcccgagaaggatagcgacgaagccgtgacatatagcctgggaaagtttgggcagagggccctggatttctacagcattcatgtgaccaaggagtccacccaccccgtgaagcccctggcccagatcgccggaaacagatacgcctccggacctgtgggaaaggccctgagcgacgcatgtatgggcacaatcgcctccttcctgtctaagtaccaggacatcatcatcgaacaccagaaggtggtgaagggcaaccagaagagactggagagcctgcgggagctggccggcaaggaaaacctggaataccctagcgtgaccctgccacctcagcctcacaccaaggagggcgttgatgcctacaacgaagtgatcgcccgggtgcgaatgtgggtgaacctgaacctgtggcagaagctgaagctaagcagagatgatgccaagcctctgctgagactgaagggattcccttcctttcctctggtcgagagacaggccaacgaagtggactggtgggacatggtgtgtaacgtgaagaagctgatcaacgagaaaaaggaggatggcaaggtgttttggcagaatctggctggctacaagagacaggaagccctgagaccatacctgagcagcgaggaagatcggaagaagggaaagaaattcgctcggtaccagctgggcgacctgctgctgcacctggaaaagaagcacggcgaggactggggaaaggtgtacgacgaggcctgggagcggattgacaagaaagtggaaggcctgagcaagcacatcaagctggaagaggaacggagaagcgaggacgcccagagcaaggccgccctgaccgactggctgcgggctaaggccagcttcgtgatcgagggcctgaaggaggccgacaaggacgagttctgcagatgcgagctgaagctgcagaagtggtacggggacctgcggggaaagcccttcgccatcgaagccgagaacagcatcctggacatcagcggcttcagcaagcagtacaactgtgccttcatctggcagaaggacggcgtgaagaagctgaacctgtacctgatcatcaactacttcaagggcggcaagctgcggttcaagaagatcaaacctgaagccttcgaagccaacagattctacaccgtgatcaacaaaaagagcggcgagatcgtgcccatggaggtgaacttcaacttcgacgaccccaacctgatcatcctgcctctggcctttggcaagagacagggcagagaattcatctggaacgacctgctgtccctggaaaccggcagcctgaagctggccaacggaagagtgatcgagaagacactgtacaacagaagaacccggcaggatgagcctgccctgttcgtggccctgaccttcgagcggcgggaggtcctggactcctccaatatcaaaccaatgaacctgatcggcgtggcaagaggcgaaaacatccccgccgtgatcgccctgaccgaccccgagggctgcccactgagccggtttaaggatagcctgggaaacccaacccacatcctgagaatcggcgagagctataaggagaagcagcggaccatccaggccaagaaggaggtggagcagcggagagccggcggctacagccggaagtacgccagcaaagccaagaatctggcagacgatatggtgagaaacaccgctagagatctgctgtactacgccgtgacccaggatgccatgctgatcttcgccaacctgagccggggcttcggccggcagggcaagcggaccttcatggccgagagacagtacacacggatggaggactggctgaccgccaagctggcctacgagggcctgagcaagacctacctgtccaagacactggcccagtacacctccaagacatgcagcaactgtgggtttaccatcaccagcgccgactacgacagggtgctggagaagctgaagaagacagcaacaggctggatgaccacaattaacggcaaggagctgaaggtggagggccagattacctactacaacagatacaagagacagaacgtagtcaaggacctgtccgtcgagctggatagactgagcgaagaatctgtgaacaacgacatctcctcctggacaaagggcagaagcggagaagctctgagcctcctgaagaaaagattctcccatagacccgtgcaggagaagttcgtgtgcctgaactgcggcttcgagacacacgcagccgagcaagccgccctgaacatcgccagatcctggctgttcctgcggagccaggagtacaagaaataccagacaaacaagacaaccggcaacaccgataagagagccttcgtcgagacctggcagtccttttaccggaagaagcttaaggaggtgtggaaacctgccgtgcggtctggcggatctggcggaggctccgcccaggagctggtgaccttcaaggacatcgccatcgacttcacccaggaggagtgggccctgctggacaccagccagaggcagctgtacagggacgtgatgctggagaacatcagccacctggtgagcgtgggctaccacctgtgcaagagcgacgtgatcagccagctggagcagggcgtggagctgtggagggacggcagggagttcctgcagggcctgaaccccgacaggaagagcggcggcggcccaagcagcggcgcccctcctcccagcggcggcagcccagccggctccccaacctctaccgaggagggcacctctgagtccgccacccccgagagcggccctggcacctccaccgagcccagcgagggcagcgcacccggcagccctgccggcagccccacctccacagaggagggaaccagcaccgagcccagcgaaggcagcgccccaggcaccagcaccgagcctagtgagcaggagattaaacggatcaacaagatcagaagaagacttgtgaaagacagcaacaccaagaaggccggcaagacaggccccatgaaaaccctgctggttagagtgatgacacccgatctgagagagcggctggaaaacctgagaaagaagcctgaaaatatcccccagcccatcagcaatacatctagagccaacctgaataagctgctgaccgattacaccgaaatgaagaaggcgatcctgcatgtgtactgggaagagttccagaaggaccctgtgggcctgatgagccgggtggcccagcctgccagcaagaagatcgatcagaacaagctgaaacctgagatggacgagaagggcaacctgaccaccgccggctttgcctgctctcagtgtggccagcccctgttcgtgtacaagctggagcaggtgtctgagaagggcaaggcttacaccaactacttcggacggtgcaatgtggccgagcacgaaaagctgatcctgctggcccagctgaagcccgagaaggatagcgacgaagccgtgacatatagcctgggaaagtttgggcagagggccctggatttctacagcattcatgtgaccaaggagtccacccaccccgtgaagcccctggcccagatcgccggaaacagatacgcctccggacctgtgggaaaggccctgagcgacgcatgtatgggcacaatcgcctccttcctgtctaagtaccaggacatcatcatcgaacaccagaaggtggtgaagggcaaccagaagagactggagagcctgcgggagctggccggcaaggaaaacctggaataccctagcgtgaccctgccacctcagcctcacaccaaggagggcgttgatgcctacaacgaagtgatcgcccgggtgcgaatgtgggtgaacctgaacctgtggcagaagctgaagctaagcagagatgatgccaagcctctgctgagactgaagggattcccttcctttcctctggtcgagagacaggccaacgaagtggactggtgggacatggtgtgtaacgtgaagaagctgatcaacgagaaaaaggaggatggcaaggtgttttggcagaatctggctggctacaagagacaggaagccctgagaccatacctgagcagcgaggaagatcggaagaagggaaagaaattcgctcggtaccagctgggcgacctgctgctgcacctggaaaagaagcacggcgaggactggggaaaggtgtacgacgaggcctgggagcggattgacaagaaagtggaaggcctgagcaagcacatcaagctggaagaggaacggagaagcgaggacgcccagagcaaggccgccctgaccgactggctgcgggctaaggccagcttcgtgatcgagggcctgaaggaggccgacaaggacgagttctgcagatgcgagctgaagctgcagaagtggtacggggacctgcggggaaagcccttcgccatcgaagccgagaacagcatcctggacatcagcggcttcagcaagcagtacaactgtgccttcatctggcagaaggacggcgtgaagaagctgaacctgtacctgatcatcaactacttcaagggcggcaagctgcggttcaagaagatcaaacctgaagccttcgaagccaacagattctacaccgtgatcaacaaaaagagcggcgagatcgtgcccatggaggtgaacttcaacttcgacgaccccaacctgatcatcctgcctctggcctttggcaagagacagggcagagaattcatctggaacgacctgctgtccctggaaaccggcagcctgaagctggccaacggaagagtgatcgagaagacactgtacaacagaagaacccggcaggatgagcctgccctgttcgtggccctgaccttcgagcggcgggaggtcctggactcctccaatatcaaaccaatgaacctgatcggcgtggcaagaggcgaaaacatccccgccgtgatcgccctgaccgaccccgagggctgcccactgagccggtttaaggatagcctgggaaacccaacccacatcctgagaatcggcgagagctataaggagaagcagcggaccatccaggccaagaaggaggtggagcagcggagagccggcggctacagccggaagtacgccagcaaagccaagaatctggcagacgatatggtgagaaacaccgctagagatctgctgtactacgccgtgacccaggatgccatgctgatcttcgccaacctgagccggggcttcggccggcagggcaagcggaccttcatggccgagagacagtacacacggatggaggactggctgaccgccaagctggcctacgagggcctgagcaagacctacctgtccaagacactggcccagtacacctccaagacatgcagcaactgtgggtttaccatcaccagcgccgactacgacagggtgctggagaagctgaagaagacagcaacaggctggatgaccacaattaacggcaaggagctgaaggtggagggccagattacctactacaacagatacaagagacagaacgtagtcaaggacctgtccgtcgagctggatagactgagcgaagaatctgtgaacaacgacatctcctcctggacaaagggcagaagcggagaagctctgagcctcctgaagaaaagattctcccatagacccgtgcaggagaagttcgtgtgcctgaactgcggcttcgagacacacgcagccgagcaagccgccctgaacatcgccagatcctggctgttcctgcggagccaggagtacaagaaataccagacaaacaagacaaccggcaacaccgataagagagccttcgtcgagacctggcagtccttttaccggaagaagcttaaggaggtgtggaaacctgccgtgcggtctggcggatctggcggaggctcctgcccaggagctggtgaccttcaaggacatcgccatcgacttcacccaggaggagtgggccctgctggacaccagccagaggcagctgtacagggacgtgatgctggagaacatcagccacctggtgagcgtgggctaccacctgtgcaagagcgacgtgatcagccagctggagcagggcgtggagctgtggagggacggcagggagttcctgcagggcctgaaccccgacaggaagagcggcggatctggctccggcagcggccccaagaaaaagagaaaagtctaagctgccttctgcggggcttgccttctggccatgcccttcttctctcccttgcacctgtacctcttggtctttgaataaagcctgagtaggaaggctagcaaaaaaaaaaaaaaaaaaaaaaaaaaaaaaaaaaaaaaaaaaaaaaaaaaaaaaaaaaaaaaaaaaaaaaaaaaaaaaaa

SEQ ID NO: 16115 - RNA, 9485 nt, synthetic construct
  source 1..9485: mol_type = other RNA
aggaaataagagagaaaagaagagtaagaagaaatataagagccaccatggcccctaagaagaagcgtaaagtgagccggatggaacgcctcgtctacgaggtgcggcagaagtgcagaaacatcgaggacatctgcatctcctgcggatctctgaacgtgaccctggagcacccactgttcatcggcggcatgtgccagaactgtaaaaactgttttctggagtgtgcctatcaatacgacgatgacggctaccagagctactgcaccatctgttgcggcggaagagaggtgctgatgtgtggaaataacaactgctgccggtgcttctgcgtggaatgcgtggacctgctggtgggccccggcgccgcccaggccgctattaaggaagatccttggaactgctacatgtgcggccacaagggcacatacggcctgctgagacggagagaggactggcctagcagactgcagatgttcttcgccaataaccacgaccaggagttcgacccccctaaggtgtaccctcccgtccccgccgagaagagaaagcccatccgggtcctgagcctgttcgatggcatcgccaccggtctgctggtgctgaaggacctgggcatccaggtggataggtacattgcctccgaggtgtgcgaggactccatcaccgtgggaatggtgcgtcatcagggcaagatcatgtacgtgggcgacgtgcggagcgtgacacagaagcatatccaggagtggggccctttcgacctggtgatcggcggcagcccttgcaatgacctgagcatcgtgaacccagcccggaagggcctgtacgagggaaccggcagactgttcttcgagttttacagactgctgcacgacgcccggcctaaggaaggcgacgaccggcccttcttttggctgttcgagaatgtggtggccatgggagtcagcgacaagcgggatattagccggttcctggagagcaaccccgtgatgatcgatgccaaggaagtgagcgccgcccaccgggccagatacttctggggcaatctgcctggcatgaacagacccctggccagcaccgtgaacgacaagctggagctgcaggagtgcctggagcacggccggatcgccaagttcagcaaggtgagaaccatcaccacccgaagcaacagcatcaaacaaggcaaggaccagcactttcctgtgttcatgaacgagaaggaggacatcctgtggtgtaccgagatggagagagtgttcgggttcccagtccactacacagatgtcagcaacatgtctagactggccagacagagactgctgggaagaagctggtccgtccctgtgatcagacacctgttcgcccctctgaaggagtacttcgcctgcgtgagcagcggcaacagcaacgccaacagccggggccccagcttctctagcggcctggtgccactgtccctgagagggagccacatgggccccatggagatctacaaaaccgtgagcgcctggaagcggcagcctgtgcgcgtgctgagcctgtttcggaatatcgataaagtcctgaaaagcctgggattcctggagagcggctctggctccggcggtggcaccctgaagtacgtggaggatgtgacaaacgtggtcagacgggatgtggagaagtggggccccttcgatctggtgtacggcagcacccaacccctgggcagctcttgtgaccggtgccctggctggtacatgtttcagttccaccggatcctgcagtacgccctgccgagacaggagtcccagcggccattcttttggattttcatggacaacttgctgctgaccgaggatgaccaggaaactaccactcggttcctgcagaccgaagccgtgaccctgcaggacgtgagaggccgggactaccagaacgccatgcgggtgtggtccaacatccctggactgaaaagcaagcacgcacctctgacccctaaagaagaggagtacctgcaggcccaggtgcggagcagaagcaagctggacgcccctaaggtggatctgctggtgaagaattgcctcctgcccctgagagagtacttcaagtatttcagccagaatagtctgcccctgggaggcagcggcggcggcgccctggtgacatttgaggacgtcgccgtgcggttcacccaggaggaatgggctctgctggatccttctcagaaaatcctgtaccgggacgtgatgagagagacataccggaatctgacctccgtgggcatcaactgggaatgttgggaccttgaagcctgcttcagaagcctgggaagaaacctgagagtgcaggtggtgaagagaaagtgcgagctgaccaacagcggcccctgcgccgagggcggcccaagcagcggcgcccctcctcccagcggcggcagcccagccggctccccaacctctaccgaggagggcacctctgagtccgccacccccgagagcggccctggcacctccaccgagcccagcgagggcagcgcacccggcagccctgccggcagccccacctccacagaggagggaaccagcaccgagcccagcgaaggcagcgccccaggcaccagcaccgagcctagtgagcaggagattaaacggatcaacaagatcagaagaagacttgtgaaagacagcaacaccaagaaggccggcaagacaggccccatgaaaaccctgctggttagagtgatgacacccgatctgagagagcggctggaaaacctgagaaagaagcctgaaaatatcccccagcccatcagcaatacatctagagccaacctgaataagctgctgaccgattacaccgaaatgaagaaggcgatcctgcatgtgtactgggaagagttccagaaggaccctgtgggcctgatgagccgggtggcccagcctgccagcaagaagatcgatcagaacaagctgaaacctgagatggacgagaagggcaacctgaccaccgccggctttgcctgctctcagtgtggccagcccctgttcgtgtacaagctggagcaggtgtctgagaagggcaaggcttacaccaactacttcggacggtgcaatgtggccgagcacgaaaagctgatcctgctggcccagctgaagcccgagaaggatagcgacgaagccgtgacatatagcctgggaaagtttgggcagagggccctggatttctacagcattcatgtgaccaaggagtccacccaccccgtgaagcccctggcccagatcgccggaaacagatacgcctccggacctgtgggaaaggccctgagcgacgcatgtatgggcacaatcgcctccttcctgtctaagtaccaggacatcatcatcgaacaccagaaggtggtgaagggcaaccagaagagactggagagcctgcgggagctggccggcaaggaaaacctggaataccctagcgtgaccctgccacctcagcctcacaccaaggagggcgttgatgcctacaacgaagtgatcgcccgggtgcgaatgtgggtgaacctgaacctgtggcagaagctgaagctaagcagagatgatgccaagcctctgctgagactgaagggattcccttcctttcctctggtcgagagacaggccaacgaagtggactggtgggacatggtgtgtaacgtgaagaagctgatcaacgagaaaaaggaggatggcaaggtgttttggcagaatctggctggctacaagagacaggaagccctgagaccatacctgagcagcgaggaagatcggaagaagggaaagaaattcgctcggtaccagctgggcgacctgctgctgcacctggaaaagaagcacggcgaggactggggaaaggtgtacgacgaggcctgggagcggattgacaagaaagtggaaggcctgagcaagcacatcaagctggaagaggaacggagaagcgaggacgcccagagcaaggccgccctgaccgactggctgcgggctaaggccagcttcgtgatcgagggcctgaaggaggccgacaaggacgagttctgcagatgcgagctgaagctgcagaagtggtacggggacctgcggggaaagcccttcgccatcgaagccgagaacagcatcctggacatcagcggcttcagcaagcagtacaactgtgccttcatctggcagaaggacggcgtgaagaagctgaacctgtacctgatcatcaactacttcaagggcggcaagctgcggttcaagaagatcaaacctgaagccttcgaagccaacagattctacaccgtgatcaacaaaaagagcggcgagatcgtgcccatggaggtgaacttcaacttcgacgaccccaacctgatcatcctgcctctggcctttggcaagagacagggcagagaattcatctggaacgacctgctgtccctggaaaccggcagcctgaagctggccaacggaagagtgatcgagaagacactgtacaacagaagaacccggcaggatgagcctgccctgttcgtggccctgaccttcgagcggcgggaggtcctggactcctccaatatcaaaccaatgaacctgatcggcgtggcaagaggcgaaaacatccccgccgtgatcgccctgaccgaccccgagggctgcccactgagccggtttaaggatagcctgggaaacccaacccacatcctgagaatcggcgagagctataaggagaagcagcggaccatccaggccaagaaggaggtggagcagcggagagccggcggctacagccggaagtacgccagcaaagccaagaatctggcagacgatatggtgagaaacaccgctagagatctgctgtactacgccgtgacccaggatgccatgctgatcttcgccaacctgagccggggcttcggccggcagggcaagcggaccttcatggccgagagacagtacacacggatggaggactggctgaccgccaagctggcctacgagggcctgagcaagacctacctgtccaagacactggcccagtacacctccaagacatgcagcaactgtgggtttaccatcaccagcgccgactacgacagggtgctggagaagctgaagaagacagcaacaggctggatgaccacaattaacggcaaggagctgaaggtggagggccagattacctactacaacagatacaagagacagaacgtagtcaaggacctgtccgtcgagctggatagactgagcgaagaatctgtgaacaacgacatctcctcctggacaaagggcagaagcggagaagctctgagcctcctgaagaaaagattctcccatagacccgtgcaggagaagttcgtgtgcctgaactgcggcttcgagacacacgcagccgagcaagccgccctgaacatcgccagatcctggctgttcctgcggagccaggagtacaagaaataccagacaaacaagacaaccggcaacaccgataagagagccttcgtcgagacctggcagtccttttaccggaagaagcttaaggaggtgtggaaacctgccgtgcggtctggcggatctggcggaggctccaggcccgagagcgtgaccttcgaggacgtggccgtgtacttcagcgagaacgagtggatcggcctgggccccgcccagagggccctgtacagggacgtgatgctggagaactacggcgccgtggccagcctggccttccccttccccaagcccgccctgatcagccagctggagaggggcgaggccccctggtgcagcgtgccctggggcgccctggacggcgaggaccccaggagcatcagcggcggcccaagcagcggcgcccctcctcccagcggcggcagcccagccggctccccaacctctaccgaggagggcacctctgagtccgccacccccgagagcggccctggcacctccaccgagcccagcgagggcagcgcacccggcagccctgccggcagccccacctccacagaggagggaaccagcaccgagcccagcgaaggcagcgccccaggcaccagcaccgagcctagtgagcaggagattaaacggatcaacaagatcagaagaagacttgtgaaagacagcaacaccaagaaggccggcaagacaggccccatgaaaaccctgctggttagagtgatgacacccgatctgagagagcggctggaaaacctgagaaagaagcctgaaaatatcccccagcccatcagcaatacatctagagccaacctgaataagctgctgaccgattacaccgaaatgaagaaggcgatcctgcatgtgtactgggaagagttccagaaggaccctgtgggcctgatgagccgggtggcccagcctgccagcaagaagatcgatcagaacaagctgaaacctgagatggacgagaagggcaacctgaccaccgccggctttgcctgctctcagtgtggccagcccctgttcgtgtacaagctggagcaggtgtctgagaagggcaaggcttacaccaactacttcggacggtgcaatgtggccgagcacgaaaagctgatcctgctggcccagctgaagcccgagaaggatagcgacgaagccgtgacatatagcctgggaaagtttgggcagagggccctggatttctacagcattcatgtgaccaaggagtccacccaccccgtgaagcccctggcccagatcgccggaaacagatacgcctccggacctgtgggaaaggccctgagcgacgcatgtatgggcacaatcgcctccttcctgtctaagtaccaggacatcatcatcgaacaccagaaggtggtgaagggcaaccagaagagactggagagcctgcgggagctggccggcaaggaaaacctggaataccctagcgtgaccctgccacctcagcctcacaccaaggagggcgttgatgcctacaacgaagtgatcgcccgggtgcgaatgtgggtgaacctgaacctgtggcagaagctgaagctaagcagagatgatgccaagcctctgctgagactgaagggattcccttcctttcctctggtcgagagacaggccaacgaagtggactggtgggacatggtgtgtaacgtgaagaagctgatcaacgagaaaaaggaggatggcaaggtgttttggcagaatctggctggctacaagagacaggaagccctgagaccatacctgagcagcgaggaagatcggaagaagggaaagaaattcgctcggtaccagctgggcgacctgctgctgcacctggaaaagaagcacggcgaggactggggaaaggtgtacgacgaggcctgggagcggattgacaagaaagtggaaggcctgagcaagcacatcaagctggaagaggaacggagaagcgaggacgcccagagcaaggccgccctgaccgactggctgcgggctaaggccagcttcgtgatcgagggcctgaaggaggccgacaaggacgagttctgcagatgcgagctgaagctgcagaagtggtacggggacctgcggggaaagcccttcgccatcgaagccgagaacagcatcctggacatcagcggcttcagcaagcagtacaactgtgccttcatctggcagaaggacggcgtgaagaagctgaacctgtacctgatcatcaactacttcaagggcggcaagctgcggttcaagaagatcaaacctgaagccttcgaagccaacagattctacaccgtgatcaacaaaaagagcggcgagatcgtgcccatggaggtgaacttcaacttcgacgaccccaacctgatcatcctgcctctggcctttggcaagagacagggcagagaattcatctggaacgacctgctgtccctggaaaccggcagcctgaagctggccaacggaagagtgatcgagaagacactgtacaacagaagaacccggcaggatgagcctgccctgttcgtggccctgaccttcgagcggcgggaggtcctggactcctccaatatcaaaccaatgaacctgatcggcgtggcaagaggcgaaaacatccccgccgtgatcgccctgaccgaccccgagggctgcccactgagccggtttaaggatagcctgggaaacccaacccacatcctgagaatcggcgagagctataaggagaagcagcggaccatccaggccaagaaggaggtggagcagcggagagccggcggctacagccggaagtacgccagcaaagccaagaatctggcagacgatatggtgagaaacaccgctagagatctgctgtactacgccgtgacccaggatgccatgctgatcttcgccaacctgagccggggcttcggccggcagggcaagcggaccttcatggccgagagacagtacacacggatggaggactggctgaccgccaagctggcctacgagggcctgagcaagacctacctgtccaagacactggcccagtacacctccaagacatgcagcaactgtgggtttaccatcaccagcgccgactacgacagggtgctggagaagctgaagaagacagcaacaggctggatgaccacaattaacggcaaggagctgaaggtggagggccagattacctactacaacagatacaagagacagaacgtagtcaaggacctgtccgtcgagctggatagactgagcgaagaatctgtgaacaacgacatctcctcctggacaaagggcagaagcggagaagctctgagcctcctgaagaaaagattctcccatagacccgtgcaggagaagttcgtgtgcctgaactgcggcttcgagacacacgcagccgagcaagccgccctgaacatcgccagatcctggctgttcctgcggagccaggagtacaagaaataccagacaaacaagacaaccggcaacaccgataagagagccttcgtcgagacctggcagtccttttaccggaagaagcttaaggaggtgtggaaacctgccgtgcggtctggcggatctggcggaggctcctaggcccgagagcgtgaccttcgaggacgtggccgtgtacttcagcgagaacgagtggatcggcctgggccccgcccagagggccctgtacagggacgtgatgctggagaactacggcgccgtggccagcctggccttccccttccccaagcccgccctgatcagccagctggagaggggcgaggccccctggtgcagcgtgccctggggcgccctggacggcgaggaccccaggagcatcagcggatctggctccggcagcggccccaagaaaaagagaaaagtctaagctgccttctgcggggcttgccttctggccatgcccttcttctctcccttgcacctgtacctcttggtctttgaataaagcctgagtaggaaggctagcaaaaaaaaaaaaaaaaaaaaaaaaaaaaaaaaaaaaaaaaaaaaaaaaaaaaaaaaaaaaaaaaaaaaaaaaaaaaaaaa

SEQ ID NO: 16116 - RNA, 9485 nt, synthetic construct
  source 1..9485: mol_type = other RNA
aggaaataagagagaaaagaagagtaagaagaaatataagagccaccatggcccctaagaagaagcgtaaagtgagccggatggaacgcctcgtctacgaggtgcggcagaagtgcagaaacatcgaggacatctgcatctcctgcggatctctgaacgtgaccctggagcacccactgttcatcggcggcatgtgccagaactgtaaaaactgttttctggagtgtgcctatcaatacgacgatgacggctaccagagctactgcaccatctgttgcggcggaagagaggtgctgatgtgtggaaataacaactgctgccggtgcttctgcgtggaatgcgtggacctgctggtgggccccggcgccgcccaggccgctattaaggaagatccttggaactgctacatgtgcggccacaagggcacatacggcctgctgagacggagagaggactggcctagcagactgcagatgttcttcgccaataaccacgaccaggagttcgacccccctaaggtgtaccctcccgtccccgccgagaagagaaagcccatccgggtcctgagcctgttcgatggcatcgccaccggtctgctggtgctgaaggacctgggcatccaggtggataggtacattgcctccgaggtgtgcgaggactccatcaccgtgggaatggtgcgtcatcagggcaagatcatgtacgtgggcgacgtgcggagcgtgacacagaagcatatccaggagtggggccctttcgacctggtgatcggcggcagcccttgcaatgacctgagcatcgtgaacccagcccggaagggcctgtacgagggaaccggcagactgttcttcgagttttacagactgctgcacgacgcccggcctaaggaaggcgacgaccggcccttcttttggctgttcgagaatgtggtggccatgggagtcagcgacaagcgggatattagccggttcctggagagcaaccccgtgatgatcgatgccaaggaagtgagcgccgcccaccgggccagatacttctggggcaatctgcctggcatgaacagacccctggccagcaccgtgaacgacaagctggagctgcaggagtgcctggagcacggccggatcgccaagttcagcaaggtgagaaccatcaccacccgaagcaacagcatcaaacaaggcaaggaccagcactttcctgtgttcatgaacgagaaggaggacatcctgtggtgtaccgagatggagagagtgttcgggttcccagtccactacacagatgtcagcaacatgtctagactggccagacagagactgctgggaagaagctggtccgtccctgtgatcagacacctgttcgcccctctgaaggagtacttcgcctgcgtgagcagcggcaacagcaacgccaacagccggggccccagcttctctagcggcctggtgccactgtccctgagagggagccacatgggccccatggagatctacaaaaccgtgagcgcctggaagcggcagcctgtgcgcgtgctgagcctgtttcggaatatcgataaagtcctgaaaagcctgggattcctggagagcggctctggctccggcggtggcaccctgaagtacgtggaggatgtgacaaacgtggtcagacgggatgtggagaagtggggccccttcgatctggtgtacggcagcacccaacccctgggcagctcttgtgaccggtgccctggctggtacatgtttcagttccaccggatcctgcagtacgccctgccgagacaggagtcccagcggccattcttttggattttcatggacaacttgctgctgaccgaggatgaccaggaaactaccactcggttcctgcagaccgaagccgtgaccctgcaggacgtgagaggccgggactaccagaacgccatgcgggtgtggtccaacatccctggactgaaaagcaagcacgcacctctgacccctaaagaagaggagtacctgcaggcccaggtgcggagcagaagcaagctggacgcccctaaggtggatctgctggtgaagaattgcctcctgcccctgagagagtacttcaagtatttcagccagaatagtctgcccctgggaggcagcggcggcggcgccctggtgacatttgaggacgtcgccgtgcggttcacccaggaggaatgggctctgctggatccttctcagaaaatcctgtaccgggacgtgatgagagagacataccggaatctgacctccgtgggcatcaactgggaatgttgggaccttgaagcctgcttcagaagcctgggaagaaacctgagagtgcaggtggtgaagagaaagtgcgagctgaccaacagcggcccctgcgccgagggcggcccaagcagcggcgcccctcctcccagcggcggcagcccagccggctccccaacctctaccgaggagggcacctctgagtccgccacccccgagagcggccctggcacctccaccgagcccagcgagggcagcgcacccggcagccctgccggcagccccacctccacagaggagggaaccagcaccgagcccagcgaaggcagcgccccaggcaccagcaccgagcctagtgagcaggagattaaacggatcaacaagatcagaagaagacttgtgaaagacagcaacaccaagaaggccggcaagacaggccccatgaaaaccctgctggttagagtgatgacacccgatctgagagagcggctggaaaacctgagaaagaagcctgaaaatatcccccagcccatcagcaatacatctagagccaacctgaataagctgctgaccgattacaccgaaatgaagaaggcgatcctgcatgtgtactgggaagagttccagaaggaccctgtgggcctgatgagccgggtggcccagcctgccagcaagaagatcgatcagaacaagctgaaacctgagatggacgagaagggcaacctgaccaccgccggctttgcctgctctcagtgtggccagcccctgttcgtgtacaagctggagcaggtgtctgagaagggcaaggcttacaccaactacttcggacggtgcaatgtggccgagcacgaaaagctgatcctgctggcccagctgaagcccgagaaggatagcgacgaagccgtgacatatagcctgggaaagtttgggcagagggccctggatttctacagcattcatgtgaccaaggagtccacccaccccgtgaagcccctggcccagatcgccggaaacagatacgcctccggacctgtgggaaaggccctgagcgacgcatgtatgggcacaatcgcctccttcctgtctaagtaccaggacatcatcatcgaacaccagaaggtggtgaagggcaaccagaagagactggagagcctgcgggagctggccggcaaggaaaacctggaataccctagcgtgaccctgccacctcagcctcacaccaaggagggcgttgatgcctacaacgaagtgatcgcccgggtgcgaatgtgggtgaacctgaacctgtggcagaagctgaagctaagcagagatgatgccaagcctctgctgagactgaagggattcccttcctttcctctggtcgagagacaggccaacgaagtggactggtgggacatggtgtgtaacgtgaagaagctgatcaacgagaaaaaggaggatggcaaggtgttttggcagaatctggctggctacaagagacaggaagccctgagaccatacctgagcagcgaggaagatcggaagaagggaaagaaattcgctcggtaccagctgggcgacctgctgctgcacctggaaaagaagcacggcgaggactggggaaaggtgtacgacgaggcctgggagcggattgacaagaaagtggaaggcctgagcaagcacatcaagctggaagaggaacggagaagcgaggacgcccagagcaaggccgccctgaccgactggctgcgggctaaggccagcttcgtgatcgagggcctgaaggaggccgacaaggacgagttctgcagatgcgagctgaagctgcagaagtggtacggggacctgcggggaaagcccttcgccatcgaagccgagaacagcatcctggacatcagcggcttcagcaagcagtacaactgtgccttcatctggcagaaggacggcgtgaagaagctgaacctgtacctgatcatcaactacttcaagggcggcaagctgcggttcaagaagatcaaacctgaagccttcgaagccaacagattctacaccgtgatcaacaaaaagagcggcgagatcgtgcccatggaggtgaacttcaacttcgacgaccccaacctgatcatcctgcctctggcctttggcaagagacagggcagagaattcatctggaacgacctgctgtccctggaaaccggcagcctgaagctggccaacggaagagtgatcgagaagacactgtacaacagaagaacccggcaggatgagcctgccctgttcgtggccctgaccttcgagcggcgggaggtcctggactcctccaatatcaaaccaatgaacctgatcggcgtggcaagaggcgaaaacatccccgccgtgatcgccctgaccgaccccgagggctgcccactgagccggtttaaggatagcctgggaaacccaacccacatcctgagaatcggcgagagctataaggagaagcagcggaccatccaggccaagaaggaggtggagcagcggagagccggcggctacagccggaagtacgccagcaaagccaagaatctggcagacgatatggtgagaaacaccgctagagatctgctgtactacgccgtgacccaggatgccatgctgatcttcgccaacctgagccggggcttcggccggcagggcaagcggaccttcatggccgagagacagtacacacggatggaggactggctgaccgccaagctggcctacgagggcctgagcaagacctacctgtccaagacactggcccagtacacctccaagacatgcagcaactgtgggtttaccatcaccagcgccgactacgacagggtgctggagaagctgaagaagacagcaacaggctggatgaccacaattaacggcaaggagctgaaggtggagggccagattacctactacaacagatacaagagacagaacgtagtcaaggacctgtccgtcgagctggatagactgagcgaagaatctgtgaacaacgacatctcctcctggacaaagggcagaagcggagaagctctgagcctcctgaagaaaagattctcccatagacccgtgcaggagaagttcgtgtgcctgaactgcggcttcgagacacacgcagccgagcaagccgccctgaacatcgccagatcctggctgttcctgcggagccaggagtacaagaaataccagacaaacaagacaaccggcaacaccgataagagagccttcgtcgagacctggcagtccttttaccggaagaagcttaaggaggtgtggaaacctgccgtgcggtctggcggatctggcggaggctccgcccagggcagcgtgatgttcagcgacgtgagcatcgacttcagccaggaggagtgggagtgcctgaacgacgaccagagggacctgtacagggacgtgatgctggagaactacagcaacctggtgagcatgggccactgcatcagcaagcccgacgtgatcagcttcctggagcagggcaaggagccctggctggtggacagggagcccaccaggtaccagtggcccgtgctggagagcaggggcggcccaagcagcggcgcccctcctcccagcggcggcagcccagccggctccccaacctctaccgaggagggcacctctgagtccgccacccccgagagcggccctggcacctccaccgagcccagcgagggcagcgcacccggcagccctgccggcagccccacctccacagaggagggaaccagcaccgagcccagcgaaggcagcgccccaggcaccagcaccgagcctagtgagcaggagattaaacggatcaacaagatcagaagaagacttgtgaaagacagcaacaccaagaaggccggcaagacaggccccatgaaaaccctgctggttagagtgatgacacccgatctgagagagcggctggaaaacctgagaaagaagcctgaaaatatcccccagcccatcagcaatacatctagagccaacctgaataagctgctgaccgattacaccgaaatgaagaaggcgatcctgcatgtgtactgggaagagttccagaaggaccctgtgggcctgatgagccgggtggcccagcctgccagcaagaagatcgatcagaacaagctgaaacctgagatggacgagaagggcaacctgaccaccgccggctttgcctgctctcagtgtggccagcccctgttcgtgtacaagctggagcaggtgtctgagaagggcaaggcttacaccaactacttcggacggtgcaatgtggccgagcacgaaaagctgatcctgctggcccagctgaagcccgagaaggatagcgacgaagccgtgacatatagcctgggaaagtttgggcagagggccctggatttctacagcattcatgtgaccaaggagtccacccaccccgtgaagcccctggcccagatcgccggaaacagatacgcctccggacctgtgggaaaggccctgagcgacgcatgtatgggcacaatcgcctccttcctgtctaagtaccaggacatcatcatcgaacaccagaaggtggtgaagggcaaccagaagagactggagagcctgcgggagctggccggcaaggaaaacctggaataccctagcgtgaccctgccacctcagcctcacaccaaggagggcgttgatgcctacaacgaagtgatcgcccgggtgcgaatgtgggtgaacctgaacctgtggcagaagctgaagctaagcagagatgatgccaagcctctgctgagactgaagggattcccttcctttcctctggtcgagagacaggccaacgaagtggactggtgggacatggtgtgtaacgtgaagaagctgatcaacgagaaaaaggaggatggcaaggtgttttggcagaatctggctggctacaagagacaggaagccctgagaccatacctgagcagcgaggaagatcggaagaagggaaagaaattcgctcggtaccagctgggcgacctgctgctgcacctggaaaagaagcacggcgaggactggggaaaggtgtacgacgaggcctgggagcggattgacaagaaagtggaaggcctgagcaagcacatcaagctggaagaggaacggagaagcgaggacgcccagagcaaggccgccctgaccgactggctgcgggctaaggccagcttcgtgatcgagggcctgaaggaggccgacaaggacgagttctgcagatgcgagctgaagctgcagaagtggtacggggacctgcggggaaagcccttcgccatcgaagccgagaacagcatcctggacatcagcggcttcagcaagcagtacaactgtgccttcatctggcagaaggacggcgtgaagaagctgaacctgtacctgatcatcaactacttcaagggcggcaagctgcggttcaagaagatcaaacctgaagccttcgaagccaacagattctacaccgtgatcaacaaaaagagcggcgagatcgtgcccatggaggtgaacttcaacttcgacgaccccaacctgatcatcctgcctctggcctttggcaagagacagggcagagaattcatctggaacgacctgctgtccctggaaaccggcagcctgaagctggccaacggaagagtgatcgagaagacactgtacaacagaagaacccggcaggatgagcctgccctgttcgtggccctgaccttcgagcggcgggaggtcctggactcctccaatatcaaaccaatgaacctgatcggcgtggcaagaggcgaaaacatccccgccgtgatcgccctgaccgaccccgagggctgcccactgagccggtttaaggatagcctgggaaacccaacccacatcctgagaatcggcgagagctataaggagaagcagcggaccatccaggccaagaaggaggtggagcagcggagagccggcggctacagccggaagtacgccagcaaagccaagaatctggcagacgatatggtgagaaacaccgctagagatctgctgtactacgccgtgacccaggatgccatgctgatcttcgccaacctgagccggggcttcggccggcagggcaagcggaccttcatggccgagagacagtacacacggatggaggactggctgaccgccaagctggcctacgagggcctgagcaagacctacctgtccaagacactggcccagtacacctccaagacatgcagcaactgtgggtttaccatcaccagcgccgactacgacagggtgctggagaagctgaagaagacagcaacaggctggatgaccacaattaacggcaaggagctgaaggtggagggccagattacctactacaacagatacaagagacagaacgtagtcaaggacctgtccgtcgagctggatagactgagcgaagaatctgtgaacaacgacatctcctcctggacaaagggcagaagcggagaagctctgagcctcctgaagaaaagattctcccatagacccgtgcaggagaagttcgtgtgcctgaactgcggcttcgagacacacgcagccgagcaagccgccctgaacatcgccagatcctggctgttcctgcggagccaggagtacaagaaataccagacaaacaagacaaccggcaacaccgataagagagccttcgtcgagacctggcagtccttttaccggaagaagcttaaggaggtgtggaaacctgccgtgcggtctggcggatctggcggaggctcctgcccagggcagcgtgatgttcagcgacgtgagcatcgacttcagccaggaggagtgggagtgcctgaacgacgaccagagggacctgtacagggacgtgatgctggagaactacagcaacctggtgagcatgggccactgcatcagcaagcccgacgtgatcagcttcctggagcagggcaaggagccctggctggtggacagggagcccaccaggtaccagtggcccgtgctggagagcaggggatctggctccggcagcggccccaagaaaaagagaaaagtctaagctgccttctgcggggcttgccttctggccatgcccttcttctctcccttgcacctgtacctcttggtctttgaataaagcctgagtaggaaggctagcaaaaaaaaaaaaaaaaaaaaaaaaaaaaaaaaaaaaaaaaaaaaaaaaaaaaaaaaaaaaaaaaaaaaaaaaaaaaaaaa

SEQ ID NO: 16117 - RNA, 9485 nt, synthetic construct
  source 1..9485: mol_type = other RNA
aggaaataagagagaaaagaagagtaagaagaaatataagagccaccatggcccctaagaagaagcgtaaagtgagccggatggaacgcctcgtctacgaggtgcggcagaagtgcagaaacatcgaggacatctgcatctcctgcggatctctgaacgtgaccctggagcacccactgttcatcggcggcatgtgccagaactgtaaaaactgttttctggagtgtgcctatcaatacgacgatgacggctaccagagctactgcaccatctgttgcggcggaagagaggtgctgatgtgtggaaataacaactgctgccggtgcttctgcgtggaatgcgtggacctgctggtgggccccggcgccgcccaggccgctattaaggaagatccttggaactgctacatgtgcggccacaagggcacatacggcctgctgagacggagagaggactggcctagcagactgcagatgttcttcgccaataaccacgaccaggagttcgacccccctaaggtgtaccctcccgtccccgccgagaagagaaagcccatccgggtcctgagcctgttcgatggcatcgccaccggtctgctggtgctgaaggacctgggcatccaggtggataggtacattgcctccgaggtgtgcgaggactccatcaccgtgggaatggtgcgtcatcagggcaagatcatgtacgtgggcgacgtgcggagcgtgacacagaagcatatccaggagtggggccctttcgacctggtgatcggcggcagcccttgcaatgacctgagcatcgtgaacccagcccggaagggcctgtacgagggaaccggcagactgttcttcgagttttacagactgctgcacgacgcccggcctaaggaaggcgacgaccggcccttcttttggctgttcgagaatgtggtggccatgggagtcagcgacaagcgggatattagccggttcctggagagcaaccccgtgatgatcgatgccaaggaagtgagcgccgcccaccgggccagatacttctggggcaatctgcctggcatgaacagacccctggccagcaccgtgaacgacaagctggagctgcaggagtgcctggagcacggccggatcgccaagttcagcaaggtgagaaccatcaccacccgaagcaacagcatcaaacaaggcaaggaccagcactttcctgtgttcatgaacgagaaggaggacatcctgtggtgtaccgagatggagagagtgttcgggttcccagtccactacacagatgtcagcaacatgtctagactggccagacagagactgctgggaagaagctggtccgtccctgtgatcagacacctgttcgcccctctgaaggagtacttcgcctgcgtgagcagcggcaacagcaacgccaacagccggggccccagcttctctagcggcctggtgccactgtccctgagagggagccacatgggccccatggagatctacaaaaccgtgagcgcctggaagcggcagcctgtgcgcgtgctgagcctgtttcggaatatcgataaagtcctgaaaagcctgggattcctggagagcggctctggctccggcggtggcaccctgaagtacgtggaggatgtgacaaacgtggtcagacgggatgtggagaagtggggccccttcgatctggtgtacggcagcacccaacccctgggcagctcttgtgaccggtgccctggctggtacatgtttcagttccaccggatcctgcagtacgccctgccgagacaggagtcccagcggccattcttttggattttcatggacaacttgctgctgaccgaggatgaccaggaaactaccactcggttcctgcagaccgaagccgtgaccctgcaggacgtgagaggccgggactaccagaacgccatgcgggtgtggtccaacatccctggactgaaaagcaagcacgcacctctgacccctaaagaagaggagtacctgcaggcccaggtgcggagcagaagcaagctggacgcccctaaggtggatctgctggtgaagaattgcctcctgcccctgagagagtacttcaagtatttcagccagaatagtctgcccctgggaggcagcggcggcggcgccctggtgacatttgaggacgtcgccgtgcggttcacccaggaggaatgggctctgctggatccttctcagaaaatcctgtaccgggacgtgatgagagagacataccggaatctgacctccgtgggcatcaactgggaatgttgggaccttgaagcctgcttcagaagcctgggaagaaacctgagagtgcaggtggtgaagagaaagtgcgagctgaccaacagcggcccctgcgccgagggcggcccaagcagcggcgcccctcctcccagcggcggcagcccagccggctccccaacctctaccgaggagggcacctctgagtccgccacccccgagagcggccctggcacctccaccgagcccagcgagggcagcgcacccggcagccctgccggcagccccacctccacagaggagggaaccagcaccgagcccagcgaaggcagcgccccaggcaccagcaccgagcctagtgagcaggagattaaacggatcaacaagatcagaagaagacttgtgaaagacagcaacaccaagaaggccggcaagacaggccccatgaaaaccctgctggttagagtgatgacacccgatctgagagagcggctggaaaacctgagaaagaagcctgaaaatatcccccagcccatcagcaatacatctagagccaacctgaataagctgctgaccgattacaccgaaatgaagaaggcgatcctgcatgtgtactgggaagagttccagaaggaccctgtgggcctgatgagccgggtggcccagcctgccagcaagaagatcgatcagaacaagctgaaacctgagatggacgagaagggcaacctgaccaccgccggctttgcctgctctcagtgtggccagcccctgttcgtgtacaagctggagcaggtgtctgagaagggcaaggcttacaccaactacttcggacggtgcaatgtggccgagcacgaaaagctgatcctgctggcccagctgaagcccgagaaggatagcgacgaagccgtgacatatagcctgggaaagtttgggcagagggccctggatttctacagcattcatgtgaccaaggagtccacccaccccgtgaagcccctggcccagatcgccggaaacagatacgcctccggacctgtgggaaaggccctgagcgacgcatgtatgggcacaatcgcctccttcctgtctaagtaccaggacatcatcatcgaacaccagaaggtggtgaagggcaaccagaagagactggagagcctgcgggagctggccggcaaggaaaacctggaataccctagcgtgaccctgccacctcagcctcacaccaaggagggcgttgatgcctacaacgaagtgatcgcccgggtgcgaatgtgggtgaacctgaacctgtggcagaagctgaagctaagcagagatgatgccaagcctctgctgagactgaagggattcccttcctttcctctggtcgagagacaggccaacgaagtggactggtgggacatggtgtgtaacgtgaagaagctgatcaacgagaaaaaggaggatggcaaggtgttttggcagaatctggctggctacaagagacaggaagccctgagaccatacctgagcagcgaggaagatcggaagaagggaaagaaattcgctcggtaccagctgggcgacctgctgctgcacctggaaaagaagcacggcgaggactggggaaaggtgtacgacgaggcctgggagcggattgacaagaaagtggaaggcctgagcaagcacatcaagctggaagaggaacggagaagcgaggacgcccagagcaaggccgccctgaccgactggctgcgggctaaggccagcttcgtgatcgagggcctgaaggaggccgacaaggacgagttctgcagatgcgagctgaagctgcagaagtggtacggggacctgcggggaaagcccttcgccatcgaagccgagaacagcatcctggacatcagcggcttcagcaagcagtacaactgtgccttcatctggcagaaggacggcgtgaagaagctgaacctgtacctgatcatcaactacttcaagggcggcaagctgcggttcaagaagatcaaacctgaagccttcgaagccaacagattctacaccgtgatcaacaaaaagagcggcgagatcgtgcccatggaggtgaacttcaacttcgacgaccccaacctgatcatcctgcctctggcctttggcaagagacagggcagagaattcatctggaacgacctgctgtccctggaaaccggcagcctgaagctggccaacggaagagtgatcgagaagacactgtacaacagaagaacccggcaggatgagcctgccctgttcgtggccctgaccttcgagcggcgggaggtcctggactcctccaatatcaaaccaatgaacctgatcggcgtggcaagaggcgaaaacatccccgccgtgatcgccctgaccgaccccgagggctgcccactgagccggtttaaggatagcctgggaaacccaacccacatcctgagaatcggcgagagctataaggagaagcagcggaccatccaggccaagaaggaggtggagcagcggagagccggcggctacagccggaagtacgccagcaaagccaagaatctggcagacgatatggtgagaaacaccgctagagatctgctgtactacgccgtgacccaggatgccatgctgatcttcgccaacctgagccggggcttcggccggcagggcaagcggaccttcatggccgagagacagtacacacggatggaggactggctgaccgccaagctggcctacgagggcctgagcaagacctacctgtccaagacactggcccagtacacctccaagacatgcagcaactgtgggtttaccatcaccagcgccgactacgacagggtgctggagaagctgaagaagacagcaacaggctggatgaccacaattaacggcaaggagctgaaggtggagggccagattacctactacaacagatacaagagacagaacgtagtcaaggacctgtccgtcgagctggatagactgagcgaagaatctgtgaacaacgacatctcctcctggacaaagggcagaagcggagaagctctgagcctcctgaagaaaagattctcccatagacccgtgcaggagaagttcgtgtgcctgaactgcggcttcgagacacacgcagccgagcaagccgccctgaacatcgccagatcctggctgttcctgcggagccaggagtacaagaaataccagacaaacaagacaaccggcaacaccgataagagagccttcgtcgagacctggcagtccttttaccggaagaagcttaaggaggtgtggaaacctgccgtgcggtctggcggatctggcggaggctccccccaggagcccgtgaccttcgaggacgtggccgtgtacttcacccagaaccagtgggccagcctggaccccacccagagggccctgtacagggaggtgatgctggagaactacgccagcgtggccagcctggtggccttccccttccccaagcccgacctggtgagccagctggagaggggcgaggccccctggagccccgacccctgggaggccgaggtgctgaagggcacctgccccggcggcggcccaagcagcggcgcccctcctcccagcggcggcagcccagccggctccccaacctctaccgaggagggcacctctgagtccgccacccccgagagcggccctggcacctccaccgagcccagcgagggcagcgcacccggcagccctgccggcagccccacctccacagaggagggaaccagcaccgagcccagcgaaggcagcgccccaggcaccagcaccgagcctagtgagcaggagattaaacggatcaacaagatcagaagaagacttgtgaaagacagcaacaccaagaaggccggcaagacaggccccatgaaaaccctgctggttagagtgatgacacccgatctgagagagcggctggaaaacctgagaaagaagcctgaaaatatcccccagcccatcagcaatacatctagagccaacctgaataagctgctgaccgattacaccgaaatgaagaaggcgatcctgcatgtgtactgggaagagttccagaaggaccctgtgggcctgatgagccgggtggcccagcctgccagcaagaagatcgatcagaacaagctgaaacctgagatggacgagaagggcaacctgaccaccgccggctttgcctgctctcagtgtggccagcccctgttcgtgtacaagctggagcaggtgtctgagaagggcaaggcttacaccaactacttcggacggtgcaatgtggccgagcacgaaaagctgatcctgctggcccagctgaagcccgagaaggatagcgacgaagccgtgacatatagcctgggaaagtttgggcagagggccctggatttctacagcattcatgtgaccaaggagtccacccaccccgtgaagcccctggcccagatcgccggaaacagatacgcctccggacctgtgggaaaggccctgagcgacgcatgtatgggcacaatcgcctccttcctgtctaagtaccaggacatcatcatcgaacaccagaaggtggtgaagggcaaccagaagagactggagagcctgcgggagctggccggcaaggaaaacctggaataccctagcgtgaccctgccacctcagcctcacaccaaggagggcgttgatgcctacaacgaagtgatcgcccgggtgcgaatgtgggtgaacctgaacctgtggcagaagctgaagctaagcagagatgatgccaagcctctgctgagactgaagggattcccttcctttcctctggtcgagagacaggccaacgaagtggactggtgggacatggtgtgtaacgtgaagaagctgatcaacgagaaaaaggaggatggcaaggtgttttggcagaatctggctggctacaagagacaggaagccctgagaccatacctgagcagcgaggaagatcggaagaagggaaagaaattcgctcggtaccagctgggcgacctgctgctgcacctggaaaagaagcacggcgaggactggggaaaggtgtacgacgaggcctgggagcggattgacaagaaagtggaaggcctgagcaagcacatcaagctggaagaggaacggagaagcgaggacgcccagagcaaggccgccctgaccgactggctgcgggctaaggccagcttcgtgatcgagggcctgaaggaggccgacaaggacgagttctgcagatgcgagctgaagctgcagaagtggtacggggacctgcggggaaagcccttcgccatcgaagccgagaacagcatcctggacatcagcggcttcagcaagcagtacaactgtgccttcatctggcagaaggacggcgtgaagaagctgaacctgtacctgatcatcaactacttcaagggcggcaagctgcggttcaagaagatcaaacctgaagccttcgaagccaacagattctacaccgtgatcaacaaaaagagcggcgagatcgtgcccatggaggtgaacttcaacttcgacgaccccaacctgatcatcctgcctctggcctttggcaagagacagggcagagaattcatctggaacgacctgctgtccctggaaaccggcagcctgaagctggccaacggaagagtgatcgagaagacactgtacaacagaagaacccggcaggatgagcctgccctgttcgtggccctgaccttcgagcggcgggaggtcctggactcctccaatatcaaaccaatgaacctgatcggcgtggcaagaggcgaaaacatccccgccgtgatcgccctgaccgaccccgagggctgcccactgagccggtttaaggatagcctgggaaacccaacccacatcctgagaatcggcgagagctataaggagaagcagcggaccatccaggccaagaaggaggtggagcagcggagagccggcggctacagccggaagtacgccagcaaagccaagaatctggcagacgatatggtgagaaacaccgctagagatctgctgtactacgccgtgacccaggatgccatgctgatcttcgccaacctgagccggggcttcggccggcagggcaagcggaccttcatggccgagagacagtacacacggatggaggactggctgaccgccaagctggcctacgagggcctgagcaagacctacctgtccaagacactggcccagtacacctccaagacatgcagcaactgtgggtttaccatcaccagcgccgactacgacagggtgctggagaagctgaagaagacagcaacaggctggatgaccacaattaacggcaaggagctgaaggtggagggccagattacctactacaacagatacaagagacagaacgtagtcaaggacctgtccgtcgagctggatagactgagcgaagaatctgtgaacaacgacatctcctcctggacaaagggcagaagcggagaagctctgagcctcctgaagaaaagattctcccatagacccgtgcaggagaagttcgtgtgcctgaactgcggcttcgagacacacgcagccgagcaagccgccctgaacatcgccagatcctggctgttcctgcggagccaggagtacaagaaataccagacaaacaagacaaccggcaacaccgataagagagccttcgtcgagacctggcagtccttttaccggaagaagcttaaggaggtgtggaaacctgccgtgcggtctggcggatctggcggaggctcctccccaggagcccgtgaccttcgaggacgtggccgtgtacttcacccagaaccagtgggccagcctggaccccacccagagggccctgtacagggaggtgatgctggagaactacgccagcgtggccagcctggtggccttccccttccccaagcccgacctggtgagccagctggagaggggcgaggccccctggagccccgacccctgggaggccgaggtgctgaagggcacctgccccggcggatctggctccggcagcggccccaagaaaaagagaaaagtctaagctgccttctgcggggcttgccttctggccatgcccttcttctctcccttgcacctgtacctcttggtctttgaataaagcctgagtaggaaggctagcaaaaaaaaaaaaaaaaaaaaaaaaaaaaaaaaaaaaaaaaaaaaaaaaaaaaaaaaaaaaaaaaaaaaaaaaaaaaaaaa

SEQ ID NO: 16118 - RNA, 9485 nt, synthetic construct
  source 1..9485: mol_type = other RNA
aggaaataagagagaaaagaagagtaagaagaaatataagagccaccatggcccctaagaagaagcgtaaagtgagccggatggaacgcctcgtctacgaggtgcggcagaagtgcagaaacatcgaggacatctgcatctcctgcggatctctgaacgtgaccctggagcacccactgttcatcggcggcatgtgccagaactgtaaaaactgttttctggagtgtgcctatcaatacgacgatgacggctaccagagctactgcaccatctgttgcggcggaagagaggtgctgatgtgtggaaataacaactgctgccggtgcttctgcgtggaatgcgtggacctgctggtgggccccggcgccgcccaggccgctattaaggaagatccttggaactgctacatgtgcggccacaagggcacatacggcctgctgagacggagagaggactggcctagcagactgcagatgttcttcgccaataaccacgaccaggagttcgacccccctaaggtgtaccctcccgtccccgccgagaagagaaagcccatccgggtcctgagcctgttcgatggcatcgccaccggtctgctggtgctgaaggacctgggcatccaggtggataggtacattgcctccgaggtgtgcgaggactccatcaccgtgggaatggtgcgtcatcagggcaagatcatgtacgtgggcgacgtgcggagcgtgacacagaagcatatccaggagtggggccctttcgacctggtgatcggcggcagcccttgcaatgacctgagcatcgtgaacccagcccggaagggcctgtacgagggaaccggcagactgttcttcgagttttacagactgctgcacgacgcccggcctaaggaaggcgacgaccggcccttcttttggctgttcgagaatgtggtggccatgggagtcagcgacaagcgggatattagccggttcctggagagcaaccccgtgatgatcgatgccaaggaagtgagcgccgcccaccgggccagatacttctggggcaatctgcctggcatgaacagacccctggccagcaccgtgaacgacaagctggagctgcaggagtgcctggagcacggccggatcgccaagttcagcaaggtgagaaccatcaccacccgaagcaacagcatcaaacaaggcaaggaccagcactttcctgtgttcatgaacgagaaggaggacatcctgtggtgtaccgagatggagagagtgttcgggttcccagtccactacacagatgtcagcaacatgtctagactggccagacagagactgctgggaagaagctggtccgtccctgtgatcagacacctgttcgcccctctgaaggagtacttcgcctgcgtgagcagcggcaacagcaacgccaacagccggggccccagcttctctagcggcctggtgccactgtccctgagagggagccacatgggccccatggagatctacaaaaccgtgagcgcctggaagcggcagcctgtgcgcgtgctgagcctgtttcggaatatcgataaagtcctgaaaagcctgggattcctggagagcggctctggctccggcggtggcaccctgaagtacgtggaggatgtgacaaacgtggtcagacgggatgtggagaagtggggccccttcgatctggtgtacggcagcacccaacccctgggcagctcttgtgaccggtgccctggctggtacatgtttcagttccaccggatcctgcagtacgccctgccgagacaggagtcccagcggccattcttttggattttcatggacaacttgctgctgaccgaggatgaccaggaaactaccactcggttcctgcagaccgaagccgtgaccctgcaggacgtgagaggccgggactaccagaacgccatgcgggtgtggtccaacatccctggactgaaaagcaagcacgcacctctgacccctaaagaagaggagtacctgcaggcccaggtgcggagcagaagcaagctggacgcccctaaggtggatctgctggtgaagaattgcctcctgcccctgagagagtacttcaagtatttcagccagaatagtctgcccctgggaggcagcggcggcggcgccctggtgacatttgaggacgtcgccgtgcggttcacccaggaggaatgggctctgctggatccttctcagaaaatcctgtaccgggacgtgatgagagagacataccggaatctgacctccgtgggcatcaactgggaatgttgggaccttgaagcctgcttcagaagcctgggaagaaacctgagagtgcaggtggtgaagagaaagtgcgagctgaccaacagcggcccctgcgccgagggcggcccaagcagcggcgcccctcctcccagcggcggcagcccagccggctccccaacctctaccgaggagggcacctctgagtccgccacccccgagagcggccctggcacctccaccgagcccagcgagggcagcgcacccggcagccctgccggcagccccacctccacagaggagggaaccagcaccgagcccagcgaaggcagcgccccaggcaccagcaccgagcctagtgagcaggagattaaacggatcaacaagatcagaagaagacttgtgaaagacagcaacaccaagaaggccggcaagacaggccccatgaaaaccctgctggttagagtgatgacacccgatctgagagagcggctggaaaacctgagaaagaagcctgaaaatatcccccagcccatcagcaatacatctagagccaacctgaataagctgctgaccgattacaccgaaatgaagaaggcgatcctgcatgtgtactgggaagagttccagaaggaccctgtgggcctgatgagccgggtggcccagcctgccagcaagaagatcgatcagaacaagctgaaacctgagatggacgagaagggcaacctgaccaccgccggctttgcctgctctcagtgtggccagcccctgttcgtgtacaagctggagcaggtgtctgagaagggcaaggcttacaccaactacttcggacggtgcaatgtggccgagcacgaaaagctgatcctgctggcccagctgaagcccgagaaggatagcgacgaagccgtgacatatagcctgggaaagtttgggcagagggccctggatttctacagcattcatgtgaccaaggagtccacccaccccgtgaagcccctggcccagatcgccggaaacagatacgcctccggacctgtgggaaaggccctgagcgacgcatgtatgggcacaatcgcctccttcctgtctaagtaccaggacatcatcatcgaacaccagaaggtggtgaagggcaaccagaagagactggagagcctgcgggagctggccggcaaggaaaacctggaataccctagcgtgaccctgccacctcagcctcacaccaaggagggcgttgatgcctacaacgaagtgatcgcccgggtgcgaatgtgggtgaacctgaacctgtggcagaagctgaagctaagcagagatgatgccaagcctctgctgagactgaagggattcccttcctttcctctggtcgagagacaggccaacgaagtggactggtgggacatggtgtgtaacgtgaagaagctgatcaacgagaaaaaggaggatggcaaggtgttttggcagaatctggctggctacaagagacaggaagccctgagaccatacctgagcagcgaggaagatcggaagaagggaaagaaattcgctcggtaccagctgggcgacctgctgctgcacctggaaaagaagcacggcgaggactggggaaaggtgtacgacgaggcctgggagcggattgacaagaaagtggaaggcctgagcaagcacatcaagctggaagaggaacggagaagcgaggacgcccagagcaaggccgccctgaccgactggctgcgggctaaggccagcttcgtgatcgagggcctgaaggaggccgacaaggacgagttctgcagatgcgagctgaagctgcagaagtggtacggggacctgcggggaaagcccttcgccatcgaagccgagaacagcatcctggacatcagcggcttcagcaagcagtacaactgtgccttcatctggcagaaggacggcgtgaagaagctgaacctgtacctgatcatcaactacttcaagggcggcaagctgcggttcaagaagatcaaacctgaagccttcgaagccaacagattctacaccgtgatcaacaaaaagagcggcgagatcgtgcccatggaggtgaacttcaacttcgacgaccccaacctgatcatcctgcctctggcctttggcaagagacagggcagagaattcatctggaacgacctgctgtccctggaaaccggcagcctgaagctggccaacggaagagtgatcgagaagacactgtacaacagaagaacccggcaggatgagcctgccctgttcgtggccctgaccttcgagcggcgggaggtcctggactcctccaatatcaaaccaatgaacctgatcggcgtggcaagaggcgaaaacatccccgccgtgatcgccctgaccgaccccgagggctgcccactgagccggtttaaggatagcctgggaaacccaacccacatcctgagaatcggcgagagctataaggagaagcagcggaccatccaggccaagaaggaggtggagcagcggagagccggcggctacagccggaagtacgccagcaaagccaagaatctggcagacgatatggtgagaaacaccgctagagatctgctgtactacgccgtgacccaggatgccatgctgatcttcgccaacctgagccggggcttcggccggcagggcaagcggaccttcatggccgagagacagtacacacggatggaggactggctgaccgccaagctggcctacgagggcctgagcaagacctacctgtccaagacactggcccagtacacctccaagacatgcagcaactgtgggtttaccatcaccagcgccgactacgacagggtgctggagaagctgaagaagacagcaacaggctggatgaccacaattaacggcaaggagctgaaggtggagggccagattacctactacaacagatacaagagacagaacgtagtcaaggacctgtccgtcgagctggatagactgagcgaagaatctgtgaacaacgacatctcctcctggacaaagggcagaagcggagaagctctgagcctcctgaagaaaagattctcccatagacccgtgcaggagaagttcgtgtgcctgaactgcggcttcgagacacacgcagccgagcaagccgccctgaacatcgccagatcctggctgttcctgcggagccaggagtacaagaaataccagacaaacaagacaaccggcaacaccgataagagagccttcgtcgagacctggcagtccttttaccggaagaagcttaaggaggtgtggaaacctgccgtgcggtctggcggatctggcggaggctccatgggcctggtgagcttcgaggacatcgccgtgtacttcaacctggaggagtggcaggacctggacaccgcccagaggaccctgtacagggacgtgatgctggagacctacagcagcctggtgttcctggacccctgcatcgccaagcccaagctgatcttcaacctggagaggggcttcggcccctggagcctggccgaggccagcagcaggagcctgcccggcgtgcacaacgtgagcaccggcggcccaagcagcggcgcccctcctcccagcggcggcagcccagccggctccccaacctctaccgaggagggcacctctgagtccgccacccccgagagcggccctggcacctccaccgagcccagcgagggcagcgcacccggcagccctgccggcagccccacctccacagaggagggaaccagcaccgagcccagcgaaggcagcgccccaggcaccagcaccgagcctagtgagcaggagattaaacggatcaacaagatcagaagaagacttgtgaaagacagcaacaccaagaaggccggcaagacaggccccatgaaaaccctgctggttagagtgatgacacccgatctgagagagcggctggaaaacctgagaaagaagcctgaaaatatcccccagcccatcagcaatacatctagagccaacctgaataagctgctgaccgattacaccgaaatgaagaaggcgatcctgcatgtgtactgggaagagttccagaaggaccctgtgggcctgatgagccgggtggcccagcctgccagcaagaagatcgatcagaacaagctgaaacctgagatggacgagaagggcaacctgaccaccgccggctttgcctgctctcagtgtggccagcccctgttcgtgtacaagctggagcaggtgtctgagaagggcaaggcttacaccaactacttcggacggtgcaatgtggccgagcacgaaaagctgatcctgctggcccagctgaagcccgagaaggatagcgacgaagccgtgacatatagcctgggaaagtttgggcagagggccctggatttctacagcattcatgtgaccaaggagtccacccaccccgtgaagcccctggcccagatcgccggaaacagatacgcctccggacctgtgggaaaggccctgagcgacgcatgtatgggcacaatcgcctccttcctgtctaagtaccaggacatcatcatcgaacaccagaaggtggtgaagggcaaccagaagagactggagagcctgcgggagctggccggcaaggaaaacctggaataccctagcgtgaccctgccacctcagcctcacaccaaggagggcgttgatgcctacaacgaagtgatcgcccgggtgcgaatgtgggtgaacctgaacctgtggcagaagctgaagctaagcagagatgatgccaagcctctgctgagactgaagggattcccttcctttcctctggtcgagagacaggccaacgaagtggactggtgggacatggtgtgtaacgtgaagaagctgatcaacgagaaaaaggaggatggcaaggtgttttggcagaatctggctggctacaagagacaggaagccctgagaccatacctgagcagcgaggaagatcggaagaagggaaagaaattcgctcggtaccagctgggcgacctgctgctgcacctggaaaagaagcacggcgaggactggggaaaggtgtacgacgaggcctgggagcggattgacaagaaagtggaaggcctgagcaagcacatcaagctggaagaggaacggagaagcgaggacgcccagagcaaggccgccctgaccgactggctgcgggctaaggccagcttcgtgatcgagggcctgaaggaggccgacaaggacgagttctgcagatgcgagctgaagctgcagaagtggtacggggacctgcggggaaagcccttcgccatcgaagccgagaacagcatcctggacatcagcggcttcagcaagcagtacaactgtgccttcatctggcagaaggacggcgtgaagaagctgaacctgtacctgatcatcaactacttcaagggcggcaagctgcggttcaagaagatcaaacctgaagccttcgaagccaacagattctacaccgtgatcaacaaaaagagcggcgagatcgtgcccatggaggtgaacttcaacttcgacgaccccaacctgatcatcctgcctctggcctttggcaagagacagggcagagaattcatctggaacgacctgctgtccctggaaaccggcagcctgaagctggccaacggaagagtgatcgagaagacactgtacaacagaagaacccggcaggatgagcctgccctgttcgtggccctgaccttcgagcggcgggaggtcctggactcctccaatatcaaaccaatgaacctgatcggcgtggcaagaggcgaaaacatccccgccgtgatcgccctgaccgaccccgagggctgcccactgagccggtttaaggatagcctgggaaacccaacccacatcctgagaatcggcgagagctataaggagaagcagcggaccatccaggccaagaaggaggtggagcagcggagagccggcggctacagccggaagtacgccagcaaagccaagaatctggcagacgatatggtgagaaacaccgctagagatctgctgtactacgccgtgacccaggatgccatgctgatcttcgccaacctgagccggggcttcggccggcagggcaagcggaccttcatggccgagagacagtacacacggatggaggactggctgaccgccaagctggcctacgagggcctgagcaagacctacctgtccaagacactggcccagtacacctccaagacatgcagcaactgtgggtttaccatcaccagcgccgactacgacagggtgctggagaagctgaagaagacagcaacaggctggatgaccacaattaacggcaaggagctgaaggtggagggccagattacctactacaacagatacaagagacagaacgtagtcaaggacctgtccgtcgagctggatagactgagcgaagaatctgtgaacaacgacatctcctcctggacaaagggcagaagcggagaagctctgagcctcctgaagaaaagattctcccatagacccgtgcaggagaagttcgtgtgcctgaactgcggcttcgagacacacgcagccgagcaagccgccctgaacatcgccagatcctggctgttcctgcggagccaggagtacaagaaataccagacaaacaagacaaccggcaacaccgataagagagccttcgtcgagacctggcagtccttttaccggaagaagcttaaggaggtgtggaaacctgccgtgcggtctggcggatctggcggaggctcctatgggcctggtgagcttcgaggacatcgccgtgtacttcaacctggaggagtggcaggacctggacaccgcccagaggaccctgtacagggacgtgatgctggagacctacagcagcctggtgttcctggacccctgcatcgccaagcccaagctgatcttcaacctggagaggggcttcggcccctggagcctggccgaggccagcagcaggagcctgcccggcgtgcacaacgtgagcaccggatctggctccggcagcggccccaagaaaaagagaaaagtctaagctgccttctgcggggcttgccttctggccatgcccttcttctctcccttgcacctgtacctcttggtctttgaataaagcctgagtaggaaggctagcaaaaaaaaaaaaaaaaaaaaaaaaaaaaaaaaaaaaaaaaaaaaaaaaaaaaaaaaaaaaaaaaaaaaaaaaaaaaaaaa

SEQ ID NO: 16119 - RNA, 9485 nt, synthetic construct
  source 1..9485: mol_type = other RNA
aggaaataagagagaaaagaagagtaagaagaaatataagagccaccatggcccctaagaagaagcgtaaagtgagccggatggaacgcctcgtctacgaggtgcggcagaagtgcagaaacatcgaggacatctgcatctcctgcggatctctgaacgtgaccctggagcacccactgttcatcggcggcatgtgccagaactgtaaaaactgttttctggagtgtgcctatcaatacgacgatgacggctaccagagctactgcaccatctgttgcggcggaagagaggtgctgatgtgtggaaataacaactgctgccggtgcttctgcgtggaatgcgtggacctgctggtgggccccggcgccgcccaggccgctattaaggaagatccttggaactgctacatgtgcggccacaagggcacatacggcctgctgagacggagagaggactggcctagcagactgcagatgttcttcgccaataaccacgaccaggagttcgacccccctaaggtgtaccctcccgtccccgccgagaagagaaagcccatccgggtcctgagcctgttcgatggcatcgccaccggtctgctggtgctgaaggacctgggcatccaggtggataggtacattgcctccgaggtgtgcgaggactccatcaccgtgggaatggtgcgtcatcagggcaagatcatgtacgtgggcgacgtgcggagcgtgacacagaagcatatccaggagtggggccctttcgacctggtgatcggcggcagcccttgcaatgacctgagcatcgtgaacccagcccggaagggcctgtacgagggaaccggcagactgttcttcgagttttacagactgctgcacgacgcccggcctaaggaaggcgacgaccggcccttcttttggctgttcgagaatgtggtggccatgggagtcagcgacaagcgggatattagccggttcctggagagcaaccccgtgatgatcgatgccaaggaagtgagcgccgcccaccgggccagatacttctggggcaatctgcctggcatgaacagacccctggccagcaccgtgaacgacaagctggagctgcaggagtgcctggagcacggccggatcgccaagttcagcaaggtgagaaccatcaccacccgaagcaacagcatcaaacaaggcaaggaccagcactttcctgtgttcatgaacgagaaggaggacatcctgtggtgtaccgagatggagagagtgttcgggttcccagtccactacacagatgtcagcaacatgtctagactggccagacagagactgctgggaagaagctggtccgtccctgtgatcagacacctgttcgcccctctgaaggagtacttcgcctgcgtgagcagcggcaacagcaacgccaacagccggggccccagcttctctagcggcctggtgccactgtccctgagagggagccacatgggccccatggagatctacaaaaccgtgagcgcctggaagcggcagcctgtgcgcgtgctgagcctgtttcggaatatcgataaagtcctgaaaagcctgggattcctggagagcggctctggctccggcggtggcaccctgaagtacgtggaggatgtgacaaacgtggtcagacgggatgtggagaagtggggccccttcgatctggtgtacggcagcacccaacccctgggcagctcttgtgaccggtgccctggctggtacatgtttcagttccaccggatcctgcagtacgccctgccgagacaggagtcccagcggccattcttttggattttcatggacaacttgctgctgaccgaggatgaccaggaaactaccactcggttcctgcagaccgaagccgtgaccctgcaggacgtgagaggccgggactaccagaacgccatgcgggtgtggtccaacatccctggactgaaaagcaagcacgcacctctgacccctaaagaagaggagtacctgcaggcccaggtgcggagcagaagcaagctggacgcccctaaggtggatctgctggtgaagaattgcctcctgcccctgagagagtacttcaagtatttcagccagaatagtctgcccctgggaggcagcggcggcggcgccctggtgacatttgaggacgtcgccgtgcggttcacccaggaggaatgggctctgctggatccttctcagaaaatcctgtaccgggacgtgatgagagagacataccggaatctgacctccgtgggcatcaactgggaatgttgggaccttgaagcctgcttcagaagcctgggaagaaacctgagagtgcaggtggtgaagagaaagtgcgagctgaccaacagcggcccctgcgccgagggcggcccaagcagcggcgcccctcctcccagcggcggcagcccagccggctccccaacctctaccgaggagggcacctctgagtccgccacccccgagagcggccctggcacctccaccgagcccagcgagggcagcgcacccggcagccctgccggcagccccacctccacagaggagggaaccagcaccgagcccagcgaaggcagcgccccaggcaccagcaccgagcctagtgagcaggagattaaacggatcaacaagatcagaagaagacttgtgaaagacagcaacaccaagaaggccggcaagacaggccccatgaaaaccctgctggttagagtgatgacacccgatctgagagagcggctggaaaacctgagaaagaagcctgaaaatatcccccagcccatcagcaatacatctagagccaacctgaataagctgctgaccgattacaccgaaatgaagaaggcgatcctgcatgtgtactgggaagagttccagaaggaccctgtgggcctgatgagccgggtggcccagcctgccagcaagaagatcgatcagaacaagctgaaacctgagatggacgagaagggcaacctgaccaccgccggctttgcctgctctcagtgtggccagcccctgttcgtgtacaagctggagcaggtgtctgagaagggcaaggcttacaccaactacttcggacggtgcaatgtggccgagcacgaaaagctgatcctgctggcccagctgaagcccgagaaggatagcgacgaagccgtgacatatagcctgggaaagtttgggcagagggccctggatttctacagcattcatgtgaccaaggagtccacccaccccgtgaagcccctggcccagatcgccggaaacagatacgcctccggacctgtgggaaaggccctgagcgacgcatgtatgggcacaatcgcctccttcctgtctaagtaccaggacatcatcatcgaacaccagaaggtggtgaagggcaaccagaagagactggagagcctgcgggagctggccggcaaggaaaacctggaataccctagcgtgaccctgccacctcagcctcacaccaaggagggcgttgatgcctacaacgaagtgatcgcccgggtgcgaatgtgggtgaacctgaacctgtggcagaagctgaagctaagcagagatgatgccaagcctctgctgagactgaagggattcccttcctttcctctggtcgagagacaggccaacgaagtggactggtgggacatggtgtgtaacgtgaagaagctgatcaacgagaaaaaggaggatggcaaggtgttttggcagaatctggctggctacaagagacaggaagccctgagaccatacctgagcagcgaggaagatcggaagaagggaaagaaattcgctcggtaccagctgggcgacctgctgctgcacctggaaaagaagcacggcgaggactggggaaaggtgtacgacgaggcctgggagcggattgacaagaaagtggaaggcctgagcaagcacatcaagctggaagaggaacggagaagcgaggacgcccagagcaaggccgccctgaccgactggctgcgggctaaggccagcttcgtgatcgagggcctgaaggaggccgacaaggacgagttctgcagatgcgagctgaagctgcagaagtggtacggggacctgcggggaaagcccttcgccatcgaagccgagaacagcatcctggacatcagcggcttcagcaagcagtacaactgtgccttcatctggcagaaggacggcgtgaagaagctgaacctgtacctgatcatcaactacttcaagggcggcaagctgcggttcaagaagatcaaacctgaagccttcgaagccaacagattctacaccgtgatcaacaaaaagagcggcgagatcgtgcccatggaggtgaacttcaacttcgacgaccccaacctgatcatcctgcctctggcctttggcaagagacagggcagagaattcatctggaacgacctgctgtccctggaaaccggcagcctgaagctggccaacggaagagtgatcgagaagacactgtacaacagaagaacccggcaggatgagcctgccctgttcgtggccctgaccttcgagcggcgggaggtcctggactcctccaatatcaaaccaatgaacctgatcggcgtggcaagaggcgaaaacatccccgccgtgatcgccctgaccgaccccgagggctgcccactgagccggtttaaggatagcctgggaaacccaacccacatcctgagaatcggcgagagctataaggagaagcagcggaccatccaggccaagaaggaggtggagcagcggagagccggcggctacagccggaagtacgccagcaaagccaagaatctggcagacgatatggtgagaaacaccgctagagatctgctgtactacgccgtgacccaggatgccatgctgatcttcgccaacctgagccggggcttcggccggcagggcaagcggaccttcatggccgagagacagtacacacggatggaggactggctgaccgccaagctggcctacgagggcctgagcaagacctacctgtccaagacactggcccagtacacctccaagacatgcagcaactgtgggtttaccatcaccagcgccgactacgacagggtgctggagaagctgaagaagacagcaacaggctggatgaccacaattaacggcaaggagctgaaggtggagggccagattacctactacaacagatacaagagacagaacgtagtcaaggacctgtccgtcgagctggatagactgagcgaagaatctgtgaacaacgacatctcctcctggacaaagggcagaagcggagaagctctgagcctcctgaagaaaagattctcccatagacccgtgcaggagaagttcgtgtgcctgaactgcggcttcgagacacacgcagccgagcaagccgccctgaacatcgccagatcctggctgttcctgcggagccaggagtacaagaaataccagacaaacaagacaaccggcaacaccgataagagagccttcgtcgagacctggcagtccttttaccggaagaagcttaaggaggtgtggaaacctgccgtgcggtctggcggatctggcggaggctccatggagagcctgaccctggaggacgtggccgtggacttcacctgggaggagtggcagttcctgagccccgcccagaaggacctgtacagggacgtgatgctggagaactacagcaacctggtggccgtgggctaccaggccaggaagcccgacgccctgagcaagctggagaggggcgaggagccctgcaccaccgaggacgagatctacgccaggatctgcagcgacagcggcggcgccagcggcggcccaagcagcggcgcccctcctcccagcggcggcagcccagccggctccccaacctctaccgaggagggcacctctgagtccgccacccccgagagcggccctggcacctccaccgagcccagcgagggcagcgcacccggcagccctgccggcagccccacctccacagaggagggaaccagcaccgagcccagcgaaggcagcgccccaggcaccagcaccgagcctagtgagcaggagattaaacggatcaacaagatcagaagaagacttgtgaaagacagcaacaccaagaaggccggcaagacaggccccatgaaaaccctgctggttagagtgatgacacccgatctgagagagcggctggaaaacctgagaaagaagcctgaaaatatcccccagcccatcagcaatacatctagagccaacctgaataagctgctgaccgattacaccgaaatgaagaaggcgatcctgcatgtgtactgggaagagttccagaaggaccctgtgggcctgatgagccgggtggcccagcctgccagcaagaagatcgatcagaacaagctgaaacctgagatggacgagaagggcaacctgaccaccgccggctttgcctgctctcagtgtggccagcccctgttcgtgtacaagctggagcaggtgtctgagaagggcaaggcttacaccaactacttcggacggtgcaatgtggccgagcacgaaaagctgatcctgctggcccagctgaagcccgagaaggatagcgacgaagccgtgacatatagcctgggaaagtttgggcagagggccctggatttctacagcattcatgtgaccaaggagtccacccaccccgtgaagcccctggcccagatcgccggaaacagatacgcctccggacctgtgggaaaggccctgagcgacgcatgtatgggcacaatcgcctccttcctgtctaagtaccaggacatcatcatcgaacaccagaaggtggtgaagggcaaccagaagagactggagagcctgcgggagctggccggcaaggaaaacctggaataccctagcgtgaccctgccacctcagcctcacaccaaggagggcgttgatgcctacaacgaagtgatcgcccgggtgcgaatgtgggtgaacctgaacctgtggcagaagctgaagctaagcagagatgatgccaagcctctgctgagactgaagggattcccttcctttcctctggtcgagagacaggccaacgaagtggactggtgggacatggtgtgtaacgtgaagaagctgatcaacgagaaaaaggaggatggcaaggtgttttggcagaatctggctggctacaagagacaggaagccctgagaccatacctgagcagcgaggaagatcggaagaagggaaagaaattcgctcggtaccagctgggcgacctgctgctgcacctggaaaagaagcacggcgaggactggggaaaggtgtacgacgaggcctgggagcggattgacaagaaagtggaaggcctgagcaagcacatcaagctggaagaggaacggagaagcgaggacgcccagagcaaggccgccctgaccgactggctgcgggctaaggccagcttcgtgatcgagggcctgaaggaggccgacaaggacgagttctgcagatgcgagctgaagctgcagaagtggtacggggacctgcggggaaagcccttcgccatcgaagccgagaacagcatcctggacatcagcggcttcagcaagcagtacaactgtgccttcatctggcagaaggacggcgtgaagaagctgaacctgtacctgatcatcaactacttcaagggcggcaagctgcggttcaagaagatcaaacctgaagccttcgaagccaacagattctacaccgtgatcaacaaaaagagcggcgagatcgtgcccatggaggtgaacttcaacttcgacgaccccaacctgatcatcctgcctctggcctttggcaagagacagggcagagaattcatctggaacgacctgctgtccctggaaaccggcagcctgaagctggccaacggaagagtgatcgagaagacactgtacaacagaagaacccggcaggatgagcctgccctgttcgtggccctgaccttcgagcggcgggaggtcctggactcctccaatatcaaaccaatgaacctgatcggcgtggcaagaggcgaaaacatccccgccgtgatcgccctgaccgaccccgagggctgcccactgagccggtttaaggatagcctgggaaacccaacccacatcctgagaatcggcgagagctataaggagaagcagcggaccatccaggccaagaaggaggtggagcagcggagagccggcggctacagccggaagtacgccagcaaagccaagaatctggcagacgatatggtgagaaacaccgctagagatctgctgtactacgccgtgacccaggatgccatgctgatcttcgccaacctgagccggggcttcggccggcagggcaagcggaccttcatggccgagagacagtacacacggatggaggactggctgaccgccaagctggcctacgagggcctgagcaagacctacctgtccaagacactggcccagtacacctccaagacatgcagcaactgtgggtttaccatcaccagcgccgactacgacagggtgctggagaagctgaagaagacagcaacaggctggatgaccacaattaacggcaaggagctgaaggtggagggccagattacctactacaacagatacaagagacagaacgtagtcaaggacctgtccgtcgagctggatagactgagcgaagaatctgtgaacaacgacatctcctcctggacaaagggcagaagcggagaagctctgagcctcctgaagaaaagattctcccatagacccgtgcaggagaagttcgtgtgcctgaactgcggcttcgagacacacgcagccgagcaagccgccctgaacatcgccagatcctggctgttcctgcggagccaggagtacaagaaataccagacaaacaagacaaccggcaacaccgataagagagccttcgtcgagacctggcagtccttttaccggaagaagcttaaggaggtgtggaaacctgccgtgcggtctggcggatctggcggaggctcctatggagagcctgaccctggaggacgtggccgtggacttcacctgggaggagtggcagttcctgagccccgcccagaaggacctgtacagggacgtgatgctggagaactacagcaacctggtggccgtgggctaccaggccaggaagcccgacgccctgagcaagctggagaggggcgaggagccctgcaccaccgaggacgagatctacgccaggatctgcagcgacagcggcggcgccagcggatctggctccggcagcggccccaagaaaaagagaaaagtctaagctgccttctgcggggcttgccttctggccatgcccttcttctctcccttgcacctgtacctcttggtctttgaataaagcctgagtaggaaggctagcaaaaaaaaaaaaaaaaaaaaaaaaaaaaaaaaaaaaaaaaaaaaaaaaaaaaaaaaaaaaaaaaaaaaaaaaaaaaaaaa

SEQ ID NO: 16120 - RNA, 9485 nt, synthetic construct
  source 1..9485: mol_type = other RNA
aggaaataagagagaaaagaagagtaagaagaaatataagagccaccatggcccctaagaagaagcgtaaagtgagccggatggaacgcctcgtctacgaggtgcggcagaagtgcagaaacatcgaggacatctgcatctcctgcggatctctgaacgtgaccctggagcacccactgttcatcggcggcatgtgccagaactgtaaaaactgttttctggagtgtgcctatcaatacgacgatgacggctaccagagctactgcaccatctgttgcggcggaagagaggtgctgatgtgtggaaataacaactgctgccggtgcttctgcgtggaatgcgtggacctgctggtgggccccggcgccgcccaggccgctattaaggaagatccttggaactgctacatgtgcggccacaagggcacatacggcctgctgagacggagagaggactggcctagcagactgcagatgttcttcgccaataaccacgaccaggagttcgacccccctaaggtgtaccctcccgtccccgccgagaagagaaagcccatccgggtcctgagcctgttcgatggcatcgccaccggtctgctggtgctgaaggacctgggcatccaggtggataggtacattgcctccgaggtgtgcgaggactccatcaccgtgggaatggtgcgtcatcagggcaagatcatgtacgtgggcgacgtgcggagcgtgacacagaagcatatccaggagtggggccctttcgacctggtgatcggcggcagcccttgcaatgacctgagcatcgtgaacccagcccggaagggcctgtacgagggaaccggcagactgttcttcgagttttacagactgctgcacgacgcccggcctaaggaaggcgacgaccggcccttcttttggctgttcgagaatgtggtggccatgggagtcagcgacaagcgggatattagccggttcctggagagcaaccccgtgatgatcgatgccaaggaagtgagcgccgcccaccgggccagatacttctggggcaatctgcctggcatgaacagacccctggccagcaccgtgaacgacaagctggagctgcaggagtgcctggagcacggccggatcgccaagttcagcaaggtgagaaccatcaccacccgaagcaacagcatcaaacaaggcaaggaccagcactttcctgtgttcatgaacgagaaggaggacatcctgtggtgtaccgagatggagagagtgttcgggttcccagtccactacacagatgtcagcaacatgtctagactggccagacagagactgctgggaagaagctggtccgtccctgtgatcagacacctgttcgcccctctgaaggagtacttcgcctgcgtgagcagcggcaacagcaacgccaacagccggggccccagcttctctagcggcctggtgccactgtccctgagagggagccacatgggccccatggagatctacaaaaccgtgagcgcctggaagcggcagcctgtgcgcgtgctgagcctgtttcggaatatcgataaagtcctgaaaagcctgggattcctggagagcggctctggctccggcggtggcaccctgaagtacgtggaggatgtgacaaacgtggtcagacgggatgtggagaagtggggccccttcgatctggtgtacggcagcacccaacccctgggcagctcttgtgaccggtgccctggctggtacatgtttcagttccaccggatcctgcagtacgccctgccgagacaggagtcccagcggccattcttttggattttcatggacaacttgctgctgaccgaggatgaccaggaaactaccactcggttcctgcagaccgaagccgtgaccctgcaggacgtgagaggccgggactaccagaacgccatgcgggtgtggtccaacatccctggactgaaaagcaagcacgcacctctgacccctaaagaagaggagtacctgcaggcccaggtgcggagcagaagcaagctggacgcccctaaggtggatctgctggtgaagaattgcctcctgcccctgagagagtacttcaagtatttcagccagaatagtctgcccctgggaggcagcggcggcggcgccctggtgacatttgaggacgtcgccgtgcggttcacccaggaggaatgggctctgctggatccttctcagaaaatcctgtaccgggacgtgatgagagagacataccggaatctgacctccgtgggcatcaactgggaatgttgggaccttgaagcctgcttcagaagcctgggaagaaacctgagagtgcaggtggtgaagagaaagtgcgagctgaccaacagcggcccctgcgccgagggcggcccaagcagcggcgcccctcctcccagcggcggcagcccagccggctccccaacctctaccgaggagggcacctctgagtccgccacccccgagagcggccctggcacctccaccgagcccagcgagggcagcgcacccggcagccctgccggcagccccacctccacagaggagggaaccagcaccgagcccagcgaaggcagcgccccaggcaccagcaccgagcctagtgagcaggagattaaacggatcaacaagatcagaagaagacttgtgaaagacagcaacaccaagaaggccggcaagacaggccccatgaaaaccctgctggttagagtgatgacacccgatctgagagagcggctggaaaacctgagaaagaagcctgaaaatatcccccagcccatcagcaatacatctagagccaacctgaataagctgctgaccgattacaccgaaatgaagaaggcgatcctgcatgtgtactgggaagagttccagaaggaccctgtgggcctgatgagccgggtggcccagcctgccagcaagaagatcgatcagaacaagctgaaacctgagatggacgagaagggcaacctgaccaccgccggctttgcctgctctcagtgtggccagcccctgttcgtgtacaagctggagcaggtgtctgagaagggcaaggcttacaccaactacttcggacggtgcaatgtggccgagcacgaaaagctgatcctgctggcccagctgaagcccgagaaggatagcgacgaagccgtgacatatagcctgggaaagtttgggcagagggccctggatttctacagcattcatgtgaccaaggagtccacccaccccgtgaagcccctggcccagatcgccggaaacagatacgcctccggacctgtgggaaaggccctgagcgacgcatgtatgggcacaatcgcctccttcctgtctaagtaccaggacatcatcatcgaacaccagaaggtggtgaagggcaaccagaagagactggagagcctgcgggagctggccggcaaggaaaacctggaataccctagcgtgaccctgccacctcagcctcacaccaaggagggcgttgatgcctacaacgaagtgatcgcccgggtgcgaatgtgggtgaacctgaacctgtggcagaagctgaagctaagcagagatgatgccaagcctctgctgagactgaagggattcccttcctttcctctggtcgagagacaggccaacgaagtggactggtgggacatggtgtgtaacgtgaagaagctgatcaacgagaaaaaggaggatggcaaggtgttttggcagaatctggctggctacaagagacaggaagccctgagaccatacctgagcagcgaggaagatcggaagaagggaaagaaattcgctcggtaccagctgggcgacctgctgctgcacctggaaaagaagcacggcgaggactggggaaaggtgtacgacgaggcctgggagcggattgacaagaaagtggaaggcctgagcaagcacatcaagctggaagaggaacggagaagcgaggacgcccagagcaaggccgccctgaccgactggctgcgggctaaggccagcttcgtgatcgagggcctgaaggaggccgacaaggacgagttctgcagatgcgagctgaagctgcagaagtggtacggggacctgcggggaaagcccttcgccatcgaagccgagaacagcatcctggacatcagcggcttcagcaagcagtacaactgtgccttcatctggcagaaggacggcgtgaagaagctgaacctgtacctgatcatcaactacttcaagggcggcaagctgcggttcaagaagatcaaacctgaagccttcgaagccaacagattctacaccgtgatcaacaaaaagagcggcgagatcgtgcccatggaggtgaacttcaacttcgacgaccccaacctgatcatcctgcctctggcctttggcaagagacagggcagagaattcatctggaacgacctgctgtccctggaaaccggcagcctgaagctggccaacggaagagtgatcgagaagacactgtacaacagaagaacccggcaggatgagcctgccctgttcgtggccctgaccttcgagcggcgggaggtcctggactcctccaatatcaaaccaatgaacctgatcggcgtggcaagaggcgaaaacatccccgccgtgatcgccctgaccgaccccgagggctgcccactgagccggtttaaggatagcctgggaaacccaacccacatcctgagaatcggcgagagctataaggagaagcagcggaccatccaggccaagaaggaggtggagcagcggagagccggcggctacagccggaagtacgccagcaaagccaagaatctggcagacgatatggtgagaaacaccgctagagatctgctgtactacgccgtgacccaggatgccatgctgatcttcgccaacctgagccggggcttcggccggcagggcaagcggaccttcatggccgagagacagtacacacggatggaggactggctgaccgccaagctggcctacgagggcctgagcaagacctacctgtccaagacactggcccagtacacctccaagacatgcagcaactgtgggtttaccatcaccagcgccgactacgacagggtgctggagaagctgaagaagacagcaacaggctggatgaccacaattaacggcaaggagctgaaggtggagggccagattacctactacaacagatacaagagacagaacgtagtcaaggacctgtccgtcgagctggatagactgagcgaagaatctgtgaacaacgacatctcctcctggacaaagggcagaagcggagaagctctgagcctcctgaagaaaagattctcccatagacccgtgcaggagaagttcgtgtgcctgaactgcggcttcgagacacacgcagccgagcaagccgccctgaacatcgccagatcctggctgttcctgcggagccaggagtacaagaaataccagacaaacaagacaaccggcaacaccgataagagagccttcgtcgagacctggcagtccttttaccggaagaagcttaaggaggtgtggaaacctgccgtgcggtctggcggatctggcggaggctcccaggccggcagcgacctgttcagggacgtggccatcgtgttcagccaggaggagtgggagcagctggcccccacccagagggacctgtacagggacgtgatgctggagacctacagcaacctggtgagcctgggcctggccgtgagcaagcccgacgtgatcgccttcctggagcagggcagggagccctggaccgtggagggcgtggccaccggcggcctgtgccccgtgctgaagagcaggggcggcccaagcagcggcgcccctcctcccagcggcggcagcccagccggctccccaacctctaccgaggagggcacctctgagtccgccacccccgagagcggccctggcacctccaccgagcccagcgagggcagcgcacccggcagccctgccggcagccccacctccacagaggagggaaccagcaccgagcccagcgaaggcagcgccccaggcaccagcaccgagcctagtgagcaggagattaaacggatcaacaagatcagaagaagacttgtgaaagacagcaacaccaagaaggccggcaagacaggccccatgaaaaccctgctggttagagtgatgacacccgatctgagagagcggctggaaaacctgagaaagaagcctgaaaatatcccccagcccatcagcaatacatctagagccaacctgaataagctgctgaccgattacaccgaaatgaagaaggcgatcctgcatgtgtactgggaagagttccagaaggaccctgtgggcctgatgagccgggtggcccagcctgccagcaagaagatcgatcagaacaagctgaaacctgagatggacgagaagggcaacctgaccaccgccggctttgcctgctctcagtgtggccagcccctgttcgtgtacaagctggagcaggtgtctgagaagggcaaggcttacaccaactacttcggacggtgcaatgtggccgagcacgaaaagctgatcctgctggcccagctgaagcccgagaaggatagcgacgaagccgtgacatatagcctgggaaagtttgggcagagggccctggatttctacagcattcatgtgaccaaggagtccacccaccccgtgaagcccctggcccagatcgccggaaacagatacgcctccggacctgtgggaaaggccctgagcgacgcatgtatgggcacaatcgcctccttcctgtctaagtaccaggacatcatcatcgaacaccagaaggtggtgaagggcaaccagaagagactggagagcctgcgggagctggccggcaaggaaaacctggaataccctagcgtgaccctgccacctcagcctcacaccaaggagggcgttgatgcctacaacgaagtgatcgcccgggtgcgaatgtgggtgaacctgaacctgtggcagaagctgaagctaagcagagatgatgccaagcctctgctgagactgaagggattcccttcctttcctctggtcgagagacaggccaacgaagtggactggtgggacatggtgtgtaacgtgaagaagctgatcaacgagaaaaaggaggatggcaaggtgttttggcagaatctggctggctacaagagacaggaagccctgagaccatacctgagcagcgaggaagatcggaagaagggaaagaaattcgctcggtaccagctgggcgacctgctgctgcacctggaaaagaagcacggcgaggactggggaaaggtgtacgacgaggcctgggagcggattgacaagaaagtggaaggcctgagcaagcacatcaagctggaagaggaacggagaagcgaggacgcccagagcaaggccgccctgaccgactggctgcgggctaaggccagcttcgtgatcgagggcctgaaggaggccgacaaggacgagttctgcagatgcgagctgaagctgcagaagtggtacggggacctgcggggaaagcccttcgccatcgaagccgagaacagcatcctggacatcagcggcttcagcaagcagtacaactgtgccttcatctggcagaaggacggcgtgaagaagctgaacctgtacctgatcatcaactacttcaagggcggcaagctgcggttcaagaagatcaaacctgaagccttcgaagccaacagattctacaccgtgatcaacaaaaagagcggcgagatcgtgcccatggaggtgaacttcaacttcgacgaccccaacctgatcatcctgcctctggcctttggcaagagacagggcagagaattcatctggaacgacctgctgtccctggaaaccggcagcctgaagctggccaacggaagagtgatcgagaagacactgtacaacagaagaacccggcaggatgagcctgccctgttcgtggccctgaccttcgagcggcgggaggtcctggactcctccaatatcaaaccaatgaacctgatcggcgtggcaagaggcgaaaacatccccgccgtgatcgccctgaccgaccccgagggctgcccactgagccggtttaaggatagcctgggaaacccaacccacatcctgagaatcggcgagagctataaggagaagcagcggaccatccaggccaagaaggaggtggagcagcggagagccggcggctacagccggaagtacgccagcaaagccaagaatctggcagacgatatggtgagaaacaccgctagagatctgctgtactacgccgtgacccaggatgccatgctgatcttcgccaacctgagccggggcttcggccggcagggcaagcggaccttcatggccgagagacagtacacacggatggaggactggctgaccgccaagctggcctacgagggcctgagcaagacctacctgtccaagacactggcccagtacacctccaagacatgcagcaactgtgggtttaccatcaccagcgccgactacgacagggtgctggagaagctgaagaagacagcaacaggctggatgaccacaattaacggcaaggagctgaaggtggagggccagattacctactacaacagatacaagagacagaacgtagtcaaggacctgtccgtcgagctggatagactgagcgaagaatctgtgaacaacgacatctcctcctggacaaagggcagaagcggagaagctctgagcctcctgaagaaaagattctcccatagacccgtgcaggagaagttcgtgtgcctgaactgcggcttcgagacacacgcagccgagcaagccgccctgaacatcgccagatcctggctgttcctgcggagccaggagtacaagaaataccagacaaacaagacaaccggcaacaccgataagagagccttcgtcgagacctggcagtccttttaccggaagaagcttaaggaggtgtggaaacctgccgtgcggtctggcggatctggcggaggctcctcaggccggcagcgacctgttcagggacgtggccatcgtgttcagccaggaggagtgggagcagctggcccccacccagagggacctgtacagggacgtgatgctggagacctacagcaacctggtgagcctgggcctggccgtgagcaagcccgacgtgatcgccttcctggagcagggcagggagccctggaccgtggagggcgtggccaccggcggcctgtgccccgtgctgaagagcaggggatctggctccggcagcggccccaagaaaaagagaaaagtctaagctgccttctgcggggcttgccttctggccatgcccttcttctctcccttgcacctgtacctcttggtctttgaataaagcctgagtaggaaggctagcaaaaaaaaaaaaaaaaaaaaaaaaaaaaaaaaaaaaaaaaaaaaaaaaaaaaaaaaaaaaaaaaaaaaaaaaaaaaaaaa

SEQ ID NO: 16121 - RNA, 9485 nt, synthetic construct
  source 1..9485: mol_type = other RNA
aggaaataagagagaaaagaagagtaagaagaaatataagagccaccatggcccctaagaagaagcgtaaagtgagccggatggaacgcctcgtctacgaggtgcggcagaagtgcagaaacatcgaggacatctgcatctcctgcggatctctgaacgtgaccctggagcacccactgttcatcggcggcatgtgccagaactgtaaaaactgttttctggagtgtgcctatcaatacgacgatgacggctaccagagctactgcaccatctgttgcggcggaagagaggtgctgatgtgtggaaataacaactgctgccggtgcttctgcgtggaatgcgtggacctgctggtgggccccggcgccgcccaggccgctattaaggaagatccttggaactgctacatgtgcggccacaagggcacatacggcctgctgagacggagagaggactggcctagcagactgcagatgttcttcgccaataaccacgaccaggagttcgacccccctaaggtgtaccctcccgtccccgccgagaagagaaagcccatccgggtcctgagcctgttcgatggcatcgccaccggtctgctggtgctgaaggacctgggcatccaggtggataggtacattgcctccgaggtgtgcgaggactccatcaccgtgggaatggtgcgtcatcagggcaagatcatgtacgtgggcgacgtgcggagcgtgacacagaagcatatccaggagtggggccctttcgacctggtgatcggcggcagcccttgcaatgacctgagcatcgtgaacccagcccggaagggcctgtacgagggaaccggcagactgttcttcgagttttacagactgctgcacgacgcccggcctaaggaaggcgacgaccggcccttcttttggctgttcgagaatgtggtggccatgggagtcagcgacaagcgggatattagccggttcctggagagcaaccccgtgatgatcgatgccaaggaagtgagcgccgcccaccgggccagatacttctggggcaatctgcctggcatgaacagacccctggccagcaccgtgaacgacaagctggagctgcaggagtgcctggagcacggccggatcgccaagttcagcaaggtgagaaccatcaccacccgaagcaacagcatcaaacaaggcaaggaccagcactttcctgtgttcatgaacgagaaggaggacatcctgtggtgtaccgagatggagagagtgttcgggttcccagtccactacacagatgtcagcaacatgtctagactggccagacagagactgctgggaagaagctggtccgtccctgtgatcagacacctgttcgcccctctgaaggagtacttcgcctgcgtgagcagcggcaacagcaacgccaacagccggggccccagcttctctagcggcctggtgccactgtccctgagagggagccacatgggccccatggagatctacaaaaccgtgagcgcctggaagcggcagcctgtgcgcgtgctgagcctgtttcggaatatcgataaagtcctgaaaagcctgggattcctggagagcggctctggctccggcggtggcaccctgaagtacgtggaggatgtgacaaacgtggtcagacgggatgtggagaagtggggccccttcgatctggtgtacggcagcacccaacccctgggcagctcttgtgaccggtgccctggctggtacatgtttcagttccaccggatcctgcagtacgccctgccgagacaggagtcccagcggccattcttttggattttcatggacaacttgctgctgaccgaggatgaccaggaaactaccactcggttcctgcagaccgaagccgtgaccctgcaggacgtgagaggccgggactaccagaacgccatgcgggtgtggtccaacatccctggactgaaaagcaagcacgcacctctgacccctaaagaagaggagtacctgcaggcccaggtgcggagcagaagcaagctggacgcccctaaggtggatctgctggtgaagaattgcctcctgcccctgagagagtacttcaagtatttcagccagaatagtctgcccctgggaggcagcggcggcggcgccctggtgacatttgaggacgtcgccgtgcggttcacccaggaggaatgggctctgctggatccttctcagaaaatcctgtaccgggacgtgatgagagagacataccggaatctgacctccgtgggcatcaactgggaatgttgggaccttgaagcctgcttcagaagcctgggaagaaacctgagagtgcaggtggtgaagagaaagtgcgagctgaccaacagcggcccctgcgccgagggcggcccaagcagcggcgcccctcctcccagcggcggcagcccagccggctccccaacctctaccgaggagggcacctctgagtccgccacccccgagagcggccctggcacctccaccgagcccagcgagggcagcgcacccggcagccctgccggcagccccacctccacagaggagggaaccagcaccgagcccagcgaaggcagcgccccaggcaccagcaccgagcctagtgagcaggagattaaacggatcaacaagatcagaagaagacttgtgaaagacagcaacaccaagaaggccggcaagacaggccccatgaaaaccctgctggttagagtgatgacacccgatctgagagagcggctggaaaacctgagaaagaagcctgaaaatatcccccagcccatcagcaatacatctagagccaacctgaataagctgctgaccgattacaccgaaatgaagaaggcgatcctgcatgtgtactgggaagagttccagaaggaccctgtgggcctgatgagccgggtggcccagcctgccagcaagaagatcgatcagaacaagctgaaacctgagatggacgagaagggcaacctgaccaccgccggctttgcctgctctcagtgtggccagcccctgttcgtgtacaagctggagcaggtgtctgagaagggcaaggcttacaccaactacttcggacggtgcaatgtggccgagcacgaaaagctgatcctgctggcccagctgaagcccgagaaggatagcgacgaagccgtgacatatagcctgggaaagtttgggcagagggccctggatttctacagcattcatgtgaccaaggagtccacccaccccgtgaagcccctggcccagatcgccggaaacagatacgcctccggacctgtgggaaaggccctgagcgacgcatgtatgggcacaatcgcctccttcctgtctaagtaccaggacatcatcatcgaacaccagaaggtggtgaagggcaaccagaagagactggagagcctgcgggagctggccggcaaggaaaacctggaataccctagcgtgaccctgccacctcagcctcacaccaaggagggcgttgatgcctacaacgaagtgatcgcccgggtgcgaatgtgggtgaacctgaacctgtggcagaagctgaagctaagcagagatgatgccaagcctctgctgagactgaagggattcccttcctttcctctggtcgagagacaggccaacgaagtggactggtgggacatggtgtgtaacgtgaagaagctgatcaacgagaaaaaggaggatggcaaggtgttttggcagaatctggctggctacaagagacaggaagccctgagaccatacctgagcagcgaggaagatcggaagaagggaaagaaattcgctcggtaccagctgggcgacctgctgctgcacctggaaaagaagcacggcgaggactggggaaaggtgtacgacgaggcctgggagcggattgacaagaaagtggaaggcctgagcaagcacatcaagctggaagaggaacggagaagcgaggacgcccagagcaaggccgccctgaccgactggctgcgggctaaggccagcttcgtgatcgagggcctgaaggaggccgacaaggacgagttctgcagatgcgagctgaagctgcagaagtggtacggggacctgcggggaaagcccttcgccatcgaagccgagaacagcatcctggacatcagcggcttcagcaagcagtacaactgtgccttcatctggcagaaggacggcgtgaagaagctgaacctgtacctgatcatcaactacttcaagggcggcaagctgcggttcaagaagatcaaacctgaagccttcgaagccaacagattctacaccgtgatcaacaaaaagagcggcgagatcgtgcccatggaggtgaacttcaacttcgacgaccccaacctgatcatcctgcctctggcctttggcaagagacagggcagagaattcatctggaacgacctgctgtccctggaaaccggcagcctgaagctggccaacggaagagtgatcgagaagacactgtacaacagaagaacccggcaggatgagcctgccctgttcgtggccctgaccttcgagcggcgggaggtcctggactcctccaatatcaaaccaatgaacctgatcggcgtggcaagaggcgaaaacatccccgccgtgatcgccctgaccgaccccgagggctgcccactgagccggtttaaggatagcctgggaaacccaacccacatcctgagaatcggcgagagctataaggagaagcagcggaccatccaggccaagaaggaggtggagcagcggagagccggcggctacagccggaagtacgccagcaaagccaagaatctggcagacgatatggtgagaaacaccgctagagatctgctgtactacgccgtgacccaggatgccatgctgatcttcgccaacctgagccggggcttcggccggcagggcaagcggaccttcatggccgagagacagtacacacggatggaggactggctgaccgccaagctggcctacgagggcctgagcaagacctacctgtccaagacactggcccagtacacctccaagacatgcagcaactgtgggtttaccatcaccagcgccgactacgacagggtgctggagaagctgaagaagacagcaacaggctggatgaccacaattaacggcaaggagctgaaggtggagggccagattacctactacaacagatacaagagacagaacgtagtcaaggacctgtccgtcgagctggatagactgagcgaagaatctgtgaacaacgacatctcctcctggacaaagggcagaagcggagaagctctgagcctcctgaagaaaagattctcccatagacccgtgcaggagaagttcgtgtgcctgaactgcggcttcgagacacacgcagccgagcaagccgccctgaacatcgccagatcctggctgttcctgcggagccaggagtacaagaaataccagacaaacaagacaaccggcaacaccgataagagagccttcgtcgagacctggcagtccttttaccggaagaagcttaaggaggtgtggaaacctgccgtgcggtctggcggatctggcggaggctccatggacagcgtggccttcgaggacgtggccgtgaacttcacccacgaggagtgggccctgctgagccccagccagaagaacctgtacagggacgtgatgagggagaccatcaggaacctgaactgcatcggcatgaagtgggagaaccagaacatcgacgaccagtaccagaacctgaggaggaaccccaggtgcgacgtggtggagaggttcggcaagagcaaggacggcagccagtgcggcggcggcccaagcagcggcgcccctcctcccagcggcggcagcccagccggctccccaacctctaccgaggagggcacctctgagtccgccacccccgagagcggccctggcacctccaccgagcccagcgagggcagcgcacccggcagccctgccggcagccccacctccacagaggagggaaccagcaccgagcccagcgaaggcagcgccccaggcaccagcaccgagcctagtgagcaggagattaaacggatcaacaagatcagaagaagacttgtgaaagacagcaacaccaagaaggccggcaagacaggccccatgaaaaccctgctggttagagtgatgacacccgatctgagagagcggctggaaaacctgagaaagaagcctgaaaatatcccccagcccatcagcaatacatctagagccaacctgaataagctgctgaccgattacaccgaaatgaagaaggcgatcctgcatgtgtactgggaagagttccagaaggaccctgtgggcctgatgagccgggtggcccagcctgccagcaagaagatcgatcagaacaagctgaaacctgagatggacgagaagggcaacctgaccaccgccggctttgcctgctctcagtgtggccagcccctgttcgtgtacaagctggagcaggtgtctgagaagggcaaggcttacaccaactacttcggacggtgcaatgtggccgagcacgaaaagctgatcctgctggcccagctgaagcccgagaaggatagcgacgaagccgtgacatatagcctgggaaagtttgggcagagggccctggatttctacagcattcatgtgaccaaggagtccacccaccccgtgaagcccctggcccagatcgccggaaacagatacgcctccggacctgtgggaaaggccctgagcgacgcatgtatgggcacaatcgcctccttcctgtctaagtaccaggacatcatcatcgaacaccagaaggtggtgaagggcaaccagaagagactggagagcctgcgggagctggccggcaaggaaaacctggaataccctagcgtgaccctgccacctcagcctcacaccaaggagggcgttgatgcctacaacgaagtgatcgcccgggtgcgaatgtgggtgaacctgaacctgtggcagaagctgaagctaagcagagatgatgccaagcctctgctgagactgaagggattcccttcctttcctctggtcgagagacaggccaacgaagtggactggtgggacatggtgtgtaacgtgaagaagctgatcaacgagaaaaaggaggatggcaaggtgttttggcagaatctggctggctacaagagacaggaagccctgagaccatacctgagcagcgaggaagatcggaagaagggaaagaaattcgctcggtaccagctgggcgacctgctgctgcacctggaaaagaagcacggcgaggactggggaaaggtgtacgacgaggcctgggagcggattgacaagaaagtggaaggcctgagcaagcacatcaagctggaagaggaacggagaagcgaggacgcccagagcaaggccgccctgaccgactggctgcgggctaaggccagcttcgtgatcgagggcctgaaggaggccgacaaggacgagttctgcagatgcgagctgaagctgcagaagtggtacggggacctgcggggaaagcccttcgccatcgaagccgagaacagcatcctggacatcagcggcttcagcaagcagtacaactgtgccttcatctggcagaaggacggcgtgaagaagctgaacctgtacctgatcatcaactacttcaagggcggcaagctgcggttcaagaagatcaaacctgaagccttcgaagccaacagattctacaccgtgatcaacaaaaagagcggcgagatcgtgcccatggaggtgaacttcaacttcgacgaccccaacctgatcatcctgcctctggcctttggcaagagacagggcagagaattcatctggaacgacctgctgtccctggaaaccggcagcctgaagctggccaacggaagagtgatcgagaagacactgtacaacagaagaacccggcaggatgagcctgccctgttcgtggccctgaccttcgagcggcgggaggtcctggactcctccaatatcaaaccaatgaacctgatcggcgtggcaagaggcgaaaacatccccgccgtgatcgccctgaccgaccccgagggctgcccactgagccggtttaaggatagcctgggaaacccaacccacatcctgagaatcggcgagagctataaggagaagcagcggaccatccaggccaagaaggaggtggagcagcggagagccggcggctacagccggaagtacgccagcaaagccaagaatctggcagacgatatggtgagaaacaccgctagagatctgctgtactacgccgtgacccaggatgccatgctgatcttcgccaacctgagccggggcttcggccggcagggcaagcggaccttcatggccgagagacagtacacacggatggaggactggctgaccgccaagctggcctacgagggcctgagcaagacctacctgtccaagacactggcccagtacacctccaagacatgcagcaactgtgggtttaccatcaccagcgccgactacgacagggtgctggagaagctgaagaagacagcaacaggctggatgaccacaattaacggcaaggagctgaaggtggagggccagattacctactacaacagatacaagagacagaacgtagtcaaggacctgtccgtcgagctggatagactgagcgaagaatctgtgaacaacgacatctcctcctggacaaagggcagaagcggagaagctctgagcctcctgaagaaaagattctcccatagacccgtgcaggagaagttcgtgtgcctgaactgcggcttcgagacacacgcagccgagcaagccgccctgaacatcgccagatcctggctgttcctgcggagccaggagtacaagaaataccagacaaacaagacaaccggcaacaccgataagagagccttcgtcgagacctggcagtccttttaccggaagaagcttaaggaggtgtggaaacctgccgtgcggtctggcggatctggcggaggctcctatggacagcgtggccttcgaggacgtggccgtgaacttcacccacgaggagtgggccctgctgagccccagccagaagaacctgtacagggacgtgatgagggagaccatcaggaacctgaactgcatcggcatgaagtgggagaaccagaacatcgacgaccagtaccagaacctgaggaggaaccccaggtgcgacgtggtggagaggttcggcaagagcaaggacggcagccagtgcggcggatctggctccggcagcggccccaagaaaaagagaaaagtctaagctgccttctgcggggcttgccttctggccatgcccttcttctctcccttgcacctgtacctcttggtctttgaataaagcctgagtaggaaggctagcaaaaaaaaaaaaaaaaaaaaaaaaaaaaaaaaaaaaaaaaaaaaaaaaaaaaaaaaaaaaaaaaaaaaaaaaaaaaaaaa

SEQ ID NO: 16122 - RNA, 9485 nt, synthetic construct
  source 1..9485: mol_type = other RNA
aggaaataagagagaaaagaagagtaagaagaaatataagagccaccatggcccctaagaagaagcgtaaagtgagccggatggaacgcctcgtctacgaggtgcggcagaagtgcagaaacatcgaggacatctgcatctcctgcggatctctgaacgtgaccctggagcacccactgttcatcggcggcatgtgccagaactgtaaaaactgttttctggagtgtgcctatcaatacgacgatgacggctaccagagctactgcaccatctgttgcggcggaagagaggtgctgatgtgtggaaataacaactgctgccggtgcttctgcgtggaatgcgtggacctgctggtgggccccggcgccgcccaggccgctattaaggaagatccttggaactgctacatgtgcggccacaagggcacatacggcctgctgagacggagagaggactggcctagcagactgcagatgttcttcgccaataaccacgaccaggagttcgacccccctaaggtgtaccctcccgtccccgccgagaagagaaagcccatccgggtcctgagcctgttcgatggcatcgccaccggtctgctggtgctgaaggacctgggcatccaggtggataggtacattgcctccgaggtgtgcgaggactccatcaccgtgggaatggtgcgtcatcagggcaagatcatgtacgtgggcgacgtgcggagcgtgacacagaagcatatccaggagtggggccctttcgacctggtgatcggcggcagcccttgcaatgacctgagcatcgtgaacccagcccggaagggcctgtacgagggaaccggcagactgttcttcgagttttacagactgctgcacgacgcccggcctaaggaaggcgacgaccggcccttcttttggctgttcgagaatgtggtggccatgggagtcagcgacaagcgggatattagccggttcctggagagcaaccccgtgatgatcgatgccaaggaagtgagcgccgcccaccgggccagatacttctggggcaatctgcctggcatgaacagacccctggccagcaccgtgaacgacaagctggagctgcaggagtgcctggagcacggccggatcgccaagttcagcaaggtgagaaccatcaccacccgaagcaacagcatcaaacaaggcaaggaccagcactttcctgtgttcatgaacgagaaggaggacatcctgtggtgtaccgagatggagagagtgttcgggttcccagtccactacacagatgtcagcaacatgtctagactggccagacagagactgctgggaagaagctggtccgtccctgtgatcagacacctgttcgcccctctgaaggagtacttcgcctgcgtgagcagcggcaacagcaacgccaacagccggggccccagcttctctagcggcctggtgccactgtccctgagagggagccacatgggccccatggagatctacaaaaccgtgagcgcctggaagcggcagcctgtgcgcgtgctgagcctgtttcggaatatcgataaagtcctgaaaagcctgggattcctggagagcggctctggctccggcggtggcaccctgaagtacgtggaggatgtgacaaacgtggtcagacgggatgtggagaagtggggccccttcgatctggtgtacggcagcacccaacccctgggcagctcttgtgaccggtgccctggctggtacatgtttcagttccaccggatcctgcagtacgccctgccgagacaggagtcccagcggccattcttttggattttcatggacaacttgctgctgaccgaggatgaccaggaaactaccactcggttcctgcagaccgaagccgtgaccctgcaggacgtgagaggccgggactaccagaacgccatgcgggtgtggtccaacatccctggactgaaaagcaagcacgcacctctgacccctaaagaagaggagtacctgcaggcccaggtgcggagcagaagcaagctggacgcccctaaggtggatctgctggtgaagaattgcctcctgcccctgagagagtacttcaagtatttcagccagaatagtctgcccctgggaggcagcggcggcggcgccctggtgacatttgaggacgtcgccgtgcggttcacccaggaggaatgggctctgctggatccttctcagaaaatcctgtaccgggacgtgatgagagagacataccggaatctgacctccgtgggcatcaactgggaatgttgggaccttgaagcctgcttcagaagcctgggaagaaacctgagagtgcaggtggtgaagagaaagtgcgagctgaccaacagcggcccctgcgccgagggcggcccaagcagcggcgcccctcctcccagcggcggcagcccagccggctccccaacctctaccgaggagggcacctctgagtccgccacccccgagagcggccctggcacctccaccgagcccagcgagggcagcgcacccggcagccctgccggcagccccacctccacagaggagggaaccagcaccgagcccagcgaaggcagcgccccaggcaccagcaccgagcctagtgagcaggagattaaacggatcaacaagatcagaagaagacttgtgaaagacagcaacaccaagaaggccggcaagacaggccccatgaaaaccctgctggttagagtgatgacacccgatctgagagagcggctggaaaacctgagaaagaagcctgaaaatatcccccagcccatcagcaatacatctagagccaacctgaataagctgctgaccgattacaccgaaatgaagaaggcgatcctgcatgtgtactgggaagagttccagaaggaccctgtgggcctgatgagccgggtggcccagcctgccagcaagaagatcgatcagaacaagctgaaacctgagatggacgagaagggcaacctgaccaccgccggctttgcctgctctcagtgtggccagcccctgttcgtgtacaagctggagcaggtgtctgagaagggcaaggcttacaccaactacttcggacggtgcaatgtggccgagcacgaaaagctgatcctgctggcccagctgaagcccgagaaggatagcgacgaagccgtgacatatagcctgggaaagtttgggcagagggccctggatttctacagcattcatgtgaccaaggagtccacccaccccgtgaagcccctggcccagatcgccggaaacagatacgcctccggacctgtgggaaaggccctgagcgacgcatgtatgggcacaatcgcctccttcctgtctaagtaccaggacatcatcatcgaacaccagaaggtggtgaagggcaaccagaagagactggagagcctgcgggagctggccggcaaggaaaacctggaataccctagcgtgaccctgccacctcagcctcacaccaaggagggcgttgatgcctacaacgaagtgatcgcccgggtgcgaatgtgggtgaacctgaacctgtggcagaagctgaagctaagcagagatgatgccaagcctctgctgagactgaagggattcccttcctttcctctggtcgagagacaggccaacgaagtggactggtgggacatggtgtgtaacgtgaagaagctgatcaacgagaaaaaggaggatggcaaggtgttttggcagaatctggctggctacaagagacaggaagccctgagaccatacctgagcagcgaggaagatcggaagaagggaaagaaattcgctcggtaccagctgggcgacctgctgctgcacctggaaaagaagcacggcgaggactggggaaaggtgtacgacgaggcctgggagcggattgacaagaaagtggaaggcctgagcaagcacatcaagctggaagaggaacggagaagcgaggacgcccagagcaaggccgccctgaccgactggctgcgggctaaggccagcttcgtgatcgagggcctgaaggaggccgacaaggacgagttctgcagatgcgagctgaagctgcagaagtggtacggggacctgcggggaaagcccttcgccatcgaagccgagaacagcatcctggacatcagcggcttcagcaagcagtacaactgtgccttcatctggcagaaggacggcgtgaagaagctgaacctgtacctgatcatcaactacttcaagggcggcaagctgcggttcaagaagatcaaacctgaagccttcgaagccaacagattctacaccgtgatcaacaaaaagagcggcgagatcgtgcccatggaggtgaacttcaacttcgacgaccccaacctgatcatcctgcctctggcctttggcaagagacagggcagagaattcatctggaacgacctgctgtccctggaaaccggcagcctgaagctggccaacggaagagtgatcgagaagacactgtacaacagaagaacccggcaggatgagcctgccctgttcgtggccctgaccttcgagcggcgggaggtcctggactcctccaatatcaaaccaatgaacctgatcggcgtggcaagaggcgaaaacatccccgccgtgatcgccctgaccgaccccgagggctgcccactgagccggtttaaggatagcctgggaaacccaacccacatcctgagaatcggcgagagctataaggagaagcagcggaccatccaggccaagaaggaggtggagcagcggagagccggcggctacagccggaagtacgccagcaaagccaagaatctggcagacgatatggtgagaaacaccgctagagatctgctgtactacgccgtgacccaggatgccatgctgatcttcgccaacctgagccggggcttcggccggcagggcaagcggaccttcatggccgagagacagtacacacggatggaggactggctgaccgccaagctggcctacgagggcctgagcaagacctacctgtccaagacactggcccagtacacctccaagacatgcagcaactgtgggtttaccatcaccagcgccgactacgacagggtgctggagaagctgaagaagacagcaacaggctggatgaccacaattaacggcaaggagctgaaggtggagggccagattacctactacaacagatacaagagacagaacgtagtcaaggacctgtccgtcgagctggatagactgagcgaagaatctgtgaacaacgacatctcctcctggacaaagggcagaagcggagaagctctgagcctcctgaagaaaagattctcccatagacccgtgcaggagaagttcgtgtgcctgaactgcggcttcgagacacacgcagccgagcaagccgccctgaacatcgccagatcctggctgttcctgcggagccaggagtacaagaaataccagacaaacaagacaaccggcaacaccgataagagagccttcgtcgagacctggcagtccttttaccggaagaagcttaaggaggtgtggaaacctgccgtgcggtctggcggatctggcggaggctccttccagggcagcgtgaccttcgaggacgtggccatcgccttcagccagcaggagtgggagagcctggacagcagccagaggggcctgtacagggacgtgatgctggagaactacaggaacctggtgagcatgggccacagcctgagcaagccccacgtgatcgccctgctggagaggtggaaggagcccaaggtgaccgacaggaaggacggcaggaggtggtgcaccgacctgcagctggagggcggcccaagcagcggcgcccctcctcccagcggcggcagcccagccggctccccaacctctaccgaggagggcacctctgagtccgccacccccgagagcggccctggcacctccaccgagcccagcgagggcagcgcacccggcagccctgccggcagccccacctccacagaggagggaaccagcaccgagcccagcgaaggcagcgccccaggcaccagcaccgagcctagtgagcaggagattaaacggatcaacaagatcagaagaagacttgtgaaagacagcaacaccaagaaggccggcaagacaggccccatgaaaaccctgctggttagagtgatgacacccgatctgagagagcggctggaaaacctgagaaagaagcctgaaaatatcccccagcccatcagcaatacatctagagccaacctgaataagctgctgaccgattacaccgaaatgaagaaggcgatcctgcatgtgtactgggaagagttccagaaggaccctgtgggcctgatgagccgggtggcccagcctgccagcaagaagatcgatcagaacaagctgaaacctgagatggacgagaagggcaacctgaccaccgccggctttgcctgctctcagtgtggccagcccctgttcgtgtacaagctggagcaggtgtctgagaagggcaaggcttacaccaactacttcggacggtgcaatgtggccgagcacgaaaagctgatcctgctggcccagctgaagcccgagaaggatagcgacgaagccgtgacatatagcctgggaaagtttgggcagagggccctggatttctacagcattcatgtgaccaaggagtccacccaccccgtgaagcccctggcccagatcgccggaaacagatacgcctccggacctgtgggaaaggccctgagcgacgcatgtatgggcacaatcgcctccttcctgtctaagtaccaggacatcatcatcgaacaccagaaggtggtgaagggcaaccagaagagactggagagcctgcgggagctggccggcaaggaaaacctggaataccctagcgtgaccctgccacctcagcctcacaccaaggagggcgttgatgcctacaacgaagtgatcgcccgggtgcgaatgtgggtgaacctgaacctgtggcagaagctgaagctaagcagagatgatgccaagcctctgctgagactgaagggattcccttcctttcctctggtcgagagacaggccaacgaagtggactggtgggacatggtgtgtaacgtgaagaagctgatcaacgagaaaaaggaggatggcaaggtgttttggcagaatctggctggctacaagagacaggaagccctgagaccatacctgagcagcgaggaagatcggaagaagggaaagaaattcgctcggtaccagctgggcgacctgctgctgcacctggaaaagaagcacggcgaggactggggaaaggtgtacgacgaggcctgggagcggattgacaagaaagtggaaggcctgagcaagcacatcaagctggaagaggaacggagaagcgaggacgcccagagcaaggccgccctgaccgactggctgcgggctaaggccagcttcgtgatcgagggcctgaaggaggccgacaaggacgagttctgcagatgcgagctgaagctgcagaagtggtacggggacctgcggggaaagcccttcgccatcgaagccgagaacagcatcctggacatcagcggcttcagcaagcagtacaactgtgccttcatctggcagaaggacggcgtgaagaagctgaacctgtacctgatcatcaactacttcaagggcggcaagctgcggttcaagaagatcaaacctgaagccttcgaagccaacagattctacaccgtgatcaacaaaaagagcggcgagatcgtgcccatggaggtgaacttcaacttcgacgaccccaacctgatcatcctgcctctggcctttggcaagagacagggcagagaattcatctggaacgacctgctgtccctggaaaccggcagcctgaagctggccaacggaagagtgatcgagaagacactgtacaacagaagaacccggcaggatgagcctgccctgttcgtggccctgaccttcgagcggcgggaggtcctggactcctccaatatcaaaccaatgaacctgatcggcgtggcaagaggcgaaaacatccccgccgtgatcgccctgaccgaccccgagggctgcccactgagccggtttaaggatagcctgggaaacccaacccacatcctgagaatcggcgagagctataaggagaagcagcggaccatccaggccaagaaggaggtggagcagcggagagccggcggctacagccggaagtacgccagcaaagccaagaatctggcagacgatatggtgagaaacaccgctagagatctgctgtactacgccgtgacccaggatgccatgctgatcttcgccaacctgagccggggcttcggccggcagggcaagcggaccttcatggccgagagacagtacacacggatggaggactggctgaccgccaagctggcctacgagggcctgagcaagacctacctgtccaagacactggcccagtacacctccaagacatgcagcaactgtgggtttaccatcaccagcgccgactacgacagggtgctggagaagctgaagaagacagcaacaggctggatgaccacaattaacggcaaggagctgaaggtggagggccagattacctactacaacagatacaagagacagaacgtagtcaaggacctgtccgtcgagctggatagactgagcgaagaatctgtgaacaacgacatctcctcctggacaaagggcagaagcggagaagctctgagcctcctgaagaaaagattctcccatagacccgtgcaggagaagttcgtgtgcctgaactgcggcttcgagacacacgcagccgagcaagccgccctgaacatcgccagatcctggctgttcctgcggagccaggagtacaagaaataccagacaaacaagacaaccggcaacaccgataagagagccttcgtcgagacctggcagtccttttaccggaagaagcttaaggaggtgtggaaacctgccgtgcggtctggcggatctggcggaggctcctttccagggcagcgtgaccttcgaggacgtggccatcgccttcagccagcaggagtgggagagcctggacagcagccagaggggcctgtacagggacgtgatgctggagaactacaggaacctggtgagcatgggccacagcctgagcaagccccacgtgatcgccctgctggagaggtggaaggagcccaaggtgaccgacaggaaggacggcaggaggtggtgcaccgacctgcagctggagggatctggctccggcagcggccccaagaaaaagagaaaagtctaagctgccttctgcggggcttgccttctggccatgcccttcttctctcccttgcacctgtacctcttggtctttgaataaagcctgagtaggaaggctagcaaaaaaaaaaaaaaaaaaaaaaaaaaaaaaaaaaaaaaaaaaaaaaaaaaaaaaaaaaaaaaaaaaaaaaaaaaaaaaaa

SEQ ID NO: 16123 - RNA, 9485 nt, synthetic construct
  source 1..9485: mol_type = other RNA
aggaaataagagagaaaagaagagtaagaagaaatataagagccaccatggcccctaagaagaagcgtaaagtgagccggatggaacgcctcgtctacgaggtgcggcagaagtgcagaaacatcgaggacatctgcatctcctgcggatctctgaacgtgaccctggagcacccactgttcatcggcggcatgtgccagaactgtaaaaactgttttctggagtgtgcctatcaatacgacgatgacggctaccagagctactgcaccatctgttgcggcggaagagaggtgctgatgtgtggaaataacaactgctgccggtgcttctgcgtggaatgcgtggacctgctggtgggccccggcgccgcccaggccgctattaaggaagatccttggaactgctacatgtgcggccacaagggcacatacggcctgctgagacggagagaggactggcctagcagactgcagatgttcttcgccaataaccacgaccaggagttcgacccccctaaggtgtaccctcccgtccccgccgagaagagaaagcccatccgggtcctgagcctgttcgatggcatcgccaccggtctgctggtgctgaaggacctgggcatccaggtggataggtacattgcctccgaggtgtgcgaggactccatcaccgtgggaatggtgcgtcatcagggcaagatcatgtacgtgggcgacgtgcggagcgtgacacagaagcatatccaggagtggggccctttcgacctggtgatcggcggcagcccttgcaatgacctgagcatcgtgaacccagcccggaagggcctgtacgagggaaccggcagactgttcttcgagttttacagactgctgcacgacgcccggcctaaggaaggcgacgaccggcccttcttttggctgttcgagaatgtggtggccatgggagtcagcgacaagcgggatattagccggttcctggagagcaaccccgtgatgatcgatgccaaggaagtgagcgccgcccaccgggccagatacttctggggcaatctgcctggcatgaacagacccctggccagcaccgtgaacgacaagctggagctgcaggagtgcctggagcacggccggatcgccaagttcagcaaggtgagaaccatcaccacccgaagcaacagcatcaaacaaggcaaggaccagcactttcctgtgttcatgaacgagaaggaggacatcctgtggtgtaccgagatggagagagtgttcgggttcccagtccactacacagatgtcagcaacatgtctagactggccagacagagactgctgggaagaagctggtccgtccctgtgatcagacacctgttcgcccctctgaaggagtacttcgcctgcgtgagcagcggcaacagcaacgccaacagccggggccccagcttctctagcggcctggtgccactgtccctgagagggagccacatgggccccatggagatctacaaaaccgtgagcgcctggaagcggcagcctgtgcgcgtgctgagcctgtttcggaatatcgataaagtcctgaaaagcctgggattcctggagagcggctctggctccggcggtggcaccctgaagtacgtggaggatgtgacaaacgtggtcagacgggatgtggagaagtggggccccttcgatctggtgtacggcagcacccaacccctgggcagctcttgtgaccggtgccctggctggtacatgtttcagttccaccggatcctgcagtacgccctgccgagacaggagtcccagcggccattcttttggattttcatggacaacttgctgctgaccgaggatgaccaggaaactaccactcggttcctgcagaccgaagccgtgaccctgcaggacgtgagaggccgggactaccagaacgccatgcgggtgtggtccaacatccctggactgaaaagcaagcacgcacctctgacccctaaagaagaggagtacctgcaggcccaggtgcggagcagaagcaagctggacgcccctaaggtggatctgctggtgaagaattgcctcctgcccctgagagagtacttcaagtatttcagccagaatagtctgcccctgggaggcagcggcggcggcgccctggtgacatttgaggacgtcgccgtgcggttcacccaggaggaatgggctctgctggatccttctcagaaaatcctgtaccgggacgtgatgagagagacataccggaatctgacctccgtgggcatcaactgggaatgttgggaccttgaagcctgcttcagaagcctgggaagaaacctgagagtgcaggtggtgaagagaaagtgcgagctgaccaacagcggcccctgcgccgagggcggcccaagcagcggcgcccctcctcccagcggcggcagcccagccggctccccaacctctaccgaggagggcacctctgagtccgccacccccgagagcggccctggcacctccaccgagcccagcgagggcagcgcacccggcagccctgccggcagccccacctccacagaggagggaaccagcaccgagcccagcgaaggcagcgccccaggcaccagcaccgagcctagtgagcaggagattaaacggatcaacaagatcagaagaagacttgtgaaagacagcaacaccaagaaggccggcaagacaggccccatgaaaaccctgctggttagagtgatgacacccgatctgagagagcggctggaaaacctgagaaagaagcctgaaaatatcccccagcccatcagcaatacatctagagccaacctgaataagctgctgaccgattacaccgaaatgaagaaggcgatcctgcatgtgtactgggaagagttccagaaggaccctgtgggcctgatgagccgggtggcccagcctgccagcaagaagatcgatcagaacaagctgaaacctgagatggacgagaagggcaacctgaccaccgccggctttgcctgctctcagtgtggccagcccctgttcgtgtacaagctggagcaggtgtctgagaagggcaaggcttacaccaactacttcggacggtgcaatgtggccgagcacgaaaagctgatcctgctggcccagctgaagcccgagaaggatagcgacgaagccgtgacatatagcctgggaaagtttgggcagagggccctggatttctacagcattcatgtgaccaaggagtccacccaccccgtgaagcccctggcccagatcgccggaaacagatacgcctccggacctgtgggaaaggccctgagcgacgcatgtatgggcacaatcgcctccttcctgtctaagtaccaggacatcatcatcgaacaccagaaggtggtgaagggcaaccagaagagactggagagcctgcgggagctggccggcaaggaaaacctggaataccctagcgtgaccctgccacctcagcctcacaccaaggagggcgttgatgcctacaacgaagtgatcgcccgggtgcgaatgtgggtgaacctgaacctgtggcagaagctgaagctaagcagagatgatgccaagcctctgctgagactgaagggattcccttcctttcctctggtcgagagacaggccaacgaagtggactggtgggacatggtgtgtaacgtgaagaagctgatcaacgagaaaaaggaggatggcaaggtgttttggcagaatctggctggctacaagagacaggaagccctgagaccatacctgagcagcgaggaagatcggaagaagggaaagaaattcgctcggtaccagctgggcgacctgctgctgcacctggaaaagaagcacggcgaggactggggaaaggtgtacgacgaggcctgggagcggattgacaagaaagtggaaggcctgagcaagcacatcaagctggaagaggaacggagaagcgaggacgcccagagcaaggccgccctgaccgactggctgcgggctaaggccagcttcgtgatcgagggcctgaaggaggccgacaaggacgagttctgcagatgcgagctgaagctgcagaagtggtacggggacctgcggggaaagcccttcgccatcgaagccgagaacagcatcctggacatcagcggcttcagcaagcagtacaactgtgccttcatctggcagaaggacggcgtgaagaagctgaacctgtacctgatcatcaactacttcaagggcggcaagctgcggttcaagaagatcaaacctgaagccttcgaagccaacagattctacaccgtgatcaacaaaaagagcggcgagatcgtgcccatggaggtgaacttcaacttcgacgaccccaacctgatcatcctgcctctggcctttggcaagagacagggcagagaattcatctggaacgacctgctgtccctggaaaccggcagcctgaagctggccaacggaagagtgatcgagaagacactgtacaacagaagaacccggcaggatgagcctgccctgttcgtggccctgaccttcgagcggcgggaggtcctggactcctccaatatcaaaccaatgaacctgatcggcgtggcaagaggcgaaaacatccccgccgtgatcgccctgaccgaccccgagggctgcccactgagccggtttaaggatagcctgggaaacccaacccacatcctgagaatcggcgagagctataaggagaagcagcggaccatccaggccaagaaggaggtggagcagcggagagccggcggctacagccggaagtacgccagcaaagccaagaatctggcagacgatatggtgagaaacaccgctagagatctgctgtactacgccgtgacccaggatgccatgctgatcttcgccaacctgagccggggcttcggccggcagggcaagcggaccttcatggccgagagacagtacacacggatggaggactggctgaccgccaagctggcctacgagggcctgagcaagacctacctgtccaagacactggcccagtacacctccaagacatgcagcaactgtgggtttaccatcaccagcgccgactacgacagggtgctggagaagctgaagaagacagcaacaggctggatgaccacaattaacggcaaggagctgaaggtggagggccagattacctactacaacagatacaagagacagaacgtagtcaaggacctgtccgtcgagctggatagactgagcgaagaatctgtgaacaacgacatctcctcctggacaaagggcagaagcggagaagctctgagcctcctgaagaaaagattctcccatagacccgtgcaggagaagttcgtgtgcctgaactgcggcttcgagacacacgcagccgagcaagccgccctgaacatcgccagatcctggctgttcctgcggagccaggagtacaagaaataccagacaaacaagacaaccggcaacaccgataagagagccttcgtcgagacctggcagtccttttaccggaagaagcttaaggaggtgtggaaacctgccgtgcggtctggcggatctggcggaggctccatgaacgtggaggtgctgaaggtgatcagccaggacctggtgaccttcaaggacgtggccatcgacttcagccaggaggagtggcagtggatgaaccccgcccagaagaggctgtacaggagcatgatgctggagaactaccagagcctggtgagcctgggcctgtgcgtgagcaagccctacgtgatcagcctgctggagcagggcagggagccctgggagatgaccagcgagatgaccaggggcggcccaagcagcggcgcccctcctcccagcggcggcagcccagccggctccccaacctctaccgaggagggcacctctgagtccgccacccccgagagcggccctggcacctccaccgagcccagcgagggcagcgcacccggcagccctgccggcagccccacctccacagaggagggaaccagcaccgagcccagcgaaggcagcgccccaggcaccagcaccgagcctagtgagcaggagattaaacggatcaacaagatcagaagaagacttgtgaaagacagcaacaccaagaaggccggcaagacaggccccatgaaaaccctgctggttagagtgatgacacccgatctgagagagcggctggaaaacctgagaaagaagcctgaaaatatcccccagcccatcagcaatacatctagagccaacctgaataagctgctgaccgattacaccgaaatgaagaaggcgatcctgcatgtgtactgggaagagttccagaaggaccctgtgggcctgatgagccgggtggcccagcctgccagcaagaagatcgatcagaacaagctgaaacctgagatggacgagaagggcaacctgaccaccgccggctttgcctgctctcagtgtggccagcccctgttcgtgtacaagctggagcaggtgtctgagaagggcaaggcttacaccaactacttcggacggtgcaatgtggccgagcacgaaaagctgatcctgctggcccagctgaagcccgagaaggatagcgacgaagccgtgacatatagcctgggaaagtttgggcagagggccctggatttctacagcattcatgtgaccaaggagtccacccaccccgtgaagcccctggcccagatcgccggaaacagatacgcctccggacctgtgggaaaggccctgagcgacgcatgtatgggcacaatcgcctccttcctgtctaagtaccaggacatcatcatcgaacaccagaaggtggtgaagggcaaccagaagagactggagagcctgcgggagctggccggcaaggaaaacctggaataccctagcgtgaccctgccacctcagcctcacaccaaggagggcgttgatgcctacaacgaagtgatcgcccgggtgcgaatgtgggtgaacctgaacctgtggcagaagctgaagctaagcagagatgatgccaagcctctgctgagactgaagggattcccttcctttcctctggtcgagagacaggccaacgaagtggactggtgggacatggtgtgtaacgtgaagaagctgatcaacgagaaaaaggaggatggcaaggtgttttggcagaatctggctggctacaagagacaggaagccctgagaccatacctgagcagcgaggaagatcggaagaagggaaagaaattcgctcggtaccagctgggcgacctgctgctgcacctggaaaagaagcacggcgaggactggggaaaggtgtacgacgaggcctgggagcggattgacaagaaagtggaaggcctgagcaagcacatcaagctggaagaggaacggagaagcgaggacgcccagagcaaggccgccctgaccgactggctgcgggctaaggccagcttcgtgatcgagggcctgaaggaggccgacaaggacgagttctgcagatgcgagctgaagctgcagaagtggtacggggacctgcggggaaagcccttcgccatcgaagccgagaacagcatcctggacatcagcggcttcagcaagcagtacaactgtgccttcatctggcagaaggacggcgtgaagaagctgaacctgtacctgatcatcaactacttcaagggcggcaagctgcggttcaagaagatcaaacctgaagccttcgaagccaacagattctacaccgtgatcaacaaaaagagcggcgagatcgtgcccatggaggtgaacttcaacttcgacgaccccaacctgatcatcctgcctctggcctttggcaagagacagggcagagaattcatctggaacgacctgctgtccctggaaaccggcagcctgaagctggccaacggaagagtgatcgagaagacactgtacaacagaagaacccggcaggatgagcctgccctgttcgtggccctgaccttcgagcggcgggaggtcctggactcctccaatatcaaaccaatgaacctgatcggcgtggcaagaggcgaaaacatccccgccgtgatcgccctgaccgaccccgagggctgcccactgagccggtttaaggatagcctgggaaacccaacccacatcctgagaatcggcgagagctataaggagaagcagcggaccatccaggccaagaaggaggtggagcagcggagagccggcggctacagccggaagtacgccagcaaagccaagaatctggcagacgatatggtgagaaacaccgctagagatctgctgtactacgccgtgacccaggatgccatgctgatcttcgccaacctgagccggggcttcggccggcagggcaagcggaccttcatggccgagagacagtacacacggatggaggactggctgaccgccaagctggcctacgagggcctgagcaagacctacctgtccaagacactggcccagtacacctccaagacatgcagcaactgtgggtttaccatcaccagcgccgactacgacagggtgctggagaagctgaagaagacagcaacaggctggatgaccacaattaacggcaaggagctgaaggtggagggccagattacctactacaacagatacaagagacagaacgtagtcaaggacctgtccgtcgagctggatagactgagcgaagaatctgtgaacaacgacatctcctcctggacaaagggcagaagcggagaagctctgagcctcctgaagaaaagattctcccatagacccgtgcaggagaagttcgtgtgcctgaactgcggcttcgagacacacgcagccgagcaagccgccctgaacatcgccagatcctggctgttcctgcggagccaggagtacaagaaataccagacaaacaagacaaccggcaacaccgataagagagccttcgtcgagacctggcagtccttttaccggaagaagcttaaggaggtgtggaaacctgccgtgcggtctggcggatctggcggaggctcctatgaacgtggaggtgctgaaggtgatcagccaggacctggtgaccttcaaggacgtggccatcgacttcagccaggaggagtggcagtggatgaaccccgcccagaagaggctgtacaggagcatgatgctggagaactaccagagcctggtgagcctgggcctgtgcgtgagcaagccctacgtgatcagcctgctggagcagggcagggagccctgggagatgaccagcgagatgaccaggggatctggctccggcagcggccccaagaaaaagagaaaagtctaagctgccttctgcggggcttgccttctggccatgcccttcttctctcccttgcacctgtacctcttggtctttgaataaagcctgagtaggaaggctagcaaaaaaaaaaaaaaaaaaaaaaaaaaaaaaaaaaaaaaaaaaaaaaaaaaaaaaaaaaaaaaaaaaaaaaaaaaaaaaaa

SEQ ID NO: 16124 - RNA, 9485 nt, synthetic construct
  source 1..9485: mol_type = other RNA
aggaaataagagagaaaagaagagtaagaagaaatataagagccaccatggcccctaagaagaagcgtaaagtgagccggatggaacgcctcgtctacgaggtgcggcagaagtgcagaaacatcgaggacatctgcatctcctgcggatctctgaacgtgaccctggagcacccactgttcatcggcggcatgtgccagaactgtaaaaactgttttctggagtgtgcctatcaatacgacgatgacggctaccagagctactgcaccatctgttgcggcggaagagaggtgctgatgtgtggaaataacaactgctgccggtgcttctgcgtggaatgcgtggacctgctggtgggccccggcgccgcccaggccgctattaaggaagatccttggaactgctacatgtgcggccacaagggcacatacggcctgctgagacggagagaggactggcctagcagactgcagatgttcttcgccaataaccacgaccaggagttcgacccccctaaggtgtaccctcccgtccccgccgagaagagaaagcccatccgggtcctgagcctgttcgatggcatcgccaccggtctgctggtgctgaaggacctgggcatccaggtggataggtacattgcctccgaggtgtgcgaggactccatcaccgtgggaatggtgcgtcatcagggcaagatcatgtacgtgggcgacgtgcggagcgtgacacagaagcatatccaggagtggggccctttcgacctggtgatcggcggcagcccttgcaatgacctgagcatcgtgaacccagcccggaagggcctgtacgagggaaccggcagactgttcttcgagttttacagactgctgcacgacgcccggcctaaggaaggcgacgaccggcccttcttttggctgttcgagaatgtggtggccatgggagtcagcgacaagcgggatattagccggttcctggagagcaaccccgtgatgatcgatgccaaggaagtgagcgccgcccaccgggccagatacttctggggcaatctgcctggcatgaacagacccctggccagcaccgtgaacgacaagctggagctgcaggagtgcctggagcacggccggatcgccaagttcagcaaggtgagaaccatcaccacccgaagcaacagcatcaaacaaggcaaggaccagcactttcctgtgttcatgaacgagaaggaggacatcctgtggtgtaccgagatggagagagtgttcgggttcccagtccactacacagatgtcagcaacatgtctagactggccagacagagactgctgggaagaagctggtccgtccctgtgatcagacacctgttcgcccctctgaaggagtacttcgcctgcgtgagcagcggcaacagcaacgccaacagccggggccccagcttctctagcggcctggtgccactgtccctgagagggagccacatgggccccatggagatctacaaaaccgtgagcgcctggaagcggcagcctgtgcgcgtgctgagcctgtttcggaatatcgataaagtcctgaaaagcctgggattcctggagagcggctctggctccggcggtggcaccctgaagtacgtggaggatgtgacaaacgtggtcagacgggatgtggagaagtggggccccttcgatctggtgtacggcagcacccaacccctgggcagctcttgtgaccggtgccctggctggtacatgtttcagttccaccggatcctgcagtacgccctgccgagacaggagtcccagcggccattcttttggattttcatggacaacttgctgctgaccgaggatgaccaggaaactaccactcggttcctgcagaccgaagccgtgaccctgcaggacgtgagaggccgggactaccagaacgccatgcgggtgtggtccaacatccctggactgaaaagcaagcacgcacctctgacccctaaagaagaggagtacctgcaggcccaggtgcggagcagaagcaagctggacgcccctaaggtggatctgctggtgaagaattgcctcctgcccctgagagagtacttcaagtatttcagccagaatagtctgcccctgggaggcagcggcggcggcgccctggtgacatttgaggacgtcgccgtgcggttcacccaggaggaatgggctctgctggatccttctcagaaaatcctgtaccgggacgtgatgagagagacataccggaatctgacctccgtgggcatcaactgggaatgttgggaccttgaagcctgcttcagaagcctgggaagaaacctgagagtgcaggtggtgaagagaaagtgcgagctgaccaacagcggcccctgcgccgagggcggcccaagcagcggcgcccctcctcccagcggcggcagcccagccggctccccaacctctaccgaggagggcacctctgagtccgccacccccgagagcggccctggcacctccaccgagcccagcgagggcagcgcacccggcagccctgccggcagccccacctccacagaggagggaaccagcaccgagcccagcgaaggcagcgccccaggcaccagcaccgagcctagtgagcaggagattaaacggatcaacaagatcagaagaagacttgtgaaagacagcaacaccaagaaggccggcaagacaggccccatgaaaaccctgctggttagagtgatgacacccgatctgagagagcggctggaaaacctgagaaagaagcctgaaaatatcccccagcccatcagcaatacatctagagccaacctgaataagctgctgaccgattacaccgaaatgaagaaggcgatcctgcatgtgtactgggaagagttccagaaggaccctgtgggcctgatgagccgggtggcccagcctgccagcaagaagatcgatcagaacaagctgaaacctgagatggacgagaagggcaacctgaccaccgccggctttgcctgctctcagtgtggccagcccctgttcgtgtacaagctggagcaggtgtctgagaagggcaaggcttacaccaactacttcggacggtgcaatgtggccgagcacgaaaagctgatcctgctggcccagctgaagcccgagaaggatagcgacgaagccgtgacatatagcctgggaaagtttgggcagagggccctggatttctacagcattcatgtgaccaaggagtccacccaccccgtgaagcccctggcccagatcgccggaaacagatacgcctccggacctgtgggaaaggccctgagcgacgcatgtatgggcacaatcgcctccttcctgtctaagtaccaggacatcatcatcgaacaccagaaggtggtgaagggcaaccagaagagactggagagcctgcgggagctggccggcaaggaaaacctggaataccctagcgtgaccctgccacctcagcctcacaccaaggagggcgttgatgcctacaacgaagtgatcgcccgggtgcgaatgtgggtgaacctgaacctgtggcagaagctgaagctaagcagagatgatgccaagcctctgctgagactgaagggattcccttcctttcctctggtcgagagacaggccaacgaagtggactggtgggacatggtgtgtaacgtgaagaagctgatcaacgagaaaaaggaggatggcaaggtgttttggcagaatctggctggctacaagagacaggaagccctgagaccatacctgagcagcgaggaagatcggaagaagggaaagaaattcgctcggtaccagctgggcgacctgctgctgcacctggaaaagaagcacggcgaggactggggaaaggtgtacgacgaggcctgggagcggattgacaagaaagtggaaggcctgagcaagcacatcaagctggaagaggaacggagaagcgaggacgcccagagcaaggccgccctgaccgactggctgcgggctaaggccagcttcgtgatcgagggcctgaaggaggccgacaaggacgagttctgcagatgcgagctgaagctgcagaagtggtacggggacctgcggggaaagcccttcgccatcgaagccgagaacagcatcctggacatcagcggcttcagcaagcagtacaactgtgccttcatctggcagaaggacggcgtgaagaagctgaacctgtacctgatcatcaactacttcaagggcggcaagctgcggttcaagaagatcaaacctgaagccttcgaagccaacagattctacaccgtgatcaacaaaaagagcggcgagatcgtgcccatggaggtgaacttcaacttcgacgaccccaacctgatcatcctgcctctggcctttggcaagagacagggcagagaattcatctggaacgacctgctgtccctggaaaccggcagcctgaagctggccaacggaagagtgatcgagaagacactgtacaacagaagaacccggcaggatgagcctgccctgttcgtggccctgaccttcgagcggcgggaggtcctggactcctccaatatcaaaccaatgaacctgatcggcgtggcaagaggcgaaaacatccccgccgtgatcgccctgaccgaccccgagggctgcccactgagccggtttaaggatagcctgggaaacccaacccacatcctgagaatcggcgagagctataaggagaagcagcggaccatccaggccaagaaggaggtggagcagcggagagccggcggctacagccggaagtacgccagcaaagccaagaatctggcagacgatatggtgagaaacaccgctagagatctgctgtactacgccgtgacccaggatgccatgctgatcttcgccaacctgagccggggcttcggccggcagggcaagcggaccttcatggccgagagacagtacacacggatggaggactggctgaccgccaagctggcctacgagggcctgagcaagacctacctgtccaagacactggcccagtacacctccaagacatgcagcaactgtgggtttaccatcaccagcgccgactacgacagggtgctggagaagctgaagaagacagcaacaggctggatgaccacaattaacggcaaggagctgaaggtggagggccagattacctactacaacagatacaagagacagaacgtagtcaaggacctgtccgtcgagctggatagactgagcgaagaatctgtgaacaacgacatctcctcctggacaaagggcagaagcggagaagctctgagcctcctgaagaaaagattctcccatagacccgtgcaggagaagttcgtgtgcctgaactgcggcttcgagacacacgcagccgagcaagccgccctgaacatcgccagatcctggctgttcctgcggagccaggagtacaagaaataccagacaaacaagacaaccggcaacaccgataagagagccttcgtcgagacctggcagtccttttaccggaagaagcttaaggaggtgtggaaacctgccgtgcggtctggcggatctggcggaggctccgcccaggagagcctgaccctggaggacgtggccgtggacttcagcagggaggagtggaggctgctggcccccgcccagaaggacctgtacagggacgtgatgctggagaacttcaggaacctggtgagcgtgggccaccaggccagcaagcccgacgtgctggccaagctggagaggggcgaggagccctgggccatcgaggaggaggtgaggagcggcaccagccccgagaccggcaaggtgggcggcccaagcagcggcgcccctcctcccagcggcggcagcccagccggctccccaacctctaccgaggagggcacctctgagtccgccacccccgagagcggccctggcacctccaccgagcccagcgagggcagcgcacccggcagccctgccggcagccccacctccacagaggagggaaccagcaccgagcccagcgaaggcagcgccccaggcaccagcaccgagcctagtgagcaggagattaaacggatcaacaagatcagaagaagacttgtgaaagacagcaacaccaagaaggccggcaagacaggccccatgaaaaccctgctggttagagtgatgacacccgatctgagagagcggctggaaaacctgagaaagaagcctgaaaatatcccccagcccatcagcaatacatctagagccaacctgaataagctgctgaccgattacaccgaaatgaagaaggcgatcctgcatgtgtactgggaagagttccagaaggaccctgtgggcctgatgagccgggtggcccagcctgccagcaagaagatcgatcagaacaagctgaaacctgagatggacgagaagggcaacctgaccaccgccggctttgcctgctctcagtgtggccagcccctgttcgtgtacaagctggagcaggtgtctgagaagggcaaggcttacaccaactacttcggacggtgcaatgtggccgagcacgaaaagctgatcctgctggcccagctgaagcccgagaaggatagcgacgaagccgtgacatatagcctgggaaagtttgggcagagggccctggatttctacagcattcatgtgaccaaggagtccacccaccccgtgaagcccctggcccagatcgccggaaacagatacgcctccggacctgtgggaaaggccctgagcgacgcatgtatgggcacaatcgcctccttcctgtctaagtaccaggacatcatcatcgaacaccagaaggtggtgaagggcaaccagaagagactggagagcctgcgggagctggccggcaaggaaaacctggaataccctagcgtgaccctgccacctcagcctcacaccaaggagggcgttgatgcctacaacgaagtgatcgcccgggtgcgaatgtgggtgaacctgaacctgtggcagaagctgaagctaagcagagatgatgccaagcctctgctgagactgaagggattcccttcctttcctctggtcgagagacaggccaacgaagtggactggtgggacatggtgtgtaacgtgaagaagctgatcaacgagaaaaaggaggatggcaaggtgttttggcagaatctggctggctacaagagacaggaagccctgagaccatacctgagcagcgaggaagatcggaagaagggaaagaaattcgctcggtaccagctgggcgacctgctgctgcacctggaaaagaagcacggcgaggactggggaaaggtgtacgacgaggcctgggagcggattgacaagaaagtggaaggcctgagcaagcacatcaagctggaagaggaacggagaagcgaggacgcccagagcaaggccgccctgaccgactggctgcgggctaaggccagcttcgtgatcgagggcctgaaggaggccgacaaggacgagttctgcagatgcgagctgaagctgcagaagtggtacggggacctgcggggaaagcccttcgccatcgaagccgagaacagcatcctggacatcagcggcttcagcaagcagtacaactgtgccttcatctggcagaaggacggcgtgaagaagctgaacctgtacctgatcatcaactacttcaagggcggcaagctgcggttcaagaagatcaaacctgaagccttcgaagccaacagattctacaccgtgatcaacaaaaagagcggcgagatcgtgcccatggaggtgaacttcaacttcgacgaccccaacctgatcatcctgcctctggcctttggcaagagacagggcagagaattcatctggaacgacctgctgtccctggaaaccggcagcctgaagctggccaacggaagagtgatcgagaagacactgtacaacagaagaacccggcaggatgagcctgccctgttcgtggccctgaccttcgagcggcgggaggtcctggactcctccaatatcaaaccaatgaacctgatcggcgtggcaagaggcgaaaacatccccgccgtgatcgccctgaccgaccccgagggctgcccactgagccggtttaaggatagcctgggaaacccaacccacatcctgagaatcggcgagagctataaggagaagcagcggaccatccaggccaagaaggaggtggagcagcggagagccggcggctacagccggaagtacgccagcaaagccaagaatctggcagacgatatggtgagaaacaccgctagagatctgctgtactacgccgtgacccaggatgccatgctgatcttcgccaacctgagccggggcttcggccggcagggcaagcggaccttcatggccgagagacagtacacacggatggaggactggctgaccgccaagctggcctacgagggcctgagcaagacctacctgtccaagacactggcccagtacacctccaagacatgcagcaactgtgggtttaccatcaccagcgccgactacgacagggtgctggagaagctgaagaagacagcaacaggctggatgaccacaattaacggcaaggagctgaaggtggagggccagattacctactacaacagatacaagagacagaacgtagtcaaggacctgtccgtcgagctggatagactgagcgaagaatctgtgaacaacgacatctcctcctggacaaagggcagaagcggagaagctctgagcctcctgaagaaaagattctcccatagacccgtgcaggagaagttcgtgtgcctgaactgcggcttcgagacacacgcagccgagcaagccgccctgaacatcgccagatcctggctgttcctgcggagccaggagtacaagaaataccagacaaacaagacaaccggcaacaccgataagagagccttcgtcgagacctggcagtccttttaccggaagaagcttaaggaggtgtggaaacctgccgtgcggtctggcggatctggcggaggctcctgcccaggagagcctgaccctggaggacgtggccgtggacttcagcagggaggagtggaggctgctggcccccgcccagaaggacctgtacagggacgtgatgctggagaacttcaggaacctggtgagcgtgggccaccaggccagcaagcccgacgtgctggccaagctggagaggggcgaggagccctgggccatcgaggaggaggtgaggagcggcaccagccccgagaccggcaaggtgggatctggctccggcagcggccccaagaaaaagagaaaagtctaagctgccttctgcggggcttgccttctggccatgcccttcttctctcccttgcacctgtacctcttggtctttgaataaagcctgagtaggaaggctagcaaaaaaaaaaaaaaaaaaaaaaaaaaaaaaaaaaaaaaaaaaaaaaaaaaaaaaaaaaaaaaaaaaaaaaaaaaaaaaaa

SEQ ID NO: 16125 - RNA, 9497 nt, synthetic construct
  source 1..9497: mol_type = other RNA
aggaaataagagagaaaagaagagtaagaagaaatataagagccaccatggcccctaagaagaagcgtaaagtgagccggatggaacgcctcgtctacgaggtgcggcagaagtgcagaaacatcgaggacatctgcatctcctgcggatctctgaacgtgaccctggagcacccactgttcatcggcggcatgtgccagaactgtaaaaactgttttctggagtgtgcctatcaatacgacgatgacggctaccagagctactgcaccatctgttgcggcggaagagaggtgctgatgtgtggaaataacaactgctgccggtgcttctgcgtggaatgcgtggacctgctggtgggccccggcgccgcccaggccgctattaaggaagatccttggaactgctacatgtgcggccacaagggcacatacggcctgctgagacggagagaggactggcctagcagactgcagatgttcttcgccaataaccacgaccaggagttcgacccccctaaggtgtaccctcccgtccccgccgagaagagaaagcccatccgggtcctgagcctgttcgatggcatcgccaccggtctgctggtgctgaaggacctgggcatccaggtggataggtacattgcctccgaggtgtgcgaggactccatcaccgtgggaatggtgcgtcatcagggcaagatcatgtacgtgggcgacgtgcggagcgtgacacagaagcatatccaggagtggggccctttcgacctggtgatcggcggcagcccttgcaatgacctgagcatcgtgaacccagcccggaagggcctgtacgagggaaccggcagactgttcttcgagttttacagactgctgcacgacgcccggcctaaggaaggcgacgaccggcccttcttttggctgttcgagaatgtggtggccatgggagtcagcgacaagcgggatattagccggttcctggagagcaaccccgtgatgatcgatgccaaggaagtgagcgccgcccaccgggccagatacttctggggcaatctgcctggcatgaacagacccctggccagcaccgtgaacgacaagctggagctgcaggagtgcctggagcacggccggatcgccaagttcagcaaggtgagaaccatcaccacccgaagcaacagcatcaaacaaggcaaggaccagcactttcctgtgttcatgaacgagaaggaggacatcctgtggtgtaccgagatggagagagtgttcgggttcccagtccactacacagatgtcagcaacatgtctagactggccagacagagactgctgggaagaagctggtccgtccctgtgatcagacacctgttcgcccctctgaaggagtacttcgcctgcgtgagcagcggcaacagcaacgccaacagccggggccccagcttctctagcggcctggtgccactgtccctgagagggagccacatgggccccatggagatctacaaaaccgtgagcgcctggaagcggcagcctgtgcgcgtgctgagcctgtttcggaatatcgataaagtcctgaaaagcctgggattcctggagagcggctctggctccggcggtggcaccctgaagtacgtggaggatgtgacaaacgtggtcagacgggatgtggagaagtggggccccttcgatctggtgtacggcagcacccaacccctgggcagctcttgtgaccggtgccctggctggtacatgtttcagttccaccggatcctgcagtacgccctgccgagacaggagtcccagcggccattcttttggattttcatggacaacttgctgctgaccgaggatgaccaggaaactaccactcggttcctgcagaccgaagccgtgaccctgcaggacgtgagaggccgggactaccagaacgccatgcgggtgtggtccaacatccctggactgaaaagcaagcacgcacctctgacccctaaagaagaggagtacctgcaggcccaggtgcggagcagaagcaagctggacgcccctaaggtggatctgctggtgaagaattgcctcctgcccctgagagagtacttcaagtatttcagccagaatagtctgcccctgggaggcagcggcggcggcgccctggtgacatttgaggacgtcgccgtgcggttcacccaggaggaatgggctctgctggatccttctcagaaaatcctgtaccgggacgtgatgagagagacataccggaatctgacctccgtgggcatcaactgggaatgttgggaccttgaagcctgcttcagaagcctgggaagaaacctgagagtgcaggtggtgaagagaaagtgcgagctgaccaacagcggcccctgcgccgagggcggcccaagcagcggcgcccctcctcccagcggcggcagcccagccggctccccaacctctaccgaggagggcacctctgagtccgccacccccgagagcggccctggcacctccaccgagcccagcgagggcagcgcacccggcagccctgccggcagccccacctccacagaggagggaaccagcaccgagcccagcgaaggcagcgccccaggcaccagcaccgagcctagtgagcaggagattaaacggatcaacaagatcagaagaagacttgtgaaagacagcaacaccaagaaggccggcaagacaggccccatgaaaaccctgctggttagagtgatgacacccgatctgagagagcggctggaaaacctgagaaagaagcctgaaaatatcccccagcccatcagcaatacatctagagccaacctgaataagctgctgaccgattacaccgaaatgaagaaggcgatcctgcatgtgtactgggaagagttccagaaggaccctgtgggcctgatgagccgggtggcccagcctgccagcaagaagatcgatcagaacaagctgaaacctgagatggacgagaagggcaacctgaccaccgccggctttgcctgctctcagtgtggccagcccctgttcgtgtacaagctggagcaggtgtctgagaagggcaaggcttacaccaactacttcggacggtgcaatgtggccgagcacgaaaagctgatcctgctggcccagctgaagcccgagaaggatagcgacgaagccgtgacatatagcctgggaaagtttgggcagagggccctggatttctacagcattcatgtgaccaaggagtccacccaccccgtgaagcccctggcccagatcgccggaaacagatacgcctccggacctgtgggaaaggccctgagcgacgcatgtatgggcacaatcgcctccttcctgtctaagtaccaggacatcatcatcgaacaccagaaggtggtgaagggcaaccagaagagactggagagcctgcgggagctggccggcaaggaaaacctggaataccctagcgtgaccctgccacctcagcctcacaccaaggagggcgttgatgcctacaacgaagtgatcgcccgggtgcgaatgtgggtgaacctgaacctgtggcagaagctgaagctaagcagagatgatgccaagcctctgctgagactgaagggattcccttcctttcctctggtcgagagacaggccaacgaagtggactggtgggacatggtgtgtaacgtgaagaagctgatcaacgagaaaaaggaggatggcaaggtgttttggcagaatctggctggctacaagagacaggaagccctgagaccatacctgagcagcgaggaagatcggaagaagggaaagaaattcgctcggtaccagctgggcgacctgctgctgcacctggaaaagaagcacggcgaggactggggaaaggtgtacgacgaggcctgggagcggattgacaagaaagtggaaggcctgagcaagcacatcaagctggaagaggaacggagaagcgaggacgcccagagcaaggccgccctgaccgactggctgcgggctaaggccagcttcgtgatcgagggcctgaaggaggccgacaaggacgagttctgcagatgcgagctgaagctgcagaagtggtacggggacctgcggggaaagcccttcgccatcgaagccgagaacagcatcctggacatcagcggcttcagcaagcagtacaactgtgccttcatctggcagaaggacggcgtgaagaagctgaacctgtacctgatcatcaactacttcaagggcggcaagctgcggttcaagaagatcaaacctgaagccttcgaagccaacagattctacaccgtgatcaacaaaaagagcggcgagatcgtgcccatggaggtgaacttcaacttcgacgaccccaacctgatcatcctgcctctggcctttggcaagagacagggcagagaattcatctggaacgacctgctgtccctggaaaccggcagcctgaagctggccaacggaagagtgatcgagaagacactgtacaacagaagaacccggcaggatgagcctgccctgttcgtggccctgaccttcgagcggcgggaggtcctggactcctccaatatcaaaccaatgaacctgatcggcgtggcaagaggcgaaaacatccccgccgtgatcgccctgaccgaccccgagggctgcccactgagccggtttaaggatagcctgggaaacccaacccacatcctgagaatcggcgagagctataaggagaagcagcggaccatccaggccaagaaggaggtggagcagcggagagccggcggctacagccggaagtacgccagcaaagccaagaatctggcagacgatatggtgagaaacaccgctagagatctgctgtactacgccgtgacccaggatgccatgctgatcttcgccaacctgagccggggcttcggccggcagggcaagcggaccttcatggccgagagacagtacacacggatggaggactggctgaccgccaagctggcctacgagggcctgagcaagacctacctgtccaagacactggcccagtacacctccaagacatgcagcaactgtgggtttaccatcaccagcgccgactacgacagggtgctggagaagctgaagaagacagcaacaggctggatgaccacaattaacggcaaggagctgaaggtggagggccagattacctactacaacagatacaagagacagaacgtagtcaaggacctgtccgtcgagctggatagactgagcgaagaatctgtgaacaacgacatctcctcctggacaaagggcagaagcggagaagctctgagcctcctgaagaaaagattctcccatagacccgtgcaggagaagttcgtgtgcctgaactgcggcttcgagacacacgcagccgagcaagccgccctgaacatcgccagatcctggctgttcctgcggagccaggagtacaagaaataccagacaaacaagacaaccggcaacaccgataagagagccttcgtcgagacctggcagtccttttaccggaagaagcttaaggaggtgtggaaacctgccgtgcggtctggcggatctggcggaggctccgtgaccttcaaggacgtggccgtgatcttcaccgaggaggagctgggcctgctggaccccgcccagaggaagctgtacagggacgtgatgctggagaacttcaggaacctgctgagcgtgggccaccagcccttccacggcgacaccttccacttcctgagggaggagaagttctgggtgatgggcaccaccagccagagggagggcaacctgggcggcaagatccagaccgagatggagaccgtgcccggcggcccaagcagcggcgcccctcctcccagcggcggcagcccagccggctccccaacctctaccgaggagggcacctctgagtccgccacccccgagagcggccctggcacctccaccgagcccagcgagggcagcgcacccggcagccctgccggcagccccacctccacagaggagggaaccagcaccgagcccagcgaaggcagcgccccaggcaccagcaccgagcctagtgagcaggagattaaacggatcaacaagatcagaagaagacttgtgaaagacagcaacaccaagaaggccggcaagacaggccccatgaaaaccctgctggttagagtgatgacacccgatctgagagagcggctggaaaacctgagaaagaagcctgaaaatatcccccagcccatcagcaatacatctagagccaacctgaataagctgctgaccgattacaccgaaatgaagaaggcgatcctgcatgtgtactgggaagagttccagaaggaccctgtgggcctgatgagccgggtggcccagcctgccagcaagaagatcgatcagaacaagctgaaacctgagatggacgagaagggcaacctgaccaccgccggctttgcctgctctcagtgtggccagcccctgttcgtgtacaagctggagcaggtgtctgagaagggcaaggcttacaccaactacttcggacggtgcaatgtggccgagcacgaaaagctgatcctgctggcccagctgaagcccgagaaggatagcgacgaagccgtgacatatagcctgggaaagtttgggcagagggccctggatttctacagcattcatgtgaccaaggagtccacccaccccgtgaagcccctggcccagatcgccggaaacagatacgcctccggacctgtgggaaaggccctgagcgacgcatgtatgggcacaatcgcctccttcctgtctaagtaccaggacatcatcatcgaacaccagaaggtggtgaagggcaaccagaagagactggagagcctgcgggagctggccggcaaggaaaacctggaataccctagcgtgaccctgccacctcagcctcacaccaaggagggcgttgatgcctacaacgaagtgatcgcccgggtgcgaatgtgggtgaacctgaacctgtggcagaagctgaagctaagcagagatgatgccaagcctctgctgagactgaagggattcccttcctttcctctggtcgagagacaggccaacgaagtggactggtgggacatggtgtgtaacgtgaagaagctgatcaacgagaaaaaggaggatggcaaggtgttttggcagaatctggctggctacaagagacaggaagccctgagaccatacctgagcagcgaggaagatcggaagaagggaaagaaattcgctcggtaccagctgggcgacctgctgctgcacctggaaaagaagcacggcgaggactggggaaaggtgtacgacgaggcctgggagcggattgacaagaaagtggaaggcctgagcaagcacatcaagctggaagaggaacggagaagcgaggacgcccagagcaaggccgccctgaccgactggctgcgggctaaggccagcttcgtgatcgagggcctgaaggaggccgacaaggacgagttctgcagatgcgagctgaagctgcagaagtggtacggggacctgcggggaaagcccttcgccatcgaagccgagaacagcatcctggacatcagcggcttcagcaagcagtacaactgtgccttcatctggcagaaggacggcgtgaagaagctgaacctgtacctgatcatcaactacttcaagggcggcaagctgcggttcaagaagatcaaacctgaagccttcgaagccaacagattctacaccgtgatcaacaaaaagagcggcgagatcgtgcccatggaggtgaacttcaacttcgacgaccccaacctgatcatcctgcctctggcctttggcaagagacagggcagagaattcatctggaacgacctgctgtccctggaaaccggcagcctgaagctggccaacggaagagtgatcgagaagacactgtacaacagaagaacccggcaggatgagcctgccctgttcgtggccctgaccttcgagcggcgggaggtcctggactcctccaatatcaaaccaatgaacctgatcggcgtggcaagaggcgaaaacatccccgccgtgatcgccctgaccgaccccgagggctgcccactgagccggtttaaggatagcctgggaaacccaacccacatcctgagaatcggcgagagctataaggagaagcagcggaccatccaggccaagaaggaggtggagcagcggagagccggcggctacagccggaagtacgccagcaaagccaagaatctggcagacgatatggtgagaaacaccgctagagatctgctgtactacgccgtgacccaggatgccatgctgatcttcgccaacctgagccggggcttcggccggcagggcaagcggaccttcatggccgagagacagtacacacggatggaggactggctgaccgccaagctggcctacgagggcctgagcaagacctacctgtccaagacactggcccagtacacctccaagacatgcagcaactgtgggtttaccatcaccagcgccgactacgacagggtgctggagaagctgaagaagacagcaacaggctggatgaccacaattaacggcaaggagctgaaggtggagggccagattacctactacaacagatacaagagacagaacgtagtcaaggacctgtccgtcgagctggatagactgagcgaagaatctgtgaacaacgacatctcctcctggacaaagggcagaagcggagaagctctgagcctcctgaagaaaagattctcccatagacccgtgcaggagaagttcgtgtgcctgaactgcggcttcgagacacacgcagccgagcaagccgccctgaacatcgccagatcctggctgttcctgcggagccaggagtacaagaaataccagacaaacaagacaaccggcaacaccgataagagagccttcgtcgagacctggcagtccttttaccggaagaagcttaaggaggtgtggaaacctgccgtgcggtctggcggatctggcggaggctcctgtgaccttcaaggacgtggccgtgatcttcaccgaggaggagctgggcctgctggaccccgcccagaggaagctgtacagggacgtgatgctggagaacttcaggaacctgctgagcgtgggccaccagcccttccacggcgacaccttccacttcctgagggaggagaagttctgggtgatgggcaccaccagccagagggagggcaacctgggcggcaagatccagaccgagatggagaccgtgcccggatctggctccggcagcggccccaagaaaaagagaaaagtctaagctgccttctgcggggcttgccttctggccatgcccttcttctctcccttgcacctgtacctcttggtctttgaataaagcctgagtaggaaggctagcaaaaaaaaaaaaaaaaaaaaaaaaaaaaaaaaaaaaaaaaaaaaaaaaaaaaaaaaaaaaaaaaaaaaaaaaaaaaaaaa

SEQ ID NO: 16126 - RNA, 9485 nt, synthetic construct
  source 1..9485: mol_type = other RNA
aggaaataagagagaaaagaagagtaagaagaaatataagagccaccatggcccctaagaagaagcgtaaagtgagccggatggaacgcctcgtctacgaggtgcggcagaagtgcagaaacatcgaggacatctgcatctcctgcggatctctgaacgtgaccctggagcacccactgttcatcggcggcatgtgccagaactgtaaaaactgttttctggagtgtgcctatcaatacgacgatgacggctaccagagctactgcaccatctgttgcggcggaagagaggtgctgatgtgtggaaataacaactgctgccggtgcttctgcgtggaatgcgtggacctgctggtgggccccggcgccgcccaggccgctattaaggaagatccttggaactgctacatgtgcggccacaagggcacatacggcctgctgagacggagagaggactggcctagcagactgcagatgttcttcgccaataaccacgaccaggagttcgacccccctaaggtgtaccctcccgtccccgccgagaagagaaagcccatccgggtcctgagcctgttcgatggcatcgccaccggtctgctggtgctgaaggacctgggcatccaggtggataggtacattgcctccgaggtgtgcgaggactccatcaccgtgggaatggtgcgtcatcagggcaagatcatgtacgtgggcgacgtgcggagcgtgacacagaagcatatccaggagtggggccctttcgacctggtgatcggcggcagcccttgcaatgacctgagcatcgtgaacccagcccggaagggcctgtacgagggaaccggcagactgttcttcgagttttacagactgctgcacgacgcccggcctaaggaaggcgacgaccggcccttcttttggctgttcgagaatgtggtggccatgggagtcagcgacaagcgggatattagccggttcctggagagcaaccccgtgatgatcgatgccaaggaagtgagcgccgcccaccgggccagatacttctggggcaatctgcctggcatgaacagacccctggccagcaccgtgaacgacaagctggagctgcaggagtgcctggagcacggccggatcgccaagttcagcaaggtgagaaccatcaccacccgaagcaacagcatcaaacaaggcaaggaccagcactttcctgtgttcatgaacgagaaggaggacatcctgtggtgtaccgagatggagagagtgttcgggttcccagtccactacacagatgtcagcaacatgtctagactggccagacagagactgctgggaagaagctggtccgtccctgtgatcagacacctgttcgcccctctgaaggagtacttcgcctgcgtgagcagcggcaacagcaacgccaacagccggggccccagcttctctagcggcctggtgccactgtccctgagagggagccacatgggccccatggagatctacaaaaccgtgagcgcctggaagcggcagcctgtgcgcgtgctgagcctgtttcggaatatcgataaagtcctgaaaagcctgggattcctggagagcggctctggctccggcggtggcaccctgaagtacgtggaggatgtgacaaacgtggtcagacgggatgtggagaagtggggccccttcgatctggtgtacggcagcacccaacccctgggcagctcttgtgaccggtgccctggctggtacatgtttcagttccaccggatcctgcagtacgccctgccgagacaggagtcccagcggccattcttttggattttcatggacaacttgctgctgaccgaggatgaccaggaaactaccactcggttcctgcagaccgaagccgtgaccctgcaggacgtgagaggccgggactaccagaacgccatgcgggtgtggtccaacatccctggactgaaaagcaagcacgcacctctgacccctaaagaagaggagtacctgcaggcccaggtgcggagcagaagcaagctggacgcccctaaggtggatctgctggtgaagaattgcctcctgcccctgagagagtacttcaagtatttcagccagaatagtctgcccctgggaggcagcggcggcggcgccctggtgacatttgaggacgtcgccgtgcggttcacccaggaggaatgggctctgctggatccttctcagaaaatcctgtaccgggacgtgatgagagagacataccggaatctgacctccgtgggcatcaactgggaatgttgggaccttgaagcctgcttcagaagcctgggaagaaacctgagagtgcaggtggtgaagagaaagtgcgagctgaccaacagcggcccctgcgccgagggcggcccaagcagcggcgcccctcctcccagcggcggcagcccagccggctccccaacctctaccgaggagggcacctctgagtccgccacccccgagagcggccctggcacctccaccgagcccagcgagggcagcgcacccggcagccctgccggcagccccacctccacagaggagggaaccagcaccgagcccagcgaaggcagcgccccaggcaccagcaccgagcctagtgagcaggagattaaacggatcaacaagatcagaagaagacttgtgaaagacagcaacaccaagaaggccggcaagacaggccccatgaaaaccctgctggttagagtgatgacacccgatctgagagagcggctggaaaacctgagaaagaagcctgaaaatatcccccagcccatcagcaatacatctagagccaacctgaataagctgctgaccgattacaccgaaatgaagaaggcgatcctgcatgtgtactgggaagagttccagaaggaccctgtgggcctgatgagccgggtggcccagcctgccagcaagaagatcgatcagaacaagctgaaacctgagatggacgagaagggcaacctgaccaccgccggctttgcctgctctcagtgtggccagcccctgttcgtgtacaagctggagcaggtgtctgagaagggcaaggcttacaccaactacttcggacggtgcaatgtggccgagcacgaaaagctgatcctgctggcccagctgaagcccgagaaggatagcgacgaagccgtgacatatagcctgggaaagtttgggcagagggccctggatttctacagcattcatgtgaccaaggagtccacccaccccgtgaagcccctggcccagatcgccggaaacagatacgcctccggacctgtgggaaaggccctgagcgacgcatgtatgggcacaatcgcctccttcctgtctaagtaccaggacatcatcatcgaacaccagaaggtggtgaagggcaaccagaagagactggagagcctgcgggagctggccggcaaggaaaacctggaataccctagcgtgaccctgccacctcagcctcacaccaaggagggcgttgatgcctacaacgaagtgatcgcccgggtgcgaatgtgggtgaacctgaacctgtggcagaagctgaagctaagcagagatgatgccaagcctctgctgagactgaagggattcccttcctttcctctggtcgagagacaggccaacgaagtggactggtgggacatggtgtgtaacgtgaagaagctgatcaacgagaaaaaggaggatggcaaggtgttttggcagaatctggctggctacaagagacaggaagccctgagaccatacctgagcagcgaggaagatcggaagaagggaaagaaattcgctcggtaccagctgggcgacctgctgctgcacctggaaaagaagcacggcgaggactggggaaaggtgtacgacgaggcctgggagcggattgacaagaaagtggaaggcctgagcaagcacatcaagctggaagaggaacggagaagcgaggacgcccagagcaaggccgccctgaccgactggctgcgggctaaggccagcttcgtgatcgagggcctgaaggaggccgacaaggacgagttctgcagatgcgagctgaagctgcagaagtggtacggggacctgcggggaaagcccttcgccatcgaagccgagaacagcatcctggacatcagcggcttcagcaagcagtacaactgtgccttcatctggcagaaggacggcgtgaagaagctgaacctgtacctgatcatcaactacttcaagggcggcaagctgcggttcaagaagatcaaacctgaagccttcgaagccaacagattctacaccgtgatcaacaaaaagagcggcgagatcgtgcccatggaggtgaacttcaacttcgacgaccccaacctgatcatcctgcctctggcctttggcaagagacagggcagagaattcatctggaacgacctgctgtccctggaaaccggcagcctgaagctggccaacggaagagtgatcgagaagacactgtacaacagaagaacccggcaggatgagcctgccctgttcgtggccctgaccttcgagcggcgggaggtcctggactcctccaatatcaaaccaatgaacctgatcggcgtggcaagaggcgaaaacatccccgccgtgatcgccctgaccgaccccgagggctgcccactgagccggtttaaggatagcctgggaaacccaacccacatcctgagaatcggcgagagctataaggagaagcagcggaccatccaggccaagaaggaggtggagcagcggagagccggcggctacagccggaagtacgccagcaaagccaagaatctggcagacgatatggtgagaaacaccgctagagatctgctgtactacgccgtgacccaggatgccatgctgatcttcgccaacctgagccggggcttcggccggcagggcaagcggaccttcatggccgagagacagtacacacggatggaggactggctgaccgccaagctggcctacgagggcctgagcaagacctacctgtccaagacactggcccagtacacctccaagacatgcagcaactgtgggtttaccatcaccagcgccgactacgacagggtgctggagaagctgaagaagacagcaacaggctggatgaccacaattaacggcaaggagctgaaggtggagggccagattacctactacaacagatacaagagacagaacgtagtcaaggacctgtccgtcgagctggatagactgagcgaagaatctgtgaacaacgacatctcctcctggacaaagggcagaagcggagaagctctgagcctcctgaagaaaagattctcccatagacccgtgcaggagaagttcgtgtgcctgaactgcggcttcgagacacacgcagccgagcaagccgccctgaacatcgccagatcctggctgttcctgcggagccaggagtacaagaaataccagacaaacaagacaaccggcaacaccgataagagagccttcgtcgagacctggcagtccttttaccggaagaagcttaaggaggtgtggaaacctgccgtgcggtctggcggatctggcggaggctccagccagggcctggtgaccttcggcgacgtggccatcgacttcagccaggaggagtgggagtggctgagccccatccagaggaacctgtacaggaaggtgatgctggagaactacaggaacctggccagcctgggcctgtgcgtgagcaagcccgacgtgatcagcctgctggagcagggcaaggagccctggaccgtgaagaggaggatgaccagggccggctgccccgacctgaaggccgtgggcggcccaagcagcggcgcccctcctcccagcggcggcagcccagccggctccccaacctctaccgaggagggcacctctgagtccgccacccccgagagcggccctggcacctccaccgagcccagcgagggcagcgcacccggcagccctgccggcagccccacctccacagaggagggaaccagcaccgagcccagcgaaggcagcgccccaggcaccagcaccgagcctagtgagcaggagattaaacggatcaacaagatcagaagaagacttgtgaaagacagcaacaccaagaaggccggcaagacaggccccatgaaaaccctgctggttagagtgatgacacccgatctgagagagcggctggaaaacctgagaaagaagcctgaaaatatcccccagcccatcagcaatacatctagagccaacctgaataagctgctgaccgattacaccgaaatgaagaaggcgatcctgcatgtgtactgggaagagttccagaaggaccctgtgggcctgatgagccgggtggcccagcctgccagcaagaagatcgatcagaacaagctgaaacctgagatggacgagaagggcaacctgaccaccgccggctttgcctgctctcagtgtggccagcccctgttcgtgtacaagctggagcaggtgtctgagaagggcaaggcttacaccaactacttcggacggtgcaatgtggccgagcacgaaaagctgatcctgctggcccagctgaagcccgagaaggatagcgacgaagccgtgacatatagcctgggaaagtttgggcagagggccctggatttctacagcattcatgtgaccaaggagtccacccaccccgtgaagcccctggcccagatcgccggaaacagatacgcctccggacctgtgggaaaggccctgagcgacgcatgtatgggcacaatcgcctccttcctgtctaagtaccaggacatcatcatcgaacaccagaaggtggtgaagggcaaccagaagagactggagagcctgcgggagctggccggcaaggaaaacctggaataccctagcgtgaccctgccacctcagcctcacaccaaggagggcgttgatgcctacaacgaagtgatcgcccgggtgcgaatgtgggtgaacctgaacctgtggcagaagctgaagctaagcagagatgatgccaagcctctgctgagactgaagggattcccttcctttcctctggtcgagagacaggccaacgaagtggactggtgggacatggtgtgtaacgtgaagaagctgatcaacgagaaaaaggaggatggcaaggtgttttggcagaatctggctggctacaagagacaggaagccctgagaccatacctgagcagcgaggaagatcggaagaagggaaagaaattcgctcggtaccagctgggcgacctgctgctgcacctggaaaagaagcacggcgaggactggggaaaggtgtacgacgaggcctgggagcggattgacaagaaagtggaaggcctgagcaagcacatcaagctggaagaggaacggagaagcgaggacgcccagagcaaggccgccctgaccgactggctgcgggctaaggccagcttcgtgatcgagggcctgaaggaggccgacaaggacgagttctgcagatgcgagctgaagctgcagaagtggtacggggacctgcggggaaagcccttcgccatcgaagccgagaacagcatcctggacatcagcggcttcagcaagcagtacaactgtgccttcatctggcagaaggacggcgtgaagaagctgaacctgtacctgatcatcaactacttcaagggcggcaagctgcggttcaagaagatcaaacctgaagccttcgaagccaacagattctacaccgtgatcaacaaaaagagcggcgagatcgtgcccatggaggtgaacttcaacttcgacgaccccaacctgatcatcctgcctctggcctttggcaagagacagggcagagaattcatctggaacgacctgctgtccctggaaaccggcagcctgaagctggccaacggaagagtgatcgagaagacactgtacaacagaagaacccggcaggatgagcctgccctgttcgtggccctgaccttcgagcggcgggaggtcctggactcctccaatatcaaaccaatgaacctgatcggcgtggcaagaggcgaaaacatccccgccgtgatcgccctgaccgaccccgagggctgcccactgagccggtttaaggatagcctgggaaacccaacccacatcctgagaatcggcgagagctataaggagaagcagcggaccatccaggccaagaaggaggtggagcagcggagagccggcggctacagccggaagtacgccagcaaagccaagaatctggcagacgatatggtgagaaacaccgctagagatctgctgtactacgccgtgacccaggatgccatgctgatcttcgccaacctgagccggggcttcggccggcagggcaagcggaccttcatggccgagagacagtacacacggatggaggactggctgaccgccaagctggcctacgagggcctgagcaagacctacctgtccaagacactggcccagtacacctccaagacatgcagcaactgtgggtttaccatcaccagcgccgactacgacagggtgctggagaagctgaagaagacagcaacaggctggatgaccacaattaacggcaaggagctgaaggtggagggccagattacctactacaacagatacaagagacagaacgtagtcaaggacctgtccgtcgagctggatagactgagcgaagaatctgtgaacaacgacatctcctcctggacaaagggcagaagcggagaagctctgagcctcctgaagaaaagattctcccatagacccgtgcaggagaagttcgtgtgcctgaactgcggcttcgagacacacgcagccgagcaagccgccctgaacatcgccagatcctggctgttcctgcggagccaggagtacaagaaataccagacaaacaagacaaccggcaacaccgataagagagccttcgtcgagacctggcagtccttttaccggaagaagcttaaggaggtgtggaaacctgccgtgcggtctggcggatctggcggaggctcctagccagggcctggtgaccttcggcgacgtggccatcgacttcagccaggaggagtgggagtggctgagccccatccagaggaacctgtacaggaaggtgatgctggagaactacaggaacctggccagcctgggcctgtgcgtgagcaagcccgacgtgatcagcctgctggagcagggcaaggagccctggaccgtgaagaggaggatgaccagggccggctgccccgacctgaaggccgtgggatctggctccggcagcggccccaagaaaaagagaaaagtctaagctgccttctgcggggcttgccttctggccatgcccttcttctctcccttgcacctgtacctcttggtctttgaataaagcctgagtaggaaggctagcaaaaaaaaaaaaaaaaaaaaaaaaaaaaaaaaaaaaaaaaaaaaaaaaaaaaaaaaaaaaaaaaaaaaaaaaaaaaaaaa

SEQ ID NO: 16127 - RNA, 9485 nt, synthetic construct
  source 1..9485: mol_type = other RNA
aggaaataagagagaaaagaagagtaagaagaaatataagagccaccatggcccctaagaagaagcgtaaagtgagccggatggaacgcctcgtctacgaggtgcggcagaagtgcagaaacatcgaggacatctgcatctcctgcggatctctgaacgtgaccctggagcacccactgttcatcggcggcatgtgccagaactgtaaaaactgttttctggagtgtgcctatcaatacgacgatgacggctaccagagctactgcaccatctgttgcggcggaagagaggtgctgatgtgtggaaataacaactgctgccggtgcttctgcgtggaatgcgtggacctgctggtgggccccggcgccgcccaggccgctattaaggaagatccttggaactgctacatgtgcggccacaagggcacatacggcctgctgagacggagagaggactggcctagcagactgcagatgttcttcgccaataaccacgaccaggagttcgacccccctaaggtgtaccctcccgtccccgccgagaagagaaagcccatccgggtcctgagcctgttcgatggcatcgccaccggtctgctggtgctgaaggacctgggcatccaggtggataggtacattgcctccgaggtgtgcgaggactccatcaccgtgggaatggtgcgtcatcagggcaagatcatgtacgtgggcgacgtgcggagcgtgacacagaagcatatccaggagtggggccctttcgacctggtgatcggcggcagcccttgcaatgacctgagcatcgtgaacccagcccggaagggcctgtacgagggaaccggcagactgttcttcgagttttacagactgctgcacgacgcccggcctaaggaaggcgacgaccggcccttcttttggctgttcgagaatgtggtggccatgggagtcagcgacaagcgggatattagccggttcctggagagcaaccccgtgatgatcgatgccaaggaagtgagcgccgcccaccgggccagatacttctggggcaatctgcctggcatgaacagacccctggccagcaccgtgaacgacaagctggagctgcaggagtgcctggagcacggccggatcgccaagttcagcaaggtgagaaccatcaccacccgaagcaacagcatcaaacaaggcaaggaccagcactttcctgtgttcatgaacgagaaggaggacatcctgtggtgtaccgagatggagagagtgttcgggttcccagtccactacacagatgtcagcaacatgtctagactggccagacagagactgctgggaagaagctggtccgtccctgtgatcagacacctgttcgcccctctgaaggagtacttcgcctgcgtgagcagcggcaacagcaacgccaacagccggggccccagcttctctagcggcctggtgccactgtccctgagagggagccacatgggccccatggagatctacaaaaccgtgagcgcctggaagcggcagcctgtgcgcgtgctgagcctgtttcggaatatcgataaagtcctgaaaagcctgggattcctggagagcggctctggctccggcggtggcaccctgaagtacgtggaggatgtgacaaacgtggtcagacgggatgtggagaagtggggccccttcgatctggtgtacggcagcacccaacccctgggcagctcttgtgaccggtgccctggctggtacatgtttcagttccaccggatcctgcagtacgccctgccgagacaggagtcccagcggccattcttttggattttcatggacaacttgctgctgaccgaggatgaccaggaaactaccactcggttcctgcagaccgaagccgtgaccctgcaggacgtgagaggccgggactaccagaacgccatgcgggtgtggtccaacatccctggactgaaaagcaagcacgcacctctgacccctaaagaagaggagtacctgcaggcccaggtgcggagcagaagcaagctggacgcccctaaggtggatctgctggtgaagaattgcctcctgcccctgagagagtacttcaagtatttcagccagaatagtctgcccctgggaggcagcggcggcggcgccctggtgacatttgaggacgtcgccgtgcggttcacccaggaggaatgggctctgctggatccttctcagaaaatcctgtaccgggacgtgatgagagagacataccggaatctgacctccgtgggcatcaactgggaatgttgggaccttgaagcctgcttcagaagcctgggaagaaacctgagagtgcaggtggtgaagagaaagtgcgagctgaccaacagcggcccctgcgccgagggcggcccaagcagcggcgcccctcctcccagcggcggcagcccagccggctccccaacctctaccgaggagggcacctctgagtccgccacccccgagagcggccctggcacctccaccgagcccagcgagggcagcgcacccggcagccctgccggcagccccacctccacagaggagggaaccagcaccgagcccagcgaaggcagcgccccaggcaccagcaccgagcctagtgagcaggagattaaacggatcaacaagatcagaagaagacttgtgaaagacagcaacaccaagaaggccggcaagacaggccccatgaaaaccctgctggttagagtgatgacacccgatctgagagagcggctggaaaacctgagaaagaagcctgaaaatatcccccagcccatcagcaatacatctagagccaacctgaataagctgctgaccgattacaccgaaatgaagaaggcgatcctgcatgtgtactgggaagagttccagaaggaccctgtgggcctgatgagccgggtggcccagcctgccagcaagaagatcgatcagaacaagctgaaacctgagatggacgagaagggcaacctgaccaccgccggctttgcctgctctcagtgtggccagcccctgttcgtgtacaagctggagcaggtgtctgagaagggcaaggcttacaccaactacttcggacggtgcaatgtggccgagcacgaaaagctgatcctgctggcccagctgaagcccgagaaggatagcgacgaagccgtgacatatagcctgggaaagtttgggcagagggccctggatttctacagcattcatgtgaccaaggagtccacccaccccgtgaagcccctggcccagatcgccggaaacagatacgcctccggacctgtgggaaaggccctgagcgacgcatgtatgggcacaatcgcctccttcctgtctaagtaccaggacatcatcatcgaacaccagaaggtggtgaagggcaaccagaagagactggagagcctgcgggagctggccggcaaggaaaacctggaataccctagcgtgaccctgccacctcagcctcacaccaaggagggcgttgatgcctacaacgaagtgatcgcccgggtgcgaatgtgggtgaacctgaacctgtggcagaagctgaagctaagcagagatgatgccaagcctctgctgagactgaagggattcccttcctttcctctggtcgagagacaggccaacgaagtggactggtgggacatggtgtgtaacgtgaagaagctgatcaacgagaaaaaggaggatggcaaggtgttttggcagaatctggctggctacaagagacaggaagccctgagaccatacctgagcagcgaggaagatcggaagaagggaaagaaattcgctcggtaccagctgggcgacctgctgctgcacctggaaaagaagcacggcgaggactggggaaaggtgtacgacgaggcctgggagcggattgacaagaaagtggaaggcctgagcaagcacatcaagctggaagaggaacggagaagcgaggacgcccagagcaaggccgccctgaccgactggctgcgggctaaggccagcttcgtgatcgagggcctgaaggaggccgacaaggacgagttctgcagatgcgagctgaagctgcagaagtggtacggggacctgcggggaaagcccttcgccatcgaagccgagaacagcatcctggacatcagcggcttcagcaagcagtacaactgtgccttcatctggcagaaggacggcgtgaagaagctgaacctgtacctgatcatcaactacttcaagggcggcaagctgcggttcaagaagatcaaacctgaagccttcgaagccaacagattctacaccgtgatcaacaaaaagagcggcgagatcgtgcccatggaggtgaacttcaacttcgacgaccccaacctgatcatcctgcctctggcctttggcaagagacagggcagagaattcatctggaacgacctgctgtccctggaaaccggcagcctgaagctggccaacggaagagtgatcgagaagacactgtacaacagaagaacccggcaggatgagcctgccctgttcgtggccctgaccttcgagcggcgggaggtcctggactcctccaatatcaaaccaatgaacctgatcggcgtggcaagaggcgaaaacatccccgccgtgatcgccctgaccgaccccgagggctgcccactgagccggtttaaggatagcctgggaaacccaacccacatcctgagaatcggcgagagctataaggagaagcagcggaccatccaggccaagaaggaggtggagcagcggagagccggcggctacagccggaagtacgccagcaaagccaagaatctggcagacgatatggtgagaaacaccgctagagatctgctgtactacgccgtgacccaggatgccatgctgatcttcgccaacctgagccggggcttcggccggcagggcaagcggaccttcatggccgagagacagtacacacggatggaggactggctgaccgccaagctggcctacgagggcctgagcaagacctacctgtccaagacactggcccagtacacctccaagacatgcagcaactgtgggtttaccatcaccagcgccgactacgacagggtgctggagaagctgaagaagacagcaacaggctggatgaccacaattaacggcaaggagctgaaggtggagggccagattacctactacaacagatacaagagacagaacgtagtcaaggacctgtccgtcgagctggatagactgagcgaagaatctgtgaacaacgacatctcctcctggacaaagggcagaagcggagaagctctgagcctcctgaagaaaagattctcccatagacccgtgcaggagaagttcgtgtgcctgaactgcggcttcgagacacacgcagccgagcaagccgccctgaacatcgccagatcctggctgttcctgcggagccaggagtacaagaaataccagacaaacaagacaaccggcaacaccgataagagagccttcgtcgagacctggcagtccttttaccggaagaagcttaaggaggtgtggaaacctgccgtgcggtctggcggatctggcggaggctccgcccaggaggtggtgagcttcaaggacgtggccgtggacttcaccagggaggagtggaggctgctgagccccccccagaaggagctgtacaaggaggtgatgctggagaacgccaggaacctgctgagcgtgggcctgagcgccccccccgaggacatgttcagcagcctggagcagagggaggccccctggatgctggagaaggacgacctgaggagctgctgccccgagggcaagatgaggggcggcccaagcagcggcgcccctcctcccagcggcggcagcccagccggctccccaacctctaccgaggagggcacctctgagtccgccacccccgagagcggccctggcacctccaccgagcccagcgagggcagcgcacccggcagccctgccggcagccccacctccacagaggagggaaccagcaccgagcccagcgaaggcagcgccccaggcaccagcaccgagcctagtgagcaggagattaaacggatcaacaagatcagaagaagacttgtgaaagacagcaacaccaagaaggccggcaagacaggccccatgaaaaccctgctggttagagtgatgacacccgatctgagagagcggctggaaaacctgagaaagaagcctgaaaatatcccccagcccatcagcaatacatctagagccaacctgaataagctgctgaccgattacaccgaaatgaagaaggcgatcctgcatgtgtactgggaagagttccagaaggaccctgtgggcctgatgagccgggtggcccagcctgccagcaagaagatcgatcagaacaagctgaaacctgagatggacgagaagggcaacctgaccaccgccggctttgcctgctctcagtgtggccagcccctgttcgtgtacaagctggagcaggtgtctgagaagggcaaggcttacaccaactacttcggacggtgcaatgtggccgagcacgaaaagctgatcctgctggcccagctgaagcccgagaaggatagcgacgaagccgtgacatatagcctgggaaagtttgggcagagggccctggatttctacagcattcatgtgaccaaggagtccacccaccccgtgaagcccctggcccagatcgccggaaacagatacgcctccggacctgtgggaaaggccctgagcgacgcatgtatgggcacaatcgcctccttcctgtctaagtaccaggacatcatcatcgaacaccagaaggtggtgaagggcaaccagaagagactggagagcctgcgggagctggccggcaaggaaaacctggaataccctagcgtgaccctgccacctcagcctcacaccaaggagggcgttgatgcctacaacgaagtgatcgcccgggtgcgaatgtgggtgaacctgaacctgtggcagaagctgaagctaagcagagatgatgccaagcctctgctgagactgaagggattcccttcctttcctctggtcgagagacaggccaacgaagtggactggtgggacatggtgtgtaacgtgaagaagctgatcaacgagaaaaaggaggatggcaaggtgttttggcagaatctggctggctacaagagacaggaagccctgagaccatacctgagcagcgaggaagatcggaagaagggaaagaaattcgctcggtaccagctgggcgacctgctgctgcacctggaaaagaagcacggcgaggactggggaaaggtgtacgacgaggcctgggagcggattgacaagaaagtggaaggcctgagcaagcacatcaagctggaagaggaacggagaagcgaggacgcccagagcaaggccgccctgaccgactggctgcgggctaaggccagcttcgtgatcgagggcctgaaggaggccgacaaggacgagttctgcagatgcgagctgaagctgcagaagtggtacggggacctgcggggaaagcccttcgccatcgaagccgagaacagcatcctggacatcagcggcttcagcaagcagtacaactgtgccttcatctggcagaaggacggcgtgaagaagctgaacctgtacctgatcatcaactacttcaagggcggcaagctgcggttcaagaagatcaaacctgaagccttcgaagccaacagattctacaccgtgatcaacaaaaagagcggcgagatcgtgcccatggaggtgaacttcaacttcgacgaccccaacctgatcatcctgcctctggcctttggcaagagacagggcagagaattcatctggaacgacctgctgtccctggaaaccggcagcctgaagctggccaacggaagagtgatcgagaagacactgtacaacagaagaacccggcaggatgagcctgccctgttcgtggccctgaccttcgagcggcgggaggtcctggactcctccaatatcaaaccaatgaacctgatcggcgtggcaagaggcgaaaacatccccgccgtgatcgccctgaccgaccccgagggctgcccactgagccggtttaaggatagcctgggaaacccaacccacatcctgagaatcggcgagagctataaggagaagcagcggaccatccaggccaagaaggaggtggagcagcggagagccggcggctacagccggaagtacgccagcaaagccaagaatctggcagacgatatggtgagaaacaccgctagagatctgctgtactacgccgtgacccaggatgccatgctgatcttcgccaacctgagccggggcttcggccggcagggcaagcggaccttcatggccgagagacagtacacacggatggaggactggctgaccgccaagctggcctacgagggcctgagcaagacctacctgtccaagacactggcccagtacacctccaagacatgcagcaactgtgggtttaccatcaccagcgccgactacgacagggtgctggagaagctgaagaagacagcaacaggctggatgaccacaattaacggcaaggagctgaaggtggagggccagattacctactacaacagatacaagagacagaacgtagtcaaggacctgtccgtcgagctggatagactgagcgaagaatctgtgaacaacgacatctcctcctggacaaagggcagaagcggagaagctctgagcctcctgaagaaaagattctcccatagacccgtgcaggagaagttcgtgtgcctgaactgcggcttcgagacacacgcagccgagcaagccgccctgaacatcgccagatcctggctgttcctgcggagccaggagtacaagaaataccagacaaacaagacaaccggcaacaccgataagagagccttcgtcgagacctggcagtccttttaccggaagaagcttaaggaggtgtggaaacctgccgtgcggtctggcggatctggcggaggctcctgcccaggaggtggtgagcttcaaggacgtggccgtggacttcaccagggaggagtggaggctgctgagccccccccagaaggagctgtacaaggaggtgatgctggagaacgccaggaacctgctgagcgtgggcctgagcgccccccccgaggacatgttcagcagcctggagcagagggaggccccctggatgctggagaaggacgacctgaggagctgctgccccgagggcaagatgaggggatctggctccggcagcggccccaagaaaaagagaaaagtctaagctgccttctgcggggcttgccttctggccatgcccttcttctctcccttgcacctgtacctcttggtctttgaataaagcctgagtaggaaggctagcaaaaaaaaaaaaaaaaaaaaaaaaaaaaaaaaaaaaaaaaaaaaaaaaaaaaaaaaaaaaaaaaaaaaaaaaaaaaaaaa

SEQ ID NO: 16128 - RNA, 9485 nt, synthetic construct
  source 1..9485: mol_type = other RNA
aggaaataagagagaaaagaagagtaagaagaaatataagagccaccatggcccctaagaagaagcgtaaagtgagccggatggaacgcctcgtctacgaggtgcggcagaagtgcagaaacatcgaggacatctgcatctcctgcggatctctgaacgtgaccctggagcacccactgttcatcggcggcatgtgccagaactgtaaaaactgttttctggagtgtgcctatcaatacgacgatgacggctaccagagctactgcaccatctgttgcggcggaagagaggtgctgatgtgtggaaataacaactgctgccggtgcttctgcgtggaatgcgtggacctgctggtgggccccggcgccgcccaggccgctattaaggaagatccttggaactgctacatgtgcggccacaagggcacatacggcctgctgagacggagagaggactggcctagcagactgcagatgttcttcgccaataaccacgaccaggagttcgacccccctaaggtgtaccctcccgtccccgccgagaagagaaagcccatccgggtcctgagcctgttcgatggcatcgccaccggtctgctggtgctgaaggacctgggcatccaggtggataggtacattgcctccgaggtgtgcgaggactccatcaccgtgggaatggtgcgtcatcagggcaagatcatgtacgtgggcgacgtgcggagcgtgacacagaagcatatccaggagtggggccctttcgacctggtgatcggcggcagcccttgcaatgacctgagcatcgtgaacccagcccggaagggcctgtacgagggaaccggcagactgttcttcgagttttacagactgctgcacgacgcccggcctaaggaaggcgacgaccggcccttcttttggctgttcgagaatgtggtggccatgggagtcagcgacaagcgggatattagccggttcctggagagcaaccccgtgatgatcgatgccaaggaagtgagcgccgcccaccgggccagatacttctggggcaatctgcctggcatgaacagacccctggccagcaccgtgaacgacaagctggagctgcaggagtgcctggagcacggccggatcgccaagttcagcaaggtgagaaccatcaccacccgaagcaacagcatcaaacaaggcaaggaccagcactttcctgtgttcatgaacgagaaggaggacatcctgtggtgtaccgagatggagagagtgttcgggttcccagtccactacacagatgtcagcaacatgtctagactggccagacagagactgctgggaagaagctggtccgtccctgtgatcagacacctgttcgcccctctgaaggagtacttcgcctgcgtgagcagcggcaacagcaacgccaacagccggggccccagcttctctagcggcctggtgccactgtccctgagagggagccacatgggccccatggagatctacaaaaccgtgagcgcctggaagcggcagcctgtgcgcgtgctgagcctgtttcggaatatcgataaagtcctgaaaagcctgggattcctggagagcggctctggctccggcggtggcaccctgaagtacgtggaggatgtgacaaacgtggtcagacgggatgtggagaagtggggccccttcgatctggtgtacggcagcacccaacccctgggcagctcttgtgaccggtgccctggctggtacatgtttcagttccaccggatcctgcagtacgccctgccgagacaggagtcccagcggccattcttttggattttcatggacaacttgctgctgaccgaggatgaccaggaaactaccactcggttcctgcagaccgaagccgtgaccctgcaggacgtgagaggccgggactaccagaacgccatgcgggtgtggtccaacatccctggactgaaaagcaagcacgcacctctgacccctaaagaagaggagtacctgcaggcccaggtgcggagcagaagcaagctggacgcccctaaggtggatctgctggtgaagaattgcctcctgcccctgagagagtacttcaagtatttcagccagaatagtctgcccctgggaggcagcggcggcggcgccctggtgacatttgaggacgtcgccgtgcggttcacccaggaggaatgggctctgctggatccttctcagaaaatcctgtaccgggacgtgatgagagagacataccggaatctgacctccgtgggcatcaactgggaatgttgggaccttgaagcctgcttcagaagcctgggaagaaacctgagagtgcaggtggtgaagagaaagtgcgagctgaccaacagcggcccctgcgccgagggcggcccaagcagcggcgcccctcctcccagcggcggcagcccagccggctccccaacctctaccgaggagggcacctctgagtccgccacccccgagagcggccctggcacctccaccgagcccagcgagggcagcgcacccggcagccctgccggcagccccacctccacagaggagggaaccagcaccgagcccagcgaaggcagcgccccaggcaccagcaccgagcctagtgagcaggagattaaacggatcaacaagatcagaagaagacttgtgaaagacagcaacaccaagaaggccggcaagacaggccccatgaaaaccctgctggttagagtgatgacacccgatctgagagagcggctggaaaacctgagaaagaagcctgaaaatatcccccagcccatcagcaatacatctagagccaacctgaataagctgctgaccgattacaccgaaatgaagaaggcgatcctgcatgtgtactgggaagagttccagaaggaccctgtgggcctgatgagccgggtggcccagcctgccagcaagaagatcgatcagaacaagctgaaacctgagatggacgagaagggcaacctgaccaccgccggctttgcctgctctcagtgtggccagcccctgttcgtgtacaagctggagcaggtgtctgagaagggcaaggcttacaccaactacttcggacggtgcaatgtggccgagcacgaaaagctgatcctgctggcccagctgaagcccgagaaggatagcgacgaagccgtgacatatagcctgggaaagtttgggcagagggccctggatttctacagcattcatgtgaccaaggagtccacccaccccgtgaagcccctggcccagatcgccggaaacagatacgcctccggacctgtgggaaaggccctgagcgacgcatgtatgggcacaatcgcctccttcctgtctaagtaccaggacatcatcatcgaacaccagaaggtggtgaagggcaaccagaagagactggagagcctgcgggagctggccggcaaggaaaacctggaataccctagcgtgaccctgccacctcagcctcacaccaaggagggcgttgatgcctacaacgaagtgatcgcccgggtgcgaatgtgggtgaacctgaacctgtggcagaagctgaagctaagcagagatgatgccaagcctctgctgagactgaagggattcccttcctttcctctggtcgagagacaggccaacgaagtggactggtgggacatggtgtgtaacgtgaagaagctgatcaacgagaaaaaggaggatggcaaggtgttttggcagaatctggctggctacaagagacaggaagccctgagaccatacctgagcagcgaggaagatcggaagaagggaaagaaattcgctcggtaccagctgggcgacctgctgctgcacctggaaaagaagcacggcgaggactggggaaaggtgtacgacgaggcctgggagcggattgacaagaaagtggaaggcctgagcaagcacatcaagctggaagaggaacggagaagcgaggacgcccagagcaaggccgccctgaccgactggctgcgggctaaggccagcttcgtgatcgagggcctgaaggaggccgacaaggacgagttctgcagatgcgagctgaagctgcagaagtggtacggggacctgcggggaaagcccttcgccatcgaagccgagaacagcatcctggacatcagcggcttcagcaagcagtacaactgtgccttcatctggcagaaggacggcgtgaagaagctgaacctgtacctgatcatcaactacttcaagggcggcaagctgcggttcaagaagatcaaacctgaagccttcgaagccaacagattctacaccgtgatcaacaaaaagagcggcgagatcgtgcccatggaggtgaacttcaacttcgacgaccccaacctgatcatcctgcctctggcctttggcaagagacagggcagagaattcatctggaacgacctgctgtccctggaaaccggcagcctgaagctggccaacggaagagtgatcgagaagacactgtacaacagaagaacccggcaggatgagcctgccctgttcgtggccctgaccttcgagcggcgggaggtcctggactcctccaatatcaaaccaatgaacctgatcggcgtggcaagaggcgaaaacatccccgccgtgatcgccctgaccgaccccgagggctgcccactgagccggtttaaggatagcctgggaaacccaacccacatcctgagaatcggcgagagctataaggagaagcagcggaccatccaggccaagaaggaggtggagcagcggagagccggcggctacagccggaagtacgccagcaaagccaagaatctggcagacgatatggtgagaaacaccgctagagatctgctgtactacgccgtgacccaggatgccatgctgatcttcgccaacctgagccggggcttcggccggcagggcaagcggaccttcatggccgagagacagtacacacggatggaggactggctgaccgccaagctggcctacgagggcctgagcaagacctacctgtccaagacactggcccagtacacctccaagacatgcagcaactgtgggtttaccatcaccagcgccgactacgacagggtgctggagaagctgaagaagacagcaacaggctggatgaccacaattaacggcaaggagctgaaggtggagggccagattacctactacaacagatacaagagacagaacgtagtcaaggacctgtccgtcgagctggatagactgagcgaagaatctgtgaacaacgacatctcctcctggacaaagggcagaagcggagaagctctgagcctcctgaagaaaagattctcccatagacccgtgcaggagaagttcgtgtgcctgaactgcggcttcgagacacacgcagccgagcaagccgccctgaacatcgccagatcctggctgttcctgcggagccaggagtacaagaaataccagacaaacaagacaaccggcaacaccgataagagagccttcgtcgagacctggcagtccttttaccggaagaagcttaaggaggtgtggaaacctgccgtgcggtctggcggatctggcggaggctccagccagagcctggtgaccttcggcgacgtggccgtggacttcagccaggaggagtgggagaggctgagcagcgaccagagggacctgtacaggagggtgatgctggagaactacaggaacctggtgagcctgggcctgtgcttcagcaagcccgacatcatcagcagcctggagcagaggaaggagctgtggatggccaagagggaggtgaccaggggccagtgccccgactggaaggccgtgggcggcccaagcagcggcgcccctcctcccagcggcggcagcccagccggctccccaacctctaccgaggagggcacctctgagtccgccacccccgagagcggccctggcacctccaccgagcccagcgagggcagcgcacccggcagccctgccggcagccccacctccacagaggagggaaccagcaccgagcccagcgaaggcagcgccccaggcaccagcaccgagcctagtgagcaggagattaaacggatcaacaagatcagaagaagacttgtgaaagacagcaacaccaagaaggccggcaagacaggccccatgaaaaccctgctggttagagtgatgacacccgatctgagagagcggctggaaaacctgagaaagaagcctgaaaatatcccccagcccatcagcaatacatctagagccaacctgaataagctgctgaccgattacaccgaaatgaagaaggcgatcctgcatgtgtactgggaagagttccagaaggaccctgtgggcctgatgagccgggtggcccagcctgccagcaagaagatcgatcagaacaagctgaaacctgagatggacgagaagggcaacctgaccaccgccggctttgcctgctctcagtgtggccagcccctgttcgtgtacaagctggagcaggtgtctgagaagggcaaggcttacaccaactacttcggacggtgcaatgtggccgagcacgaaaagctgatcctgctggcccagctgaagcccgagaaggatagcgacgaagccgtgacatatagcctgggaaagtttgggcagagggccctggatttctacagcattcatgtgaccaaggagtccacccaccccgtgaagcccctggcccagatcgccggaaacagatacgcctccggacctgtgggaaaggccctgagcgacgcatgtatgggcacaatcgcctccttcctgtctaagtaccaggacatcatcatcgaacaccagaaggtggtgaagggcaaccagaagagactggagagcctgcgggagctggccggcaaggaaaacctggaataccctagcgtgaccctgccacctcagcctcacaccaaggagggcgttgatgcctacaacgaagtgatcgcccgggtgcgaatgtgggtgaacctgaacctgtggcagaagctgaagctaagcagagatgatgccaagcctctgctgagactgaagggattcccttcctttcctctggtcgagagacaggccaacgaagtggactggtgggacatggtgtgtaacgtgaagaagctgatcaacgagaaaaaggaggatggcaaggtgttttggcagaatctggctggctacaagagacaggaagccctgagaccatacctgagcagcgaggaagatcggaagaagggaaagaaattcgctcggtaccagctgggcgacctgctgctgcacctggaaaagaagcacggcgaggactggggaaaggtgtacgacgaggcctgggagcggattgacaagaaagtggaaggcctgagcaagcacatcaagctggaagaggaacggagaagcgaggacgcccagagcaaggccgccctgaccgactggctgcgggctaaggccagcttcgtgatcgagggcctgaaggaggccgacaaggacgagttctgcagatgcgagctgaagctgcagaagtggtacggggacctgcggggaaagcccttcgccatcgaagccgagaacagcatcctggacatcagcggcttcagcaagcagtacaactgtgccttcatctggcagaaggacggcgtgaagaagctgaacctgtacctgatcatcaactacttcaagggcggcaagctgcggttcaagaagatcaaacctgaagccttcgaagccaacagattctacaccgtgatcaacaaaaagagcggcgagatcgtgcccatggaggtgaacttcaacttcgacgaccccaacctgatcatcctgcctctggcctttggcaagagacagggcagagaattcatctggaacgacctgctgtccctggaaaccggcagcctgaagctggccaacggaagagtgatcgagaagacactgtacaacagaagaacccggcaggatgagcctgccctgttcgtggccctgaccttcgagcggcgggaggtcctggactcctccaatatcaaaccaatgaacctgatcggcgtggcaagaggcgaaaacatccccgccgtgatcgccctgaccgaccccgagggctgcccactgagccggtttaaggatagcctgggaaacccaacccacatcctgagaatcggcgagagctataaggagaagcagcggaccatccaggccaagaaggaggtggagcagcggagagccggcggctacagccggaagtacgccagcaaagccaagaatctggcagacgatatggtgagaaacaccgctagagatctgctgtactacgccgtgacccaggatgccatgctgatcttcgccaacctgagccggggcttcggccggcagggcaagcggaccttcatggccgagagacagtacacacggatggaggactggctgaccgccaagctggcctacgagggcctgagcaagacctacctgtccaagacactggcccagtacacctccaagacatgcagcaactgtgggtttaccatcaccagcgccgactacgacagggtgctggagaagctgaagaagacagcaacaggctggatgaccacaattaacggcaaggagctgaaggtggagggccagattacctactacaacagatacaagagacagaacgtagtcaaggacctgtccgtcgagctggatagactgagcgaagaatctgtgaacaacgacatctcctcctggacaaagggcagaagcggagaagctctgagcctcctgaagaaaagattctcccatagacccgtgcaggagaagttcgtgtgcctgaactgcggcttcgagacacacgcagccgagcaagccgccctgaacatcgccagatcctggctgttcctgcggagccaggagtacaagaaataccagacaaacaagacaaccggcaacaccgataagagagccttcgtcgagacctggcagtccttttaccggaagaagcttaaggaggtgtggaaacctgccgtgcggtctggcggatctggcggaggctcctagccagagcctggtgaccttcggcgacgtggccgtggacttcagccaggaggagtgggagaggctgagcagcgaccagagggacctgtacaggagggtgatgctggagaactacaggaacctggtgagcctgggcctgtgcttcagcaagcccgacatcatcagcagcctggagcagaggaaggagctgtggatggccaagagggaggtgaccaggggccagtgccccgactggaaggccgtgggatctggctccggcagcggccccaagaaaaagagaaaagtctaagctgccttctgcggggcttgccttctggccatgcccttcttctctcccttgcacctgtacctcttggtctttgaataaagcctgagtaggaaggctagcaaaaaaaaaaaaaaaaaaaaaaaaaaaaaaaaaaaaaaaaaaaaaaaaaaaaaaaaaaaaaaaaaaaaaaaaaaaaaaaa

SEQ ID NO: 16129 - RNA, 9485 nt, synthetic construct
  source 1..9485: mol_type = other RNA
aggaaataagagagaaaagaagagtaagaagaaatataagagccaccatggcccctaagaagaagcgtaaagtgagccggatggaacgcctcgtctacgaggtgcggcagaagtgcagaaacatcgaggacatctgcatctcctgcggatctctgaacgtgaccctggagcacccactgttcatcggcggcatgtgccagaactgtaaaaactgttttctggagtgtgcctatcaatacgacgatgacggctaccagagctactgcaccatctgttgcggcggaagagaggtgctgatgtgtggaaataacaactgctgccggtgcttctgcgtggaatgcgtggacctgctggtgggccccggcgccgcccaggccgctattaaggaagatccttggaactgctacatgtgcggccacaagggcacatacggcctgctgagacggagagaggactggcctagcagactgcagatgttcttcgccaataaccacgaccaggagttcgacccccctaaggtgtaccctcccgtccccgccgagaagagaaagcccatccgggtcctgagcctgttcgatggcatcgccaccggtctgctggtgctgaaggacctgggcatccaggtggataggtacattgcctccgaggtgtgcgaggactccatcaccgtgggaatggtgcgtcatcagggcaagatcatgtacgtgggcgacgtgcggagcgtgacacagaagcatatccaggagtggggccctttcgacctggtgatcggcggcagcccttgcaatgacctgagcatcgtgaacccagcccggaagggcctgtacgagggaaccggcagactgttcttcgagttttacagactgctgcacgacgcccggcctaaggaaggcgacgaccggcccttcttttggctgttcgagaatgtggtggccatgggagtcagcgacaagcgggatattagccggttcctggagagcaaccccgtgatgatcgatgccaaggaagtgagcgccgcccaccgggccagatacttctggggcaatctgcctggcatgaacagacccctggccagcaccgtgaacgacaagctggagctgcaggagtgcctggagcacggccggatcgccaagttcagcaaggtgagaaccatcaccacccgaagcaacagcatcaaacaaggcaaggaccagcactttcctgtgttcatgaacgagaaggaggacatcctgtggtgtaccgagatggagagagtgttcgggttcccagtccactacacagatgtcagcaacatgtctagactggccagacagagactgctgggaagaagctggtccgtccctgtgatcagacacctgttcgcccctctgaaggagtacttcgcctgcgtgagcagcggcaacagcaacgccaacagccggggccccagcttctctagcggcctggtgccactgtccctgagagggagccacatgggccccatggagatctacaaaaccgtgagcgcctggaagcggcagcctgtgcgcgtgctgagcctgtttcggaatatcgataaagtcctgaaaagcctgggattcctggagagcggctctggctccggcggtggcaccctgaagtacgtggaggatgtgacaaacgtggtcagacgggatgtggagaagtggggccccttcgatctggtgtacggcagcacccaacccctgggcagctcttgtgaccggtgccctggctggtacatgtttcagttccaccggatcctgcagtacgccctgccgagacaggagtcccagcggccattcttttggattttcatggacaacttgctgctgaccgaggatgaccaggaaactaccactcggttcctgcagaccgaagccgtgaccctgcaggacgtgagaggccgggactaccagaacgccatgcgggtgtggtccaacatccctggactgaaaagcaagcacgcacctctgacccctaaagaagaggagtacctgcaggcccaggtgcggagcagaagcaagctggacgcccctaaggtggatctgctggtgaagaattgcctcctgcccctgagagagtacttcaagtatttcagccagaatagtctgcccctgggaggcagcggcggcggcgccctggtgacatttgaggacgtcgccgtgcggttcacccaggaggaatgggctctgctggatccttctcagaaaatcctgtaccgggacgtgatgagagagacataccggaatctgacctccgtgggcatcaactgggaatgttgggaccttgaagcctgcttcagaagcctgggaagaaacctgagagtgcaggtggtgaagagaaagtgcgagctgaccaacagcggcccctgcgccgagggcggcccaagcagcggcgcccctcctcccagcggcggcagcccagccggctccccaacctctaccgaggagggcacctctgagtccgccacccccgagagcggccctggcacctccaccgagcccagcgagggcagcgcacccggcagccctgccggcagccccacctccacagaggagggaaccagcaccgagcccagcgaaggcagcgccccaggcaccagcaccgagcctagtgagcaggagattaaacggatcaacaagatcagaagaagacttgtgaaagacagcaacaccaagaaggccggcaagacaggccccatgaaaaccctgctggttagagtgatgacacccgatctgagagagcggctggaaaacctgagaaagaagcctgaaaatatcccccagcccatcagcaatacatctagagccaacctgaataagctgctgaccgattacaccgaaatgaagaaggcgatcctgcatgtgtactgggaagagttccagaaggaccctgtgggcctgatgagccgggtggcccagcctgccagcaagaagatcgatcagaacaagctgaaacctgagatggacgagaagggcaacctgaccaccgccggctttgcctgctctcagtgtggccagcccctgttcgtgtacaagctggagcaggtgtctgagaagggcaaggcttacaccaactacttcggacggtgcaatgtggccgagcacgaaaagctgatcctgctggcccagctgaagcccgagaaggatagcgacgaagccgtgacatatagcctgggaaagtttgggcagagggccctggatttctacagcattcatgtgaccaaggagtccacccaccccgtgaagcccctggcccagatcgccggaaacagatacgcctccggacctgtgggaaaggccctgagcgacgcatgtatgggcacaatcgcctccttcctgtctaagtaccaggacatcatcatcgaacaccagaaggtggtgaagggcaaccagaagagactggagagcctgcgggagctggccggcaaggaaaacctggaataccctagcgtgaccctgccacctcagcctcacaccaaggagggcgttgatgcctacaacgaagtgatcgcccgggtgcgaatgtgggtgaacctgaacctgtggcagaagctgaagctaagcagagatgatgccaagcctctgctgagactgaagggattcccttcctttcctctggtcgagagacaggccaacgaagtggactggtgggacatggtgtgtaacgtgaagaagctgatcaacgagaaaaaggaggatggcaaggtgttttggcagaatctggctggctacaagagacaggaagccctgagaccatacctgagcagcgaggaagatcggaagaagggaaagaaattcgctcggtaccagctgggcgacctgctgctgcacctggaaaagaagcacggcgaggactggggaaaggtgtacgacgaggcctgggagcggattgacaagaaagtggaaggcctgagcaagcacatcaagctggaagaggaacggagaagcgaggacgcccagagcaaggccgccctgaccgactggctgcgggctaaggccagcttcgtgatcgagggcctgaaggaggccgacaaggacgagttctgcagatgcgagctgaagctgcagaagtggtacggggacctgcggggaaagcccttcgccatcgaagccgagaacagcatcctggacatcagcggcttcagcaagcagtacaactgtgccttcatctggcagaaggacggcgtgaagaagctgaacctgtacctgatcatcaactacttcaagggcggcaagctgcggttcaagaagatcaaacctgaagccttcgaagccaacagattctacaccgtgatcaacaaaaagagcggcgagatcgtgcccatggaggtgaacttcaacttcgacgaccccaacctgatcatcctgcctctggcctttggcaagagacagggcagagaattcatctggaacgacctgctgtccctggaaaccggcagcctgaagctggccaacggaagagtgatcgagaagacactgtacaacagaagaacccggcaggatgagcctgccctgttcgtggccctgaccttcgagcggcgggaggtcctggactcctccaatatcaaaccaatgaacctgatcggcgtggcaagaggcgaaaacatccccgccgtgatcgccctgaccgaccccgagggctgcccactgagccggtttaaggatagcctgggaaacccaacccacatcctgagaatcggcgagagctataaggagaagcagcggaccatccaggccaagaaggaggtggagcagcggagagccggcggctacagccggaagtacgccagcaaagccaagaatctggcagacgatatggtgagaaacaccgctagagatctgctgtactacgccgtgacccaggatgccatgctgatcttcgccaacctgagccggggcttcggccggcagggcaagcggaccttcatggccgagagacagtacacacggatggaggactggctgaccgccaagctggcctacgagggcctgagcaagacctacctgtccaagacactggcccagtacacctccaagacatgcagcaactgtgggtttaccatcaccagcgccgactacgacagggtgctggagaagctgaagaagacagcaacaggctggatgaccacaattaacggcaaggagctgaaggtggagggccagattacctactacaacagatacaagagacagaacgtagtcaaggacctgtccgtcgagctggatagactgagcgaagaatctgtgaacaacgacatctcctcctggacaaagggcagaagcggagaagctctgagcctcctgaagaaaagattctcccatagacccgtgcaggagaagttcgtgtgcctgaactgcggcttcgagacacacgcagccgagcaagccgccctgaacatcgccagatcctggctgttcctgcggagccaggagtacaagaaataccagacaaacaagacaaccggcaacaccgataagagagccttcgtcgagacctggcagtccttttaccggaagaagcttaaggaggtgtggaaacctgccgtgcggtctggcggatctggcggaggctccaagcccggcgccctgagcttcgccgacgtggccgtgtacttcagcagcgaggagtggggctgcctgaggcccgcccagagggccctgtacagggacgtgatgagggagacctacggccacctgggcgccctgggcttcgccggccccaagcccgccctgatcagctggatggagaggaagaaggaggcctggagccccgaggccgaggaccccgaggacagggccaggcaccccggctacggcggcggcccaagcagcggcgcccctcctcccagcggcggcagcccagccggctccccaacctctaccgaggagggcacctctgagtccgccacccccgagagcggccctggcacctccaccgagcccagcgagggcagcgcacccggcagccctgccggcagccccacctccacagaggagggaaccagcaccgagcccagcgaaggcagcgccccaggcaccagcaccgagcctagtgagcaggagattaaacggatcaacaagatcagaagaagacttgtgaaagacagcaacaccaagaaggccggcaagacaggccccatgaaaaccctgctggttagagtgatgacacccgatctgagagagcggctggaaaacctgagaaagaagcctgaaaatatcccccagcccatcagcaatacatctagagccaacctgaataagctgctgaccgattacaccgaaatgaagaaggcgatcctgcatgtgtactgggaagagttccagaaggaccctgtgggcctgatgagccgggtggcccagcctgccagcaagaagatcgatcagaacaagctgaaacctgagatggacgagaagggcaacctgaccaccgccggctttgcctgctctcagtgtggccagcccctgttcgtgtacaagctggagcaggtgtctgagaagggcaaggcttacaccaactacttcggacggtgcaatgtggccgagcacgaaaagctgatcctgctggcccagctgaagcccgagaaggatagcgacgaagccgtgacatatagcctgggaaagtttgggcagagggccctggatttctacagcattcatgtgaccaaggagtccacccaccccgtgaagcccctggcccagatcgccggaaacagatacgcctccggacctgtgggaaaggccctgagcgacgcatgtatgggcacaatcgcctccttcctgtctaagtaccaggacatcatcatcgaacaccagaaggtggtgaagggcaaccagaagagactggagagcctgcgggagctggccggcaaggaaaacctggaataccctagcgtgaccctgccacctcagcctcacaccaaggagggcgttgatgcctacaacgaagtgatcgcccgggtgcgaatgtgggtgaacctgaacctgtggcagaagctgaagctaagcagagatgatgccaagcctctgctgagactgaagggattcccttcctttcctctggtcgagagacaggccaacgaagtggactggtgggacatggtgtgtaacgtgaagaagctgatcaacgagaaaaaggaggatggcaaggtgttttggcagaatctggctggctacaagagacaggaagccctgagaccatacctgagcagcgaggaagatcggaagaagggaaagaaattcgctcggtaccagctgggcgacctgctgctgcacctggaaaagaagcacggcgaggactggggaaaggtgtacgacgaggcctgggagcggattgacaagaaagtggaaggcctgagcaagcacatcaagctggaagaggaacggagaagcgaggacgcccagagcaaggccgccctgaccgactggctgcgggctaaggccagcttcgtgatcgagggcctgaaggaggccgacaaggacgagttctgcagatgcgagctgaagctgcagaagtggtacggggacctgcggggaaagcccttcgccatcgaagccgagaacagcatcctggacatcagcggcttcagcaagcagtacaactgtgccttcatctggcagaaggacggcgtgaagaagctgaacctgtacctgatcatcaactacttcaagggcggcaagctgcggttcaagaagatcaaacctgaagccttcgaagccaacagattctacaccgtgatcaacaaaaagagcggcgagatcgtgcccatggaggtgaacttcaacttcgacgaccccaacctgatcatcctgcctctggcctttggcaagagacagggcagagaattcatctggaacgacctgctgtccctggaaaccggcagcctgaagctggccaacggaagagtgatcgagaagacactgtacaacagaagaacccggcaggatgagcctgccctgttcgtggccctgaccttcgagcggcgggaggtcctggactcctccaatatcaaaccaatgaacctgatcggcgtggcaagaggcgaaaacatccccgccgtgatcgccctgaccgaccccgagggctgcccactgagccggtttaaggatagcctgggaaacccaacccacatcctgagaatcggcgagagctataaggagaagcagcggaccatccaggccaagaaggaggtggagcagcggagagccggcggctacagccggaagtacgccagcaaagccaagaatctggcagacgatatggtgagaaacaccgctagagatctgctgtactacgccgtgacccaggatgccatgctgatcttcgccaacctgagccggggcttcggccggcagggcaagcggaccttcatggccgagagacagtacacacggatggaggactggctgaccgccaagctggcctacgagggcctgagcaagacctacctgtccaagacactggcccagtacacctccaagacatgcagcaactgtgggtttaccatcaccagcgccgactacgacagggtgctggagaagctgaagaagacagcaacaggctggatgaccacaattaacggcaaggagctgaaggtggagggccagattacctactacaacagatacaagagacagaacgtagtcaaggacctgtccgtcgagctggatagactgagcgaagaatctgtgaacaacgacatctcctcctggacaaagggcagaagcggagaagctctgagcctcctgaagaaaagattctcccatagacccgtgcaggagaagttcgtgtgcctgaactgcggcttcgagacacacgcagccgagcaagccgccctgaacatcgccagatcctggctgttcctgcggagccaggagtacaagaaataccagacaaacaagacaaccggcaacaccgataagagagccttcgtcgagacctggcagtccttttaccggaagaagcttaaggaggtgtggaaacctgccgtgcggtctggcggatctggcggaggctcctaagcccggcgccctgagcttcgccgacgtggccgtgtacttcagcagcgaggagtggggctgcctgaggcccgcccagagggccctgtacagggacgtgatgagggagacctacggccacctgggcgccctgggcttcgccggccccaagcccgccctgatcagctggatggagaggaagaaggaggcctggagccccgaggccgaggaccccgaggacagggccaggcaccccggctacggcggatctggctccggcagcggccccaagaaaaagagaaaagtctaagctgccttctgcggggcttgccttctggccatgcccttcttctctcccttgcacctgtacctcttggtctttgaataaagcctgagtaggaaggctagcaaaaaaaaaaaaaaaaaaaaaaaaaaaaaaaaaaaaaaaaaaaaaaaaaaaaaaaaaaaaaaaaaaaaaaaaaaaaaaaa

SEQ ID NO: 16130 - RNA, 9485 nt, synthetic construct
  source 1..9485: mol_type = other RNA
aggaaataagagagaaaagaagagtaagaagaaatataagagccaccatggcccctaagaagaagcgtaaagtgagccggatggaacgcctcgtctacgaggtgcggcagaagtgcagaaacatcgaggacatctgcatctcctgcggatctctgaacgtgaccctggagcacccactgttcatcggcggcatgtgccagaactgtaaaaactgttttctggagtgtgcctatcaatacgacgatgacggctaccagagctactgcaccatctgttgcggcggaagagaggtgctgatgtgtggaaataacaactgctgccggtgcttctgcgtggaatgcgtggacctgctggtgggccccggcgccgcccaggccgctattaaggaagatccttggaactgctacatgtgcggccacaagggcacatacggcctgctgagacggagagaggactggcctagcagactgcagatgttcttcgccaataaccacgaccaggagttcgacccccctaaggtgtaccctcccgtccccgccgagaagagaaagcccatccgggtcctgagcctgttcgatggcatcgccaccggtctgctggtgctgaaggacctgggcatccaggtggataggtacattgcctccgaggtgtgcgaggactccatcaccgtgggaatggtgcgtcatcagggcaagatcatgtacgtgggcgacgtgcggagcgtgacacagaagcatatccaggagtggggccctttcgacctggtgatcggcggcagcccttgcaatgacctgagcatcgtgaacccagcccggaagggcctgtacgagggaaccggcagactgttcttcgagttttacagactgctgcacgacgcccggcctaaggaaggcgacgaccggcccttcttttggctgttcgagaatgtggtggccatgggagtcagcgacaagcgggatattagccggttcctggagagcaaccccgtgatgatcgatgccaaggaagtgagcgccgcccaccgggccagatacttctggggcaatctgcctggcatgaacagacccctggccagcaccgtgaacgacaagctggagctgcaggagtgcctggagcacggccggatcgccaagttcagcaaggtgagaaccatcaccacccgaagcaacagcatcaaacaaggcaaggaccagcactttcctgtgttcatgaacgagaaggaggacatcctgtggtgtaccgagatggagagagtgttcgggttcccagtccactacacagatgtcagcaacatgtctagactggccagacagagactgctgggaagaagctggtccgtccctgtgatcagacacctgttcgcccctctgaaggagtacttcgcctgcgtgagcagcggcaacagcaacgccaacagccggggccccagcttctctagcggcctggtgccactgtccctgagagggagccacatgggccccatggagatctacaaaaccgtgagcgcctggaagcggcagcctgtgcgcgtgctgagcctgtttcggaatatcgataaagtcctgaaaagcctgggattcctggagagcggctctggctccggcggtggcaccctgaagtacgtggaggatgtgacaaacgtggtcagacgggatgtggagaagtggggccccttcgatctggtgtacggcagcacccaacccctgggcagctcttgtgaccggtgccctggctggtacatgtttcagttccaccggatcctgcagtacgccctgccgagacaggagtcccagcggccattcttttggattttcatggacaacttgctgctgaccgaggatgaccaggaaactaccactcggttcctgcagaccgaagccgtgaccctgcaggacgtgagaggccgggactaccagaacgccatgcgggtgtggtccaacatccctggactgaaaagcaagcacgcacctctgacccctaaagaagaggagtacctgcaggcccaggtgcggagcagaagcaagctggacgcccctaaggtggatctgctggtgaagaattgcctcctgcccctgagagagtacttcaagtatttcagccagaatagtctgcccctgggaggcagcggcggcggcgccctggtgacatttgaggacgtcgccgtgcggttcacccaggaggaatgggctctgctggatccttctcagaaaatcctgtaccgggacgtgatgagagagacataccggaatctgacctccgtgggcatcaactgggaatgttgggaccttgaagcctgcttcagaagcctgggaagaaacctgagagtgcaggtggtgaagagaaagtgcgagctgaccaacagcggcccctgcgccgagggcggcccaagcagcggcgcccctcctcccagcggcggcagcccagccggctccccaacctctaccgaggagggcacctctgagtccgccacccccgagagcggccctggcacctccaccgagcccagcgagggcagcgcacccggcagccctgccggcagccccacctccacagaggagggaaccagcaccgagcccagcgaaggcagcgccccaggcaccagcaccgagcctagtgagcaggagattaaacggatcaacaagatcagaagaagacttgtgaaagacagcaacaccaagaaggccggcaagacaggccccatgaaaaccctgctggttagagtgatgacacccgatctgagagagcggctggaaaacctgagaaagaagcctgaaaatatcccccagcccatcagcaatacatctagagccaacctgaataagctgctgaccgattacaccgaaatgaagaaggcgatcctgcatgtgtactgggaagagttccagaaggaccctgtgggcctgatgagccgggtggcccagcctgccagcaagaagatcgatcagaacaagctgaaacctgagatggacgagaagggcaacctgaccaccgccggctttgcctgctctcagtgtggccagcccctgttcgtgtacaagctggagcaggtgtctgagaagggcaaggcttacaccaactacttcggacggtgcaatgtggccgagcacgaaaagctgatcctgctggcccagctgaagcccgagaaggatagcgacgaagccgtgacatatagcctgggaaagtttgggcagagggccctggatttctacagcattcatgtgaccaaggagtccacccaccccgtgaagcccctggcccagatcgccggaaacagatacgcctccggacctgtgggaaaggccctgagcgacgcatgtatgggcacaatcgcctccttcctgtctaagtaccaggacatcatcatcgaacaccagaaggtggtgaagggcaaccagaagagactggagagcctgcgggagctggccggcaaggaaaacctggaataccctagcgtgaccctgccacctcagcctcacaccaaggagggcgttgatgcctacaacgaagtgatcgcccgggtgcgaatgtgggtgaacctgaacctgtggcagaagctgaagctaagcagagatgatgccaagcctctgctgagactgaagggattcccttcctttcctctggtcgagagacaggccaacgaagtggactggtgggacatggtgtgtaacgtgaagaagctgatcaacgagaaaaaggaggatggcaaggtgttttggcagaatctggctggctacaagagacaggaagccctgagaccatacctgagcagcgaggaagatcggaagaagggaaagaaattcgctcggtaccagctgggcgacctgctgctgcacctggaaaagaagcacggcgaggactggggaaaggtgtacgacgaggcctgggagcggattgacaagaaagtggaaggcctgagcaagcacatcaagctggaagaggaacggagaagcgaggacgcccagagcaaggccgccctgaccgactggctgcgggctaaggccagcttcgtgatcgagggcctgaaggaggccgacaaggacgagttctgcagatgcgagctgaagctgcagaagtggtacggggacctgcggggaaagcccttcgccatcgaagccgagaacagcatcctggacatcagcggcttcagcaagcagtacaactgtgccttcatctggcagaaggacggcgtgaagaagctgaacctgtacctgatcatcaactacttcaagggcggcaagctgcggttcaagaagatcaaacctgaagccttcgaagccaacagattctacaccgtgatcaacaaaaagagcggcgagatcgtgcccatggaggtgaacttcaacttcgacgaccccaacctgatcatcctgcctctggcctttggcaagagacagggcagagaattcatctggaacgacctgctgtccctggaaaccggcagcctgaagctggccaacggaagagtgatcgagaagacactgtacaacagaagaacccggcaggatgagcctgccctgttcgtggccctgaccttcgagcggcgggaggtcctggactcctccaatatcaaaccaatgaacctgatcggcgtggcaagaggcgaaaacatccccgccgtgatcgccctgaccgaccccgagggctgcccactgagccggtttaaggatagcctgggaaacccaacccacatcctgagaatcggcgagagctataaggagaagcagcggaccatccaggccaagaaggaggtggagcagcggagagccggcggctacagccggaagtacgccagcaaagccaagaatctggcagacgatatggtgagaaacaccgctagagatctgctgtactacgccgtgacccaggatgccatgctgatcttcgccaacctgagccggggcttcggccggcagggcaagcggaccttcatggccgagagacagtacacacggatggaggactggctgaccgccaagctggcctacgagggcctgagcaagacctacctgtccaagacactggcccagtacacctccaagacatgcagcaactgtgggtttaccatcaccagcgccgactacgacagggtgctggagaagctgaagaagacagcaacaggctggatgaccacaattaacggcaaggagctgaaggtggagggccagattacctactacaacagatacaagagacagaacgtagtcaaggacctgtccgtcgagctggatagactgagcgaagaatctgtgaacaacgacatctcctcctggacaaagggcagaagcggagaagctctgagcctcctgaagaaaagattctcccatagacccgtgcaggagaagttcgtgtgcctgaactgcggcttcgagacacacgcagccgagcaagccgccctgaacatcgccagatcctggctgttcctgcggagccaggagtacaagaaataccagacaaacaagacaaccggcaacaccgataagagagccttcgtcgagacctggcagtccttttaccggaagaagcttaaggaggtgtggaaacctgccgtgcggtctggcggatctggcggaggctccatggagcccctgaagttcagggacgtggccgtggagttcagcctggaggagtggcagtgcctggacaccatccagcagaacctgtacaggaacgtgatgctggagaactacaggaacctggtgttcctgggcatcgccgtgagcaagcccgacctgatcacctgcctggagcaggagaaggagccctggaccaggaagaggcacaggatggtggccaagcccgtgacctgcagccacttcgccggcggcccaagcagcggcgcccctcctcccagcggcggcagcccagccggctccccaacctctaccgaggagggcacctctgagtccgccacccccgagagcggccctggcacctccaccgagcccagcgagggcagcgcacccggcagccctgccggcagccccacctccacagaggagggaaccagcaccgagcccagcgaaggcagcgccccaggcaccagcaccgagcctagtgagcaggagattaaacggatcaacaagatcagaagaagacttgtgaaagacagcaacaccaagaaggccggcaagacaggccccatgaaaaccctgctggttagagtgatgacacccgatctgagagagcggctggaaaacctgagaaagaagcctgaaaatatcccccagcccatcagcaatacatctagagccaacctgaataagctgctgaccgattacaccgaaatgaagaaggcgatcctgcatgtgtactgggaagagttccagaaggaccctgtgggcctgatgagccgggtggcccagcctgccagcaagaagatcgatcagaacaagctgaaacctgagatggacgagaagggcaacctgaccaccgccggctttgcctgctctcagtgtggccagcccctgttcgtgtacaagctggagcaggtgtctgagaagggcaaggcttacaccaactacttcggacggtgcaatgtggccgagcacgaaaagctgatcctgctggcccagctgaagcccgagaaggatagcgacgaagccgtgacatatagcctgggaaagtttgggcagagggccctggatttctacagcattcatgtgaccaaggagtccacccaccccgtgaagcccctggcccagatcgccggaaacagatacgcctccggacctgtgggaaaggccctgagcgacgcatgtatgggcacaatcgcctccttcctgtctaagtaccaggacatcatcatcgaacaccagaaggtggtgaagggcaaccagaagagactggagagcctgcgggagctggccggcaaggaaaacctggaataccctagcgtgaccctgccacctcagcctcacaccaaggagggcgttgatgcctacaacgaagtgatcgcccgggtgcgaatgtgggtgaacctgaacctgtggcagaagctgaagctaagcagagatgatgccaagcctctgctgagactgaagggattcccttcctttcctctggtcgagagacaggccaacgaagtggactggtgggacatggtgtgtaacgtgaagaagctgatcaacgagaaaaaggaggatggcaaggtgttttggcagaatctggctggctacaagagacaggaagccctgagaccatacctgagcagcgaggaagatcggaagaagggaaagaaattcgctcggtaccagctgggcgacctgctgctgcacctggaaaagaagcacggcgaggactggggaaaggtgtacgacgaggcctgggagcggattgacaagaaagtggaaggcctgagcaagcacatcaagctggaagaggaacggagaagcgaggacgcccagagcaaggccgccctgaccgactggctgcgggctaaggccagcttcgtgatcgagggcctgaaggaggccgacaaggacgagttctgcagatgcgagctgaagctgcagaagtggtacggggacctgcggggaaagcccttcgccatcgaagccgagaacagcatcctggacatcagcggcttcagcaagcagtacaactgtgccttcatctggcagaaggacggcgtgaagaagctgaacctgtacctgatcatcaactacttcaagggcggcaagctgcggttcaagaagatcaaacctgaagccttcgaagccaacagattctacaccgtgatcaacaaaaagagcggcgagatcgtgcccatggaggtgaacttcaacttcgacgaccccaacctgatcatcctgcctctggcctttggcaagagacagggcagagaattcatctggaacgacctgctgtccctggaaaccggcagcctgaagctggccaacggaagagtgatcgagaagacactgtacaacagaagaacccggcaggatgagcctgccctgttcgtggccctgaccttcgagcggcgggaggtcctggactcctccaatatcaaaccaatgaacctgatcggcgtggcaagaggcgaaaacatccccgccgtgatcgccctgaccgaccccgagggctgcccactgagccggtttaaggatagcctgggaaacccaacccacatcctgagaatcggcgagagctataaggagaagcagcggaccatccaggccaagaaggaggtggagcagcggagagccggcggctacagccggaagtacgccagcaaagccaagaatctggcagacgatatggtgagaaacaccgctagagatctgctgtactacgccgtgacccaggatgccatgctgatcttcgccaacctgagccggggcttcggccggcagggcaagcggaccttcatggccgagagacagtacacacggatggaggactggctgaccgccaagctggcctacgagggcctgagcaagacctacctgtccaagacactggcccagtacacctccaagacatgcagcaactgtgggtttaccatcaccagcgccgactacgacagggtgctggagaagctgaagaagacagcaacaggctggatgaccacaattaacggcaaggagctgaaggtggagggccagattacctactacaacagatacaagagacagaacgtagtcaaggacctgtccgtcgagctggatagactgagcgaagaatctgtgaacaacgacatctcctcctggacaaagggcagaagcggagaagctctgagcctcctgaagaaaagattctcccatagacccgtgcaggagaagttcgtgtgcctgaactgcggcttcgagacacacgcagccgagcaagccgccctgaacatcgccagatcctggctgttcctgcggagccaggagtacaagaaataccagacaaacaagacaaccggcaacaccgataagagagccttcgtcgagacctggcagtccttttaccggaagaagcttaaggaggtgtggaaacctgccgtgcggtctggcggatctggcggaggctcctatggagcccctgaagttcagggacgtggccgtggagttcagcctggaggagtggcagtgcctggacaccatccagcagaacctgtacaggaacgtgatgctggagaactacaggaacctggtgttcctgggcatcgccgtgagcaagcccgacctgatcacctgcctggagcaggagaaggagccctggaccaggaagaggcacaggatggtggccaagcccgtgacctgcagccacttcgccggatctggctccggcagcggccccaagaaaaagagaaaagtctaagctgccttctgcggggcttgccttctggccatgcccttcttctctcccttgcacctgtacctcttggtctttgaataaagcctgagtaggaaggctagcaaaaaaaaaaaaaaaaaaaaaaaaaaaaaaaaaaaaaaaaaaaaaaaaaaaaaaaaaaaaaaaaaaaaaaaaaaaaaaaa

SEQ ID NO: 16131 - RNA, 9485 nt, synthetic construct
  source 1..9485: mol_type = other RNA
aggaaataagagagaaaagaagagtaagaagaaatataagagccaccatggcccctaagaagaagcgtaaagtgagccggatggaacgcctcgtctacgaggtgcggcagaagtgcagaaacatcgaggacatctgcatctcctgcggatctctgaacgtgaccctggagcacccactgttcatcggcggcatgtgccagaactgtaaaaactgttttctggagtgtgcctatcaatacgacgatgacggctaccagagctactgcaccatctgttgcggcggaagagaggtgctgatgtgtggaaataacaactgctgccggtgcttctgcgtggaatgcgtggacctgctggtgggccccggcgccgcccaggccgctattaaggaagatccttggaactgctacatgtgcggccacaagggcacatacggcctgctgagacggagagaggactggcctagcagactgcagatgttcttcgccaataaccacgaccaggagttcgacccccctaaggtgtaccctcccgtccccgccgagaagagaaagcccatccgggtcctgagcctgttcgatggcatcgccaccggtctgctggtgctgaaggacctgggcatccaggtggataggtacattgcctccgaggtgtgcgaggactccatcaccgtgggaatggtgcgtcatcagggcaagatcatgtacgtgggcgacgtgcggagcgtgacacagaagcatatccaggagtggggccctttcgacctggtgatcggcggcagcccttgcaatgacctgagcatcgtgaacccagcccggaagggcctgtacgagggaaccggcagactgttcttcgagttttacagactgctgcacgacgcccggcctaaggaaggcgacgaccggcccttcttttggctgttcgagaatgtggtggccatgggagtcagcgacaagcgggatattagccggttcctggagagcaaccccgtgatgatcgatgccaaggaagtgagcgccgcccaccgggccagatacttctggggcaatctgcctggcatgaacagacccctggccagcaccgtgaacgacaagctggagctgcaggagtgcctggagcacggccggatcgccaagttcagcaaggtgagaaccatcaccacccgaagcaacagcatcaaacaaggcaaggaccagcactttcctgtgttcatgaacgagaaggaggacatcctgtggtgtaccgagatggagagagtgttcgggttcccagtccactacacagatgtcagcaacatgtctagactggccagacagagactgctgggaagaagctggtccgtccctgtgatcagacacctgttcgcccctctgaaggagtacttcgcctgcgtgagcagcggcaacagcaacgccaacagccggggccccagcttctctagcggcctggtgccactgtccctgagagggagccacatgggccccatggagatctacaaaaccgtgagcgcctggaagcggcagcctgtgcgcgtgctgagcctgtttcggaatatcgataaagtcctgaaaagcctgggattcctggagagcggctctggctccggcggtggcaccctgaagtacgtggaggatgtgacaaacgtggtcagacgggatgtggagaagtggggccccttcgatctggtgtacggcagcacccaacccctgggcagctcttgtgaccggtgccctggctggtacatgtttcagttccaccggatcctgcagtacgccctgccgagacaggagtcccagcggccattcttttggattttcatggacaacttgctgctgaccgaggatgaccaggaaactaccactcggttcctgcagaccgaagccgtgaccctgcaggacgtgagaggccgggactaccagaacgccatgcgggtgtggtccaacatccctggactgaaaagcaagcacgcacctctgacccctaaagaagaggagtacctgcaggcccaggtgcggagcagaagcaagctggacgcccctaaggtggatctgctggtgaagaattgcctcctgcccctgagagagtacttcaagtatttcagccagaatagtctgcccctgggaggcagcggcggcggcgccctggtgacatttgaggacgtcgccgtgcggttcacccaggaggaatgggctctgctggatccttctcagaaaatcctgtaccgggacgtgatgagagagacataccggaatctgacctccgtgggcatcaactgggaatgttgggaccttgaagcctgcttcagaagcctgggaagaaacctgagagtgcaggtggtgaagagaaagtgcgagctgaccaacagcggcccctgcgccgagggcggcccaagcagcggcgcccctcctcccagcggcggcagcccagccggctccccaacctctaccgaggagggcacctctgagtccgccacccccgagagcggccctggcacctccaccgagcccagcgagggcagcgcacccggcagccctgccggcagccccacctccacagaggagggaaccagcaccgagcccagcgaaggcagcgccccaggcaccagcaccgagcctagtgagcaggagattaaacggatcaacaagatcagaagaagacttgtgaaagacagcaacaccaagaaggccggcaagacaggccccatgaaaaccctgctggttagagtgatgacacccgatctgagagagcggctggaaaacctgagaaagaagcctgaaaatatcccccagcccatcagcaatacatctagagccaacctgaataagctgctgaccgattacaccgaaatgaagaaggcgatcctgcatgtgtactgggaagagttccagaaggaccctgtgggcctgatgagccgggtggcccagcctgccagcaagaagatcgatcagaacaagctgaaacctgagatggacgagaagggcaacctgaccaccgccggctttgcctgctctcagtgtggccagcccctgttcgtgtacaagctggagcaggtgtctgagaagggcaaggcttacaccaactacttcggacggtgcaatgtggccgagcacgaaaagctgatcctgctggcccagctgaagcccgagaaggatagcgacgaagccgtgacatatagcctgggaaagtttgggcagagggccctggatttctacagcattcatgtgaccaaggagtccacccaccccgtgaagcccctggcccagatcgccggaaacagatacgcctccggacctgtgggaaaggccctgagcgacgcatgtatgggcacaatcgcctccttcctgtctaagtaccaggacatcatcatcgaacaccagaaggtggtgaagggcaaccagaagagactggagagcctgcgggagctggccggcaaggaaaacctggaataccctagcgtgaccctgccacctcagcctcacaccaaggagggcgttgatgcctacaacgaagtgatcgcccgggtgcgaatgtgggtgaacctgaacctgtggcagaagctgaagctaagcagagatgatgccaagcctctgctgagactgaagggattcccttcctttcctctggtcgagagacaggccaacgaagtggactggtgggacatggtgtgtaacgtgaagaagctgatcaacgagaaaaaggaggatggcaaggtgttttggcagaatctggctggctacaagagacaggaagccctgagaccatacctgagcagcgaggaagatcggaagaagggaaagaaattcgctcggtaccagctgggcgacctgctgctgcacctggaaaagaagcacggcgaggactggggaaaggtgtacgacgaggcctgggagcggattgacaagaaagtggaaggcctgagcaagcacatcaagctggaagaggaacggagaagcgaggacgcccagagcaaggccgccctgaccgactggctgcgggctaaggccagcttcgtgatcgagggcctgaaggaggccgacaaggacgagttctgcagatgcgagctgaagctgcagaagtggtacggggacctgcggggaaagcccttcgccatcgaagccgagaacagcatcctggacatcagcggcttcagcaagcagtacaactgtgccttcatctggcagaaggacggcgtgaagaagctgaacctgtacctgatcatcaactacttcaagggcggcaagctgcggttcaagaagatcaaacctgaagccttcgaagccaacagattctacaccgtgatcaacaaaaagagcggcgagatcgtgcccatggaggtgaacttcaacttcgacgaccccaacctgatcatcctgcctctggcctttggcaagagacagggcagagaattcatctggaacgacctgctgtccctggaaaccggcagcctgaagctggccaacggaagagtgatcgagaagacactgtacaacagaagaacccggcaggatgagcctgccctgttcgtggccctgaccttcgagcggcgggaggtcctggactcctccaatatcaaaccaatgaacctgatcggcgtggcaagaggcgaaaacatccccgccgtgatcgccctgaccgaccccgagggctgcccactgagccggtttaaggatagcctgggaaacccaacccacatcctgagaatcggcgagagctataaggagaagcagcggaccatccaggccaagaaggaggtggagcagcggagagccggcggctacagccggaagtacgccagcaaagccaagaatctggcagacgatatggtgagaaacaccgctagagatctgctgtactacgccgtgacccaggatgccatgctgatcttcgccaacctgagccggggcttcggccggcagggcaagcggaccttcatggccgagagacagtacacacggatggaggactggctgaccgccaagctggcctacgagggcctgagcaagacctacctgtccaagacactggcccagtacacctccaagacatgcagcaactgtgggtttaccatcaccagcgccgactacgacagggtgctggagaagctgaagaagacagcaacaggctggatgaccacaattaacggcaaggagctgaaggtggagggccagattacctactacaacagatacaagagacagaacgtagtcaaggacctgtccgtcgagctggatagactgagcgaagaatctgtgaacaacgacatctcctcctggacaaagggcagaagcggagaagctctgagcctcctgaagaaaagattctcccatagacccgtgcaggagaagttcgtgtgcctgaactgcggcttcgagacacacgcagccgagcaagccgccctgaacatcgccagatcctggctgttcctgcggagccaggagtacaagaaataccagacaaacaagacaaccggcaacaccgataagagagccttcgtcgagacctggcagtccttttaccggaagaagcttaaggaggtgtggaaacctgccgtgcggtctggcggatctggcggaggctccctgctgcaggagagcctgaccctggaggacgtggccgtggacttcacccaggaggagtggaggctgctggcccccgcccagaaggacctgtacagggacgtgatgctggagaacttcaggaacctggtgagcgtgggctacgtggccagcatgcccgccgccctgagcaggctggagaggggcggcaggtggatgaccgaggacgagaccaggaggggcatctgccccgagatcaagaaggacggcggcccaagcagcggcgcccctcctcccagcggcggcagcccagccggctccccaacctctaccgaggagggcacctctgagtccgccacccccgagagcggccctggcacctccaccgagcccagcgagggcagcgcacccggcagccctgccggcagccccacctccacagaggagggaaccagcaccgagcccagcgaaggcagcgccccaggcaccagcaccgagcctagtgagcaggagattaaacggatcaacaagatcagaagaagacttgtgaaagacagcaacaccaagaaggccggcaagacaggccccatgaaaaccctgctggttagagtgatgacacccgatctgagagagcggctggaaaacctgagaaagaagcctgaaaatatcccccagcccatcagcaatacatctagagccaacctgaataagctgctgaccgattacaccgaaatgaagaaggcgatcctgcatgtgtactgggaagagttccagaaggaccctgtgggcctgatgagccgggtggcccagcctgccagcaagaagatcgatcagaacaagctgaaacctgagatggacgagaagggcaacctgaccaccgccggctttgcctgctctcagtgtggccagcccctgttcgtgtacaagctggagcaggtgtctgagaagggcaaggcttacaccaactacttcggacggtgcaatgtggccgagcacgaaaagctgatcctgctggcccagctgaagcccgagaaggatagcgacgaagccgtgacatatagcctgggaaagtttgggcagagggccctggatttctacagcattcatgtgaccaaggagtccacccaccccgtgaagcccctggcccagatcgccggaaacagatacgcctccggacctgtgggaaaggccctgagcgacgcatgtatgggcacaatcgcctccttcctgtctaagtaccaggacatcatcatcgaacaccagaaggtggtgaagggcaaccagaagagactggagagcctgcgggagctggccggcaaggaaaacctggaataccctagcgtgaccctgccacctcagcctcacaccaaggagggcgttgatgcctacaacgaagtgatcgcccgggtgcgaatgtgggtgaacctgaacctgtggcagaagctgaagctaagcagagatgatgccaagcctctgctgagactgaagggattcccttcctttcctctggtcgagagacaggccaacgaagtggactggtgggacatggtgtgtaacgtgaagaagctgatcaacgagaaaaaggaggatggcaaggtgttttggcagaatctggctggctacaagagacaggaagccctgagaccatacctgagcagcgaggaagatcggaagaagggaaagaaattcgctcggtaccagctgggcgacctgctgctgcacctggaaaagaagcacggcgaggactggggaaaggtgtacgacgaggcctgggagcggattgacaagaaagtggaaggcctgagcaagcacatcaagctggaagaggaacggagaagcgaggacgcccagagcaaggccgccctgaccgactggctgcgggctaaggccagcttcgtgatcgagggcctgaaggaggccgacaaggacgagttctgcagatgcgagctgaagctgcagaagtggtacggggacctgcggggaaagcccttcgccatcgaagccgagaacagcatcctggacatcagcggcttcagcaagcagtacaactgtgccttcatctggcagaaggacggcgtgaagaagctgaacctgtacctgatcatcaactacttcaagggcggcaagctgcggttcaagaagatcaaacctgaagccttcgaagccaacagattctacaccgtgatcaacaaaaagagcggcgagatcgtgcccatggaggtgaacttcaacttcgacgaccccaacctgatcatcctgcctctggcctttggcaagagacagggcagagaattcatctggaacgacctgctgtccctggaaaccggcagcctgaagctggccaacggaagagtgatcgagaagacactgtacaacagaagaacccggcaggatgagcctgccctgttcgtggccctgaccttcgagcggcgggaggtcctggactcctccaatatcaaaccaatgaacctgatcggcgtggcaagaggcgaaaacatccccgccgtgatcgccctgaccgaccccgagggctgcccactgagccggtttaaggatagcctgggaaacccaacccacatcctgagaatcggcgagagctataaggagaagcagcggaccatccaggccaagaaggaggtggagcagcggagagccggcggctacagccggaagtacgccagcaaagccaagaatctggcagacgatatggtgagaaacaccgctagagatctgctgtactacgccgtgacccaggatgccatgctgatcttcgccaacctgagccggggcttcggccggcagggcaagcggaccttcatggccgagagacagtacacacggatggaggactggctgaccgccaagctggcctacgagggcctgagcaagacctacctgtccaagacactggcccagtacacctccaagacatgcagcaactgtgggtttaccatcaccagcgccgactacgacagggtgctggagaagctgaagaagacagcaacaggctggatgaccacaattaacggcaaggagctgaaggtggagggccagattacctactacaacagatacaagagacagaacgtagtcaaggacctgtccgtcgagctggatagactgagcgaagaatctgtgaacaacgacatctcctcctggacaaagggcagaagcggagaagctctgagcctcctgaagaaaagattctcccatagacccgtgcaggagaagttcgtgtgcctgaactgcggcttcgagacacacgcagccgagcaagccgccctgaacatcgccagatcctggctgttcctgcggagccaggagtacaagaaataccagacaaacaagacaaccggcaacaccgataagagagccttcgtcgagacctggcagtccttttaccggaagaagcttaaggaggtgtggaaacctgccgtgcggtctggcggatctggcggaggctcctctgctgcaggagagcctgaccctggaggacgtggccgtggacttcacccaggaggagtggaggctgctggcccccgcccagaaggacctgtacagggacgtgatgctggagaacttcaggaacctggtgagcgtgggctacgtggccagcatgcccgccgccctgagcaggctggagaggggcggcaggtggatgaccgaggacgagaccaggaggggcatctgccccgagatcaagaaggacggatctggctccggcagcggccccaagaaaaagagaaaagtctaagctgccttctgcggggcttgccttctggccatgcccttcttctctcccttgcacctgtacctcttggtctttgaataaagcctgagtaggaaggctagcaaaaaaaaaaaaaaaaaaaaaaaaaaaaaaaaaaaaaaaaaaaaaaaaaaaaaaaaaaaaaaaaaaaaaaaaaaaaaaaa

SEQ ID NO: 16132 - RNA, 9485 nt, synthetic construct
  source 1..9485: mol_type = other RNA
aggaaataagagagaaaagaagagtaagaagaaatataagagccaccatggcccctaagaagaagcgtaaagtgagccggatggaacgcctcgtctacgaggtgcggcagaagtgcagaaacatcgaggacatctgcatctcctgcggatctctgaacgtgaccctggagcacccactgttcatcggcggcatgtgccagaactgtaaaaactgttttctggagtgtgcctatcaatacgacgatgacggctaccagagctactgcaccatctgttgcggcggaagagaggtgctgatgtgtggaaataacaactgctgccggtgcttctgcgtggaatgcgtggacctgctggtgggccccggcgccgcccaggccgctattaaggaagatccttggaactgctacatgtgcggccacaagggcacatacggcctgctgagacggagagaggactggcctagcagactgcagatgttcttcgccaataaccacgaccaggagttcgacccccctaaggtgtaccctcccgtccccgccgagaagagaaagcccatccgggtcctgagcctgttcgatggcatcgccaccggtctgctggtgctgaaggacctgggcatccaggtggataggtacattgcctccgaggtgtgcgaggactccatcaccgtgggaatggtgcgtcatcagggcaagatcatgtacgtgggcgacgtgcggagcgtgacacagaagcatatccaggagtggggccctttcgacctggtgatcggcggcagcccttgcaatgacctgagcatcgtgaacccagcccggaagggcctgtacgagggaaccggcagactgttcttcgagttttacagactgctgcacgacgcccggcctaaggaaggcgacgaccggcccttcttttggctgttcgagaatgtggtggccatgggagtcagcgacaagcgggatattagccggttcctggagagcaaccccgtgatgatcgatgccaaggaagtgagcgccgcccaccgggccagatacttctggggcaatctgcctggcatgaacagacccctggccagcaccgtgaacgacaagctggagctgcaggagtgcctggagcacggccggatcgccaagttcagcaaggtgagaaccatcaccacccgaagcaacagcatcaaacaaggcaaggaccagcactttcctgtgttcatgaacgagaaggaggacatcctgtggtgtaccgagatggagagagtgttcgggttcccagtccactacacagatgtcagcaacatgtctagactggccagacagagactgctgggaagaagctggtccgtccctgtgatcagacacctgttcgcccctctgaaggagtacttcgcctgcgtgagcagcggcaacagcaacgccaacagccggggccccagcttctctagcggcctggtgccactgtccctgagagggagccacatgggccccatggagatctacaaaaccgtgagcgcctggaagcggcagcctgtgcgcgtgctgagcctgtttcggaatatcgataaagtcctgaaaagcctgggattcctggagagcggctctggctccggcggtggcaccctgaagtacgtggaggatgtgacaaacgtggtcagacgggatgtggagaagtggggccccttcgatctggtgtacggcagcacccaacccctgggcagctcttgtgaccggtgccctggctggtacatgtttcagttccaccggatcctgcagtacgccctgccgagacaggagtcccagcggccattcttttggattttcatggacaacttgctgctgaccgaggatgaccaggaaactaccactcggttcctgcagaccgaagccgtgaccctgcaggacgtgagaggccgggactaccagaacgccatgcgggtgtggtccaacatccctggactgaaaagcaagcacgcacctctgacccctaaagaagaggagtacctgcaggcccaggtgcggagcagaagcaagctggacgcccctaaggtggatctgctggtgaagaattgcctcctgcccctgagagagtacttcaagtatttcagccagaatagtctgcccctgggaggcagcggcggcggcgccctggtgacatttgaggacgtcgccgtgcggttcacccaggaggaatgggctctgctggatccttctcagaaaatcctgtaccgggacgtgatgagagagacataccggaatctgacctccgtgggcatcaactgggaatgttgggaccttgaagcctgcttcagaagcctgggaagaaacctgagagtgcaggtggtgaagagaaagtgcgagctgaccaacagcggcccctgcgccgagggcggcccaagcagcggcgcccctcctcccagcggcggcagcccagccggctccccaacctctaccgaggagggcacctctgagtccgccacccccgagagcggccctggcacctccaccgagcccagcgagggcagcgcacccggcagccctgccggcagccccacctccacagaggagggaaccagcaccgagcccagcgaaggcagcgccccaggcaccagcaccgagcctagtgagcaggagattaaacggatcaacaagatcagaagaagacttgtgaaagacagcaacaccaagaaggccggcaagacaggccccatgaaaaccctgctggttagagtgatgacacccgatctgagagagcggctggaaaacctgagaaagaagcctgaaaatatcccccagcccatcagcaatacatctagagccaacctgaataagctgctgaccgattacaccgaaatgaagaaggcgatcctgcatgtgtactgggaagagttccagaaggaccctgtgggcctgatgagccgggtggcccagcctgccagcaagaagatcgatcagaacaagctgaaacctgagatggacgagaagggcaacctgaccaccgccggctttgcctgctctcagtgtggccagcccctgttcgtgtacaagctggagcaggtgtctgagaagggcaaggcttacaccaactacttcggacggtgcaatgtggccgagcacgaaaagctgatcctgctggcccagctgaagcccgagaaggatagcgacgaagccgtgacatatagcctgggaaagtttgggcagagggccctggatttctacagcattcatgtgaccaaggagtccacccaccccgtgaagcccctggcccagatcgccggaaacagatacgcctccggacctgtgggaaaggccctgagcgacgcatgtatgggcacaatcgcctccttcctgtctaagtaccaggacatcatcatcgaacaccagaaggtggtgaagggcaaccagaagagactggagagcctgcgggagctggccggcaaggaaaacctggaataccctagcgtgaccctgccacctcagcctcacaccaaggagggcgttgatgcctacaacgaagtgatcgcccgggtgcgaatgtgggtgaacctgaacctgtggcagaagctgaagctaagcagagatgatgccaagcctctgctgagactgaagggattcccttcctttcctctggtcgagagacaggccaacgaagtggactggtgggacatggtgtgtaacgtgaagaagctgatcaacgagaaaaaggaggatggcaaggtgttttggcagaatctggctggctacaagagacaggaagccctgagaccatacctgagcagcgaggaagatcggaagaagggaaagaaattcgctcggtaccagctgggcgacctgctgctgcacctggaaaagaagcacggcgaggactggggaaaggtgtacgacgaggcctgggagcggattgacaagaaagtggaaggcctgagcaagcacatcaagctggaagaggaacggagaagcgaggacgcccagagcaaggccgccctgaccgactggctgcgggctaaggccagcttcgtgatcgagggcctgaaggaggccgacaaggacgagttctgcagatgcgagctgaagctgcagaagtggtacggggacctgcggggaaagcccttcgccatcgaagccgagaacagcatcctggacatcagcggcttcagcaagcagtacaactgtgccttcatctggcagaaggacggcgtgaagaagctgaacctgtacctgatcatcaactacttcaagggcggcaagctgcggttcaagaagatcaaacctgaagccttcgaagccaacagattctacaccgtgatcaacaaaaagagcggcgagatcgtgcccatggaggtgaacttcaacttcgacgaccccaacctgatcatcctgcctctggcctttggcaagagacagggcagagaattcatctggaacgacctgctgtccctggaaaccggcagcctgaagctggccaacggaagagtgatcgagaagacactgtacaacagaagaacccggcaggatgagcctgccctgttcgtggccctgaccttcgagcggcgggaggtcctggactcctccaatatcaaaccaatgaacctgatcggcgtggcaagaggcgaaaacatccccgccgtgatcgccctgaccgaccccgagggctgcccactgagccggtttaaggatagcctgggaaacccaacccacatcctgagaatcggcgagagctataaggagaagcagcggaccatccaggccaagaaggaggtggagcagcggagagccggcggctacagccggaagtacgccagcaaagccaagaatctggcagacgatatggtgagaaacaccgctagagatctgctgtactacgccgtgacccaggatgccatgctgatcttcgccaacctgagccggggcttcggccggcagggcaagcggaccttcatggccgagagacagtacacacggatggaggactggctgaccgccaagctggcctacgagggcctgagcaagacctacctgtccaagacactggcccagtacacctccaagacatgcagcaactgtgggtttaccatcaccagcgccgactacgacagggtgctggagaagctgaagaagacagcaacaggctggatgaccacaattaacggcaaggagctgaaggtggagggccagattacctactacaacagatacaagagacagaacgtagtcaaggacctgtccgtcgagctggatagactgagcgaagaatctgtgaacaacgacatctcctcctggacaaagggcagaagcggagaagctctgagcctcctgaagaaaagattctcccatagacccgtgcaggagaagttcgtgtgcctgaactgcggcttcgagacacacgcagccgagcaagccgccctgaacatcgccagatcctggctgttcctgcggagccaggagtacaagaaataccagacaaacaagacaaccggcaacaccgataagagagccttcgtcgagacctggcagtccttttaccggaagaagcttaaggaggtgtggaaacctgccgtgcggtctggcggatctggcggaggctccatgaacaccgtgacctacgacgacgtgcacgtgaacttcacctgggaggagtggaccctgctggaccccagccagaagaacctgtacaaggacgtgatgctggagacctacaggaacctgaccgccgtgggctacagctgggaggaccacaacgtggaggagcactgccagagctacaggaggcacagcaggctggagaggagccacaccggcgagaagagcagcgtgcacacccagtgcgtgggcggcccaagcagcggcgcccctcctcccagcggcggcagcccagccggctccccaacctctaccgaggagggcacctctgagtccgccacccccgagagcggccctggcacctccaccgagcccagcgagggcagcgcacccggcagccctgccggcagccccacctccacagaggagggaaccagcaccgagcccagcgaaggcagcgccccaggcaccagcaccgagcctagtgagcaggagattaaacggatcaacaagatcagaagaagacttgtgaaagacagcaacaccaagaaggccggcaagacaggccccatgaaaaccctgctggttagagtgatgacacccgatctgagagagcggctggaaaacctgagaaagaagcctgaaaatatcccccagcccatcagcaatacatctagagccaacctgaataagctgctgaccgattacaccgaaatgaagaaggcgatcctgcatgtgtactgggaagagttccagaaggaccctgtgggcctgatgagccgggtggcccagcctgccagcaagaagatcgatcagaacaagctgaaacctgagatggacgagaagggcaacctgaccaccgccggctttgcctgctctcagtgtggccagcccctgttcgtgtacaagctggagcaggtgtctgagaagggcaaggcttacaccaactacttcggacggtgcaatgtggccgagcacgaaaagctgatcctgctggcccagctgaagcccgagaaggatagcgacgaagccgtgacatatagcctgggaaagtttgggcagagggccctggatttctacagcattcatgtgaccaaggagtccacccaccccgtgaagcccctggcccagatcgccggaaacagatacgcctccggacctgtgggaaaggccctgagcgacgcatgtatgggcacaatcgcctccttcctgtctaagtaccaggacatcatcatcgaacaccagaaggtggtgaagggcaaccagaagagactggagagcctgcgggagctggccggcaaggaaaacctggaataccctagcgtgaccctgccacctcagcctcacaccaaggagggcgttgatgcctacaacgaagtgatcgcccgggtgcgaatgtgggtgaacctgaacctgtggcagaagctgaagctaagcagagatgatgccaagcctctgctgagactgaagggattcccttcctttcctctggtcgagagacaggccaacgaagtggactggtgggacatggtgtgtaacgtgaagaagctgatcaacgagaaaaaggaggatggcaaggtgttttggcagaatctggctggctacaagagacaggaagccctgagaccatacctgagcagcgaggaagatcggaagaagggaaagaaattcgctcggtaccagctgggcgacctgctgctgcacctggaaaagaagcacggcgaggactggggaaaggtgtacgacgaggcctgggagcggattgacaagaaagtggaaggcctgagcaagcacatcaagctggaagaggaacggagaagcgaggacgcccagagcaaggccgccctgaccgactggctgcgggctaaggccagcttcgtgatcgagggcctgaaggaggccgacaaggacgagttctgcagatgcgagctgaagctgcagaagtggtacggggacctgcggggaaagcccttcgccatcgaagccgagaacagcatcctggacatcagcggcttcagcaagcagtacaactgtgccttcatctggcagaaggacggcgtgaagaagctgaacctgtacctgatcatcaactacttcaagggcggcaagctgcggttcaagaagatcaaacctgaagccttcgaagccaacagattctacaccgtgatcaacaaaaagagcggcgagatcgtgcccatggaggtgaacttcaacttcgacgaccccaacctgatcatcctgcctctggcctttggcaagagacagggcagagaattcatctggaacgacctgctgtccctggaaaccggcagcctgaagctggccaacggaagagtgatcgagaagacactgtacaacagaagaacccggcaggatgagcctgccctgttcgtggccctgaccttcgagcggcgggaggtcctggactcctccaatatcaaaccaatgaacctgatcggcgtggcaagaggcgaaaacatccccgccgtgatcgccctgaccgaccccgagggctgcccactgagccggtttaaggatagcctgggaaacccaacccacatcctgagaatcggcgagagctataaggagaagcagcggaccatccaggccaagaaggaggtggagcagcggagagccggcggctacagccggaagtacgccagcaaagccaagaatctggcagacgatatggtgagaaacaccgctagagatctgctgtactacgccgtgacccaggatgccatgctgatcttcgccaacctgagccggggcttcggccggcagggcaagcggaccttcatggccgagagacagtacacacggatggaggactggctgaccgccaagctggcctacgagggcctgagcaagacctacctgtccaagacactggcccagtacacctccaagacatgcagcaactgtgggtttaccatcaccagcgccgactacgacagggtgctggagaagctgaagaagacagcaacaggctggatgaccacaattaacggcaaggagctgaaggtggagggccagattacctactacaacagatacaagagacagaacgtagtcaaggacctgtccgtcgagctggatagactgagcgaagaatctgtgaacaacgacatctcctcctggacaaagggcagaagcggagaagctctgagcctcctgaagaaaagattctcccatagacccgtgcaggagaagttcgtgtgcctgaactgcggcttcgagacacacgcagccgagcaagccgccctgaacatcgccagatcctggctgttcctgcggagccaggagtacaagaaataccagacaaacaagacaaccggcaacaccgataagagagccttcgtcgagacctggcagtccttttaccggaagaagcttaaggaggtgtggaaacctgccgtgcggtctggcggatctggcggaggctcctatgaacaccgtgacctacgacgacgtgcacgtgaacttcacctgggaggagtggaccctgctggaccccagccagaagaacctgtacaaggacgtgatgctggagacctacaggaacctgaccgccgtgggctacagctgggaggaccacaacgtggaggagcactgccagagctacaggaggcacagcaggctggagaggagccacaccggcgagaagagcagcgtgcacacccagtgcgtgggatctggctccggcagcggccccaagaaaaagagaaaagtctaagctgccttctgcggggcttgccttctggccatgcccttcttctctcccttgcacctgtacctcttggtctttgaataaagcctgagtaggaaggctagcaaaaaaaaaaaaaaaaaaaaaaaaaaaaaaaaaaaaaaaaaaaaaaaaaaaaaaaaaaaaaaaaaaaaaaaaaaaaaaaa

SEQ ID NO: 16133 - RNA, 9485 nt, synthetic construct
  source 1..9485: mol_type = other RNA
aggaaataagagagaaaagaagagtaagaagaaatataagagccaccatggcccctaagaagaagcgtaaagtgagccggatggaacgcctcgtctacgaggtgcggcagaagtgcagaaacatcgaggacatctgcatctcctgcggatctctgaacgtgaccctggagcacccactgttcatcggcggcatgtgccagaactgtaaaaactgttttctggagtgtgcctatcaatacgacgatgacggctaccagagctactgcaccatctgttgcggcggaagagaggtgctgatgtgtggaaataacaactgctgccggtgcttctgcgtggaatgcgtggacctgctggtgggccccggcgccgcccaggccgctattaaggaagatccttggaactgctacatgtgcggccacaagggcacatacggcctgctgagacggagagaggactggcctagcagactgcagatgttcttcgccaataaccacgaccaggagttcgacccccctaaggtgtaccctcccgtccccgccgagaagagaaagcccatccgggtcctgagcctgttcgatggcatcgccaccggtctgctggtgctgaaggacctgggcatccaggtggataggtacattgcctccgaggtgtgcgaggactccatcaccgtgggaatggtgcgtcatcagggcaagatcatgtacgtgggcgacgtgcggagcgtgacacagaagcatatccaggagtggggccctttcgacctggtgatcggcggcagcccttgcaatgacctgagcatcgtgaacccagcccggaagggcctgtacgagggaaccggcagactgttcttcgagttttacagactgctgcacgacgcccggcctaaggaaggcgacgaccggcccttcttttggctgttcgagaatgtggtggccatgggagtcagcgacaagcgggatattagccggttcctggagagcaaccccgtgatgatcgatgccaaggaagtgagcgccgcccaccgggccagatacttctggggcaatctgcctggcatgaacagacccctggccagcaccgtgaacgacaagctggagctgcaggagtgcctggagcacggccggatcgccaagttcagcaaggtgagaaccatcaccacccgaagcaacagcatcaaacaaggcaaggaccagcactttcctgtgttcatgaacgagaaggaggacatcctgtggtgtaccgagatggagagagtgttcgggttcccagtccactacacagatgtcagcaacatgtctagactggccagacagagactgctgggaagaagctggtccgtccctgtgatcagacacctgttcgcccctctgaaggagtacttcgcctgcgtgagcagcggcaacagcaacgccaacagccggggccccagcttctctagcggcctggtgccactgtccctgagagggagccacatgggccccatggagatctacaaaaccgtgagcgcctggaagcggcagcctgtgcgcgtgctgagcctgtttcggaatatcgataaagtcctgaaaagcctgggattcctggagagcggctctggctccggcggtggcaccctgaagtacgtggaggatgtgacaaacgtggtcagacgggatgtggagaagtggggccccttcgatctggtgtacggcagcacccaacccctgggcagctcttgtgaccggtgccctggctggtacatgtttcagttccaccggatcctgcagtacgccctgccgagacaggagtcccagcggccattcttttggattttcatggacaacttgctgctgaccgaggatgaccaggaaactaccactcggttcctgcagaccgaagccgtgaccctgcaggacgtgagaggccgggactaccagaacgccatgcgggtgtggtccaacatccctggactgaaaagcaagcacgcacctctgacccctaaagaagaggagtacctgcaggcccaggtgcggagcagaagcaagctggacgcccctaaggtggatctgctggtgaagaattgcctcctgcccctgagagagtacttcaagtatttcagccagaatagtctgcccctgggaggcagcggcggcggcgccctggtgacatttgaggacgtcgccgtgcggttcacccaggaggaatgggctctgctggatccttctcagaaaatcctgtaccgggacgtgatgagagagacataccggaatctgacctccgtgggcatcaactgggaatgttgggaccttgaagcctgcttcagaagcctgggaagaaacctgagagtgcaggtggtgaagagaaagtgcgagctgaccaacagcggcccctgcgccgagggcggcccaagcagcggcgcccctcctcccagcggcggcagcccagccggctccccaacctctaccgaggagggcacctctgagtccgccacccccgagagcggccctggcacctccaccgagcccagcgagggcagcgcacccggcagccctgccggcagccccacctccacagaggagggaaccagcaccgagcccagcgaaggcagcgccccaggcaccagcaccgagcctagtgagcaggagattaaacggatcaacaagatcagaagaagacttgtgaaagacagcaacaccaagaaggccggcaagacaggccccatgaaaaccctgctggttagagtgatgacacccgatctgagagagcggctggaaaacctgagaaagaagcctgaaaatatcccccagcccatcagcaatacatctagagccaacctgaataagctgctgaccgattacaccgaaatgaagaaggcgatcctgcatgtgtactgggaagagttccagaaggaccctgtgggcctgatgagccgggtggcccagcctgccagcaagaagatcgatcagaacaagctgaaacctgagatggacgagaagggcaacctgaccaccgccggctttgcctgctctcagtgtggccagcccctgttcgtgtacaagctggagcaggtgtctgagaagggcaaggcttacaccaactacttcggacggtgcaatgtggccgagcacgaaaagctgatcctgctggcccagctgaagcccgagaaggatagcgacgaagccgtgacatatagcctgggaaagtttgggcagagggccctggatttctacagcattcatgtgaccaaggagtccacccaccccgtgaagcccctggcccagatcgccggaaacagatacgcctccggacctgtgggaaaggccctgagcgacgcatgtatgggcacaatcgcctccttcctgtctaagtaccaggacatcatcatcgaacaccagaaggtggtgaagggcaaccagaagagactggagagcctgcgggagctggccggcaaggaaaacctggaataccctagcgtgaccctgccacctcagcctcacaccaaggagggcgttgatgcctacaacgaagtgatcgcccgggtgcgaatgtgggtgaacctgaacctgtggcagaagctgaagctaagcagagatgatgccaagcctctgctgagactgaagggattcccttcctttcctctggtcgagagacaggccaacgaagtggactggtgggacatggtgtgtaacgtgaagaagctgatcaacgagaaaaaggaggatggcaaggtgttttggcagaatctggctggctacaagagacaggaagccctgagaccatacctgagcagcgaggaagatcggaagaagggaaagaaattcgctcggtaccagctgggcgacctgctgctgcacctggaaaagaagcacggcgaggactggggaaaggtgtacgacgaggcctgggagcggattgacaagaaagtggaaggcctgagcaagcacatcaagctggaagaggaacggagaagcgaggacgcccagagcaaggccgccctgaccgactggctgcgggctaaggccagcttcgtgatcgagggcctgaaggaggccgacaaggacgagttctgcagatgcgagctgaagctgcagaagtggtacggggacctgcggggaaagcccttcgccatcgaagccgagaacagcatcctggacatcagcggcttcagcaagcagtacaactgtgccttcatctggcagaaggacggcgtgaagaagctgaacctgtacctgatcatcaactacttcaagggcggcaagctgcggttcaagaagatcaaacctgaagccttcgaagccaacagattctacaccgtgatcaacaaaaagagcggcgagatcgtgcccatggaggtgaacttcaacttcgacgaccccaacctgatcatcctgcctctggcctttggcaagagacagggcagagaattcatctggaacgacctgctgtccctggaaaccggcagcctgaagctggccaacggaagagtgatcgagaagacactgtacaacagaagaacccggcaggatgagcctgccctgttcgtggccctgaccttcgagcggcgggaggtcctggactcctccaatatcaaaccaatgaacctgatcggcgtggcaagaggcgaaaacatccccgccgtgatcgccctgaccgaccccgagggctgcccactgagccggtttaaggatagcctgggaaacccaacccacatcctgagaatcggcgagagctataaggagaagcagcggaccatccaggccaagaaggaggtggagcagcggagagccggcggctacagccggaagtacgccagcaaagccaagaatctggcagacgatatggtgagaaacaccgctagagatctgctgtactacgccgtgacccaggatgccatgctgatcttcgccaacctgagccggggcttcggccggcagggcaagcggaccttcatggccgagagacagtacacacggatggaggactggctgaccgccaagctggcctacgagggcctgagcaagacctacctgtccaagacactggcccagtacacctccaagacatgcagcaactgtgggtttaccatcaccagcgccgactacgacagggtgctggagaagctgaagaagacagcaacaggctggatgaccacaattaacggcaaggagctgaaggtggagggccagattacctactacaacagatacaagagacagaacgtagtcaaggacctgtccgtcgagctggatagactgagcgaagaatctgtgaacaacgacatctcctcctggacaaagggcagaagcggagaagctctgagcctcctgaagaaaagattctcccatagacccgtgcaggagaagttcgtgtgcctgaactgcggcttcgagacacacgcagccgagcaagccgccctgaacatcgccagatcctggctgttcctgcggagccaggagtacaagaaataccagacaaacaagacaaccggcaacaccgataagagagccttcgtcgagacctggcagtccttttaccggaagaagcttaaggaggtgtggaaacctgccgtgcggtctggcggatctggcggaggctccgccagggcccccgtgagcttcgaggaggtggccgtgtacttcagccccgaggagtggcagaccctgcagggctggcagaaggagatgtacaggggcgtgatgagggagaactacgagatcatgctgagcctgggctaccagttcagcaagcccgagatcctgctgatgatggagaggggcgaggagccctgcgtggaggactgccagaggaggatccccgtgaccttcagggagaagcacctgggcggcccaagcagcggcgcccctcctcccagcggcggcagcccagccggctccccaacctctaccgaggagggcacctctgagtccgccacccccgagagcggccctggcacctccaccgagcccagcgagggcagcgcacccggcagccctgccggcagccccacctccacagaggagggaaccagcaccgagcccagcgaaggcagcgccccaggcaccagcaccgagcctagtgagcaggagattaaacggatcaacaagatcagaagaagacttgtgaaagacagcaacaccaagaaggccggcaagacaggccccatgaaaaccctgctggttagagtgatgacacccgatctgagagagcggctggaaaacctgagaaagaagcctgaaaatatcccccagcccatcagcaatacatctagagccaacctgaataagctgctgaccgattacaccgaaatgaagaaggcgatcctgcatgtgtactgggaagagttccagaaggaccctgtgggcctgatgagccgggtggcccagcctgccagcaagaagatcgatcagaacaagctgaaacctgagatggacgagaagggcaacctgaccaccgccggctttgcctgctctcagtgtggccagcccctgttcgtgtacaagctggagcaggtgtctgagaagggcaaggcttacaccaactacttcggacggtgcaatgtggccgagcacgaaaagctgatcctgctggcccagctgaagcccgagaaggatagcgacgaagccgtgacatatagcctgggaaagtttgggcagagggccctggatttctacagcattcatgtgaccaaggagtccacccaccccgtgaagcccctggcccagatcgccggaaacagatacgcctccggacctgtgggaaaggccctgagcgacgcatgtatgggcacaatcgcctccttcctgtctaagtaccaggacatcatcatcgaacaccagaaggtggtgaagggcaaccagaagagactggagagcctgcgggagctggccggcaaggaaaacctggaataccctagcgtgaccctgccacctcagcctcacaccaaggagggcgttgatgcctacaacgaagtgatcgcccgggtgcgaatgtgggtgaacctgaacctgtggcagaagctgaagctaagcagagatgatgccaagcctctgctgagactgaagggattcccttcctttcctctggtcgagagacaggccaacgaagtggactggtgggacatggtgtgtaacgtgaagaagctgatcaacgagaaaaaggaggatggcaaggtgttttggcagaatctggctggctacaagagacaggaagccctgagaccatacctgagcagcgaggaagatcggaagaagggaaagaaattcgctcggtaccagctgggcgacctgctgctgcacctggaaaagaagcacggcgaggactggggaaaggtgtacgacgaggcctgggagcggattgacaagaaagtggaaggcctgagcaagcacatcaagctggaagaggaacggagaagcgaggacgcccagagcaaggccgccctgaccgactggctgcgggctaaggccagcttcgtgatcgagggcctgaaggaggccgacaaggacgagttctgcagatgcgagctgaagctgcagaagtggtacggggacctgcggggaaagcccttcgccatcgaagccgagaacagcatcctggacatcagcggcttcagcaagcagtacaactgtgccttcatctggcagaaggacggcgtgaagaagctgaacctgtacctgatcatcaactacttcaagggcggcaagctgcggttcaagaagatcaaacctgaagccttcgaagccaacagattctacaccgtgatcaacaaaaagagcggcgagatcgtgcccatggaggtgaacttcaacttcgacgaccccaacctgatcatcctgcctctggcctttggcaagagacagggcagagaattcatctggaacgacctgctgtccctggaaaccggcagcctgaagctggccaacggaagagtgatcgagaagacactgtacaacagaagaacccggcaggatgagcctgccctgttcgtggccctgaccttcgagcggcgggaggtcctggactcctccaatatcaaaccaatgaacctgatcggcgtggcaagaggcgaaaacatccccgccgtgatcgccctgaccgaccccgagggctgcccactgagccggtttaaggatagcctgggaaacccaacccacatcctgagaatcggcgagagctataaggagaagcagcggaccatccaggccaagaaggaggtggagcagcggagagccggcggctacagccggaagtacgccagcaaagccaagaatctggcagacgatatggtgagaaacaccgctagagatctgctgtactacgccgtgacccaggatgccatgctgatcttcgccaacctgagccggggcttcggccggcagggcaagcggaccttcatggccgagagacagtacacacggatggaggactggctgaccgccaagctggcctacgagggcctgagcaagacctacctgtccaagacactggcccagtacacctccaagacatgcagcaactgtgggtttaccatcaccagcgccgactacgacagggtgctggagaagctgaagaagacagcaacaggctggatgaccacaattaacggcaaggagctgaaggtggagggccagattacctactacaacagatacaagagacagaacgtagtcaaggacctgtccgtcgagctggatagactgagcgaagaatctgtgaacaacgacatctcctcctggacaaagggcagaagcggagaagctctgagcctcctgaagaaaagattctcccatagacccgtgcaggagaagttcgtgtgcctgaactgcggcttcgagacacacgcagccgagcaagccgccctgaacatcgccagatcctggctgttcctgcggagccaggagtacaagaaataccagacaaacaagacaaccggcaacaccgataagagagccttcgtcgagacctggcagtccttttaccggaagaagcttaaggaggtgtggaaacctgccgtgcggtctggcggatctggcggaggctcctgccagggcccccgtgagcttcgaggaggtggccgtgtacttcagccccgaggagtggcagaccctgcagggctggcagaaggagatgtacaggggcgtgatgagggagaactacgagatcatgctgagcctgggctaccagttcagcaagcccgagatcctgctgatgatggagaggggcgaggagccctgcgtggaggactgccagaggaggatccccgtgaccttcagggagaagcacctgggatctggctccggcagcggccccaagaaaaagagaaaagtctaagctgccttctgcggggcttgccttctggccatgcccttcttctctcccttgcacctgtacctcttggtctttgaataaagcctgagtaggaaggctagcaaaaaaaaaaaaaaaaaaaaaaaaaaaaaaaaaaaaaaaaaaaaaaaaaaaaaaaaaaaaaaaaaaaaaaaaaaaaaaaa

SEQ ID NO: 16134 - RNA, 9485 nt, synthetic construct
  source 1..9485: mol_type = other RNA
aggaaataagagagaaaagaagagtaagaagaaatataagagccaccatggcccctaagaagaagcgtaaagtgagccggatggaacgcctcgtctacgaggtgcggcagaagtgcagaaacatcgaggacatctgcatctcctgcggatctctgaacgtgaccctggagcacccactgttcatcggcggcatgtgccagaactgtaaaaactgttttctggagtgtgcctatcaatacgacgatgacggctaccagagctactgcaccatctgttgcggcggaagagaggtgctgatgtgtggaaataacaactgctgccggtgcttctgcgtggaatgcgtggacctgctggtgggccccggcgccgcccaggccgctattaaggaagatccttggaactgctacatgtgcggccacaagggcacatacggcctgctgagacggagagaggactggcctagcagactgcagatgttcttcgccaataaccacgaccaggagttcgacccccctaaggtgtaccctcccgtccccgccgagaagagaaagcccatccgggtcctgagcctgttcgatggcatcgccaccggtctgctggtgctgaaggacctgggcatccaggtggataggtacattgcctccgaggtgtgcgaggactccatcaccgtgggaatggtgcgtcatcagggcaagatcatgtacgtgggcgacgtgcggagcgtgacacagaagcatatccaggagtggggccctttcgacctggtgatcggcggcagcccttgcaatgacctgagcatcgtgaacccagcccggaagggcctgtacgagggaaccggcagactgttcttcgagttttacagactgctgcacgacgcccggcctaaggaaggcgacgaccggcccttcttttggctgttcgagaatgtggtggccatgggagtcagcgacaagcgggatattagccggttcctggagagcaaccccgtgatgatcgatgccaaggaagtgagcgccgcccaccgggccagatacttctggggcaatctgcctggcatgaacagacccctggccagcaccgtgaacgacaagctggagctgcaggagtgcctggagcacggccggatcgccaagttcagcaaggtgagaaccatcaccacccgaagcaacagcatcaaacaaggcaaggaccagcactttcctgtgttcatgaacgagaaggaggacatcctgtggtgtaccgagatggagagagtgttcgggttcccagtccactacacagatgtcagcaacatgtctagactggccagacagagactgctgggaagaagctggtccgtccctgtgatcagacacctgttcgcccctctgaaggagtacttcgcctgcgtgagcagcggcaacagcaacgccaacagccggggccccagcttctctagcggcctggtgccactgtccctgagagggagccacatgggccccatggagatctacaaaaccgtgagcgcctggaagcggcagcctgtgcgcgtgctgagcctgtttcggaatatcgataaagtcctgaaaagcctgggattcctggagagcggctctggctccggcggtggcaccctgaagtacgtggaggatgtgacaaacgtggtcagacgggatgtggagaagtggggccccttcgatctggtgtacggcagcacccaacccctgggcagctcttgtgaccggtgccctggctggtacatgtttcagttccaccggatcctgcagtacgccctgccgagacaggagtcccagcggccattcttttggattttcatggacaacttgctgctgaccgaggatgaccaggaaactaccactcggttcctgcagaccgaagccgtgaccctgcaggacgtgagaggccgggactaccagaacgccatgcgggtgtggtccaacatccctggactgaaaagcaagcacgcacctctgacccctaaagaagaggagtacctgcaggcccaggtgcggagcagaagcaagctggacgcccctaaggtggatctgctggtgaagaattgcctcctgcccctgagagagtacttcaagtatttcagccagaatagtctgcccctgggaggcagcggcggcggcgccctggtgacatttgaggacgtcgccgtgcggttcacccaggaggaatgggctctgctggatccttctcagaaaatcctgtaccgggacgtgatgagagagacataccggaatctgacctccgtgggcatcaactgggaatgttgggaccttgaagcctgcttcagaagcctgggaagaaacctgagagtgcaggtggtgaagagaaagtgcgagctgaccaacagcggcccctgcgccgagggcggcccaagcagcggcgcccctcctcccagcggcggcagcccagccggctccccaacctctaccgaggagggcacctctgagtccgccacccccgagagcggccctggcacctccaccgagcccagcgagggcagcgcacccggcagccctgccggcagccccacctccacagaggagggaaccagcaccgagcccagcgaaggcagcgccccaggcaccagcaccgagcctagtgagcaggagattaaacggatcaacaagatcagaagaagacttgtgaaagacagcaacaccaagaaggccggcaagacaggccccatgaaaaccctgctggttagagtgatgacacccgatctgagagagcggctggaaaacctgagaaagaagcctgaaaatatcccccagcccatcagcaatacatctagagccaacctgaataagctgctgaccgattacaccgaaatgaagaaggcgatcctgcatgtgtactgggaagagttccagaaggaccctgtgggcctgatgagccgggtggcccagcctgccagcaagaagatcgatcagaacaagctgaaacctgagatggacgagaagggcaacctgaccaccgccggctttgcctgctctcagtgtggccagcccctgttcgtgtacaagctggagcaggtgtctgagaagggcaaggcttacaccaactacttcggacggtgcaatgtggccgagcacgaaaagctgatcctgctggcccagctgaagcccgagaaggatagcgacgaagccgtgacatatagcctgggaaagtttgggcagagggccctggatttctacagcattcatgtgaccaaggagtccacccaccccgtgaagcccctggcccagatcgccggaaacagatacgcctccggacctgtgggaaaggccctgagcgacgcatgtatgggcacaatcgcctccttcctgtctaagtaccaggacatcatcatcgaacaccagaaggtggtgaagggcaaccagaagagactggagagcctgcgggagctggccggcaaggaaaacctggaataccctagcgtgaccctgccacctcagcctcacaccaaggagggcgttgatgcctacaacgaagtgatcgcccgggtgcgaatgtgggtgaacctgaacctgtggcagaagctgaagctaagcagagatgatgccaagcctctgctgagactgaagggattcccttcctttcctctggtcgagagacaggccaacgaagtggactggtgggacatggtgtgtaacgtgaagaagctgatcaacgagaaaaaggaggatggcaaggtgttttggcagaatctggctggctacaagagacaggaagccctgagaccatacctgagcagcgaggaagatcggaagaagggaaagaaattcgctcggtaccagctgggcgacctgctgctgcacctggaaaagaagcacggcgaggactggggaaaggtgtacgacgaggcctgggagcggattgacaagaaagtggaaggcctgagcaagcacatcaagctggaagaggaacggagaagcgaggacgcccagagcaaggccgccctgaccgactggctgcgggctaaggccagcttcgtgatcgagggcctgaaggaggccgacaaggacgagttctgcagatgcgagctgaagctgcagaagtggtacggggacctgcggggaaagcccttcgccatcgaagccgagaacagcatcctggacatcagcggcttcagcaagcagtacaactgtgccttcatctggcagaaggacggcgtgaagaagctgaacctgtacctgatcatcaactacttcaagggcggcaagctgcggttcaagaagatcaaacctgaagccttcgaagccaacagattctacaccgtgatcaacaaaaagagcggcgagatcgtgcccatggaggtgaacttcaacttcgacgaccccaacctgatcatcctgcctctggcctttggcaagagacagggcagagaattcatctggaacgacctgctgtccctggaaaccggcagcctgaagctggccaacggaagagtgatcgagaagacactgtacaacagaagaacccggcaggatgagcctgccctgttcgtggccctgaccttcgagcggcgggaggtcctggactcctccaatatcaaaccaatgaacctgatcggcgtggcaagaggcgaaaacatccccgccgtgatcgccctgaccgaccccgagggctgcccactgagccggtttaaggatagcctgggaaacccaacccacatcctgagaatcggcgagagctataaggagaagcagcggaccatccaggccaagaaggaggtggagcagcggagagccggcggctacagccggaagtacgccagcaaagccaagaatctggcagacgatatggtgagaaacaccgctagagatctgctgtactacgccgtgacccaggatgccatgctgatcttcgccaacctgagccggggcttcggccggcagggcaagcggaccttcatggccgagagacagtacacacggatggaggactggctgaccgccaagctggcctacgagggcctgagcaagacctacctgtccaagacactggcccagtacacctccaagacatgcagcaactgtgggtttaccatcaccagcgccgactacgacagggtgctggagaagctgaagaagacagcaacaggctggatgaccacaattaacggcaaggagctgaaggtggagggccagattacctactacaacagatacaagagacagaacgtagtcaaggacctgtccgtcgagctggatagactgagcgaagaatctgtgaacaacgacatctcctcctggacaaagggcagaagcggagaagctctgagcctcctgaagaaaagattctcccatagacccgtgcaggagaagttcgtgtgcctgaactgcggcttcgagacacacgcagccgagcaagccgccctgaacatcgccagatcctggctgttcctgcggagccaggagtacaagaaataccagacaaacaagacaaccggcaacaccgataagagagccttcgtcgagacctggcagtccttttaccggaagaagcttaaggaggtgtggaaacctgccgtgcggtctggcggatctggcggaggctccatggagaccctgaccttcagggacgtggccatcgagttcagcctggaggagtggcagtgcctggacatcgcccagcaggacctgtacaggaaggtgatgctggagaactacaggaacctggccttcctgggcatcgccctgaccaagcccgacctgatcacctgcctggagcagaggaaggtgccctggaacatgaagaggcacgagatggccgacgagccccccgtgctgtgcagcaacttcggcggcccaagcagcggcgcccctcctcccagcggcggcagcccagccggctccccaacctctaccgaggagggcacctctgagtccgccacccccgagagcggccctggcacctccaccgagcccagcgagggcagcgcacccggcagccctgccggcagccccacctccacagaggagggaaccagcaccgagcccagcgaaggcagcgccccaggcaccagcaccgagcctagtgagcaggagattaaacggatcaacaagatcagaagaagacttgtgaaagacagcaacaccaagaaggccggcaagacaggccccatgaaaaccctgctggttagagtgatgacacccgatctgagagagcggctggaaaacctgagaaagaagcctgaaaatatcccccagcccatcagcaatacatctagagccaacctgaataagctgctgaccgattacaccgaaatgaagaaggcgatcctgcatgtgtactgggaagagttccagaaggaccctgtgggcctgatgagccgggtggcccagcctgccagcaagaagatcgatcagaacaagctgaaacctgagatggacgagaagggcaacctgaccaccgccggctttgcctgctctcagtgtggccagcccctgttcgtgtacaagctggagcaggtgtctgagaagggcaaggcttacaccaactacttcggacggtgcaatgtggccgagcacgaaaagctgatcctgctggcccagctgaagcccgagaaggatagcgacgaagccgtgacatatagcctgggaaagtttgggcagagggccctggatttctacagcattcatgtgaccaaggagtccacccaccccgtgaagcccctggcccagatcgccggaaacagatacgcctccggacctgtgggaaaggccctgagcgacgcatgtatgggcacaatcgcctccttcctgtctaagtaccaggacatcatcatcgaacaccagaaggtggtgaagggcaaccagaagagactggagagcctgcgggagctggccggcaaggaaaacctggaataccctagcgtgaccctgccacctcagcctcacaccaaggagggcgttgatgcctacaacgaagtgatcgcccgggtgcgaatgtgggtgaacctgaacctgtggcagaagctgaagctaagcagagatgatgccaagcctctgctgagactgaagggattcccttcctttcctctggtcgagagacaggccaacgaagtggactggtgggacatggtgtgtaacgtgaagaagctgatcaacgagaaaaaggaggatggcaaggtgttttggcagaatctggctggctacaagagacaggaagccctgagaccatacctgagcagcgaggaagatcggaagaagggaaagaaattcgctcggtaccagctgggcgacctgctgctgcacctggaaaagaagcacggcgaggactggggaaaggtgtacgacgaggcctgggagcggattgacaagaaagtggaaggcctgagcaagcacatcaagctggaagaggaacggagaagcgaggacgcccagagcaaggccgccctgaccgactggctgcgggctaaggccagcttcgtgatcgagggcctgaaggaggccgacaaggacgagttctgcagatgcgagctgaagctgcagaagtggtacggggacctgcggggaaagcccttcgccatcgaagccgagaacagcatcctggacatcagcggcttcagcaagcagtacaactgtgccttcatctggcagaaggacggcgtgaagaagctgaacctgtacctgatcatcaactacttcaagggcggcaagctgcggttcaagaagatcaaacctgaagccttcgaagccaacagattctacaccgtgatcaacaaaaagagcggcgagatcgtgcccatggaggtgaacttcaacttcgacgaccccaacctgatcatcctgcctctggcctttggcaagagacagggcagagaattcatctggaacgacctgctgtccctggaaaccggcagcctgaagctggccaacggaagagtgatcgagaagacactgtacaacagaagaacccggcaggatgagcctgccctgttcgtggccctgaccttcgagcggcgggaggtcctggactcctccaatatcaaaccaatgaacctgatcggcgtggcaagaggcgaaaacatccccgccgtgatcgccctgaccgaccccgagggctgcccactgagccggtttaaggatagcctgggaaacccaacccacatcctgagaatcggcgagagctataaggagaagcagcggaccatccaggccaagaaggaggtggagcagcggagagccggcggctacagccggaagtacgccagcaaagccaagaatctggcagacgatatggtgagaaacaccgctagagatctgctgtactacgccgtgacccaggatgccatgctgatcttcgccaacctgagccggggcttcggccggcagggcaagcggaccttcatggccgagagacagtacacacggatggaggactggctgaccgccaagctggcctacgagggcctgagcaagacctacctgtccaagacactggcccagtacacctccaagacatgcagcaactgtgggtttaccatcaccagcgccgactacgacagggtgctggagaagctgaagaagacagcaacaggctggatgaccacaattaacggcaaggagctgaaggtggagggccagattacctactacaacagatacaagagacagaacgtagtcaaggacctgtccgtcgagctggatagactgagcgaagaatctgtgaacaacgacatctcctcctggacaaagggcagaagcggagaagctctgagcctcctgaagaaaagattctcccatagacccgtgcaggagaagttcgtgtgcctgaactgcggcttcgagacacacgcagccgagcaagccgccctgaacatcgccagatcctggctgttcctgcggagccaggagtacaagaaataccagacaaacaagacaaccggcaacaccgataagagagccttcgtcgagacctggcagtccttttaccggaagaagcttaaggaggtgtggaaacctgccgtgcggtctggcggatctggcggaggctcctatggagaccctgaccttcagggacgtggccatcgagttcagcctggaggagtggcagtgcctggacatcgcccagcaggacctgtacaggaaggtgatgctggagaactacaggaacctggccttcctgggcatcgccctgaccaagcccgacctgatcacctgcctggagcagaggaaggtgccctggaacatgaagaggcacgagatggccgacgagccccccgtgctgtgcagcaacttcggatctggctccggcagcggccccaagaaaaagagaaaagtctaagctgccttctgcggggcttgccttctggccatgcccttcttctctcccttgcacctgtacctcttggtctttgaataaagcctgagtaggaaggctagcaaaaaaaaaaaaaaaaaaaaaaaaaaaaaaaaaaaaaaaaaaaaaaaaaaaaaaaaaaaaaaaaaaaaaaaaaaaaaaaa

SEQ ID NO: 16135 - RNA, 9485 nt, synthetic construct
  source 1..9485: mol_type = other RNA
aggaaataagagagaaaagaagagtaagaagaaatataagagccaccatggcccctaagaagaagcgtaaagtgagccggatggaacgcctcgtctacgaggtgcggcagaagtgcagaaacatcgaggacatctgcatctcctgcggatctctgaacgtgaccctggagcacccactgttcatcggcggcatgtgccagaactgtaaaaactgttttctggagtgtgcctatcaatacgacgatgacggctaccagagctactgcaccatctgttgcggcggaagagaggtgctgatgtgtggaaataacaactgctgccggtgcttctgcgtggaatgcgtggacctgctggtgggccccggcgccgcccaggccgctattaaggaagatccttggaactgctacatgtgcggccacaagggcacatacggcctgctgagacggagagaggactggcctagcagactgcagatgttcttcgccaataaccacgaccaggagttcgacccccctaaggtgtaccctcccgtccccgccgagaagagaaagcccatccgggtcctgagcctgttcgatggcatcgccaccggtctgctggtgctgaaggacctgggcatccaggtggataggtacattgcctccgaggtgtgcgaggactccatcaccgtgggaatggtgcgtcatcagggcaagatcatgtacgtgggcgacgtgcggagcgtgacacagaagcatatccaggagtggggccctttcgacctggtgatcggcggcagcccttgcaatgacctgagcatcgtgaacccagcccggaagggcctgtacgagggaaccggcagactgttcttcgagttttacagactgctgcacgacgcccggcctaaggaaggcgacgaccggcccttcttttggctgttcgagaatgtggtggccatgggagtcagcgacaagcgggatattagccggttcctggagagcaaccccgtgatgatcgatgccaaggaagtgagcgccgcccaccgggccagatacttctggggcaatctgcctggcatgaacagacccctggccagcaccgtgaacgacaagctggagctgcaggagtgcctggagcacggccggatcgccaagttcagcaaggtgagaaccatcaccacccgaagcaacagcatcaaacaaggcaaggaccagcactttcctgtgttcatgaacgagaaggaggacatcctgtggtgtaccgagatggagagagtgttcgggttcccagtccactacacagatgtcagcaacatgtctagactggccagacagagactgctgggaagaagctggtccgtccctgtgatcagacacctgttcgcccctctgaaggagtacttcgcctgcgtgagcagcggcaacagcaacgccaacagccggggccccagcttctctagcggcctggtgccactgtccctgagagggagccacatgggccccatggagatctacaaaaccgtgagcgcctggaagcggcagcctgtgcgcgtgctgagcctgtttcggaatatcgataaagtcctgaaaagcctgggattcctggagagcggctctggctccggcggtggcaccctgaagtacgtggaggatgtgacaaacgtggtcagacgggatgtggagaagtggggccccttcgatctggtgtacggcagcacccaacccctgggcagctcttgtgaccggtgccctggctggtacatgtttcagttccaccggatcctgcagtacgccctgccgagacaggagtcccagcggccattcttttggattttcatggacaacttgctgctgaccgaggatgaccaggaaactaccactcggttcctgcagaccgaagccgtgaccctgcaggacgtgagaggccgggactaccagaacgccatgcgggtgtggtccaacatccctggactgaaaagcaagcacgcacctctgacccctaaagaagaggagtacctgcaggcccaggtgcggagcagaagcaagctggacgcccctaaggtggatctgctggtgaagaattgcctcctgcccctgagagagtacttcaagtatttcagccagaatagtctgcccctgggaggcagcggcggcggcgccctggtgacatttgaggacgtcgccgtgcggttcacccaggaggaatgggctctgctggatccttctcagaaaatcctgtaccgggacgtgatgagagagacataccggaatctgacctccgtgggcatcaactgggaatgttgggaccttgaagcctgcttcagaagcctgggaagaaacctgagagtgcaggtggtgaagagaaagtgcgagctgaccaacagcggcccctgcgccgagggcggcccaagcagcggcgcccctcctcccagcggcggcagcccagccggctccccaacctctaccgaggagggcacctctgagtccgccacccccgagagcggccctggcacctccaccgagcccagcgagggcagcgcacccggcagccctgccggcagccccacctccacagaggagggaaccagcaccgagcccagcgaaggcagcgccccaggcaccagcaccgagcctagtgagcaggagattaaacggatcaacaagatcagaagaagacttgtgaaagacagcaacaccaagaaggccggcaagacaggccccatgaaaaccctgctggttagagtgatgacacccgatctgagagagcggctggaaaacctgagaaagaagcctgaaaatatcccccagcccatcagcaatacatctagagccaacctgaataagctgctgaccgattacaccgaaatgaagaaggcgatcctgcatgtgtactgggaagagttccagaaggaccctgtgggcctgatgagccgggtggcccagcctgccagcaagaagatcgatcagaacaagctgaaacctgagatggacgagaagggcaacctgaccaccgccggctttgcctgctctcagtgtggccagcccctgttcgtgtacaagctggagcaggtgtctgagaagggcaaggcttacaccaactacttcggacggtgcaatgtggccgagcacgaaaagctgatcctgctggcccagctgaagcccgagaaggatagcgacgaagccgtgacatatagcctgggaaagtttgggcagagggccctggatttctacagcattcatgtgaccaaggagtccacccaccccgtgaagcccctggcccagatcgccggaaacagatacgcctccggacctgtgggaaaggccctgagcgacgcatgtatgggcacaatcgcctccttcctgtctaagtaccaggacatcatcatcgaacaccagaaggtggtgaagggcaaccagaagagactggagagcctgcgggagctggccggcaaggaaaacctggaataccctagcgtgaccctgccacctcagcctcacaccaaggagggcgttgatgcctacaacgaagtgatcgcccgggtgcgaatgtgggtgaacctgaacctgtggcagaagctgaagctaagcagagatgatgccaagcctctgctgagactgaagggattcccttcctttcctctggtcgagagacaggccaacgaagtggactggtgggacatggtgtgtaacgtgaagaagctgatcaacgagaaaaaggaggatggcaaggtgttttggcagaatctggctggctacaagagacaggaagccctgagaccatacctgagcagcgaggaagatcggaagaagggaaagaaattcgctcggtaccagctgggcgacctgctgctgcacctggaaaagaagcacggcgaggactggggaaaggtgtacgacgaggcctgggagcggattgacaagaaagtggaaggcctgagcaagcacatcaagctggaagaggaacggagaagcgaggacgcccagagcaaggccgccctgaccgactggctgcgggctaaggccagcttcgtgatcgagggcctgaaggaggccgacaaggacgagttctgcagatgcgagctgaagctgcagaagtggtacggggacctgcggggaaagcccttcgccatcgaagccgagaacagcatcctggacatcagcggcttcagcaagcagtacaactgtgccttcatctggcagaaggacggcgtgaagaagctgaacctgtacctgatcatcaactacttcaagggcggcaagctgcggttcaagaagatcaaacctgaagccttcgaagccaacagattctacaccgtgatcaacaaaaagagcggcgagatcgtgcccatggaggtgaacttcaacttcgacgaccccaacctgatcatcctgcctctggcctttggcaagagacagggcagagaattcatctggaacgacctgctgtccctggaaaccggcagcctgaagctggccaacggaagagtgatcgagaagacactgtacaacagaagaacccggcaggatgagcctgccctgttcgtggccctgaccttcgagcggcgggaggtcctggactcctccaatatcaaaccaatgaacctgatcggcgtggcaagaggcgaaaacatccccgccgtgatcgccctgaccgaccccgagggctgcccactgagccggtttaaggatagcctgggaaacccaacccacatcctgagaatcggcgagagctataaggagaagcagcggaccatccaggccaagaaggaggtggagcagcggagagccggcggctacagccggaagtacgccagcaaagccaagaatctggcagacgatatggtgagaaacaccgctagagatctgctgtactacgccgtgacccaggatgccatgctgatcttcgccaacctgagccggggcttcggccggcagggcaagcggaccttcatggccgagagacagtacacacggatggaggactggctgaccgccaagctggcctacgagggcctgagcaagacctacctgtccaagacactggcccagtacacctccaagacatgcagcaactgtgggtttaccatcaccagcgccgactacgacagggtgctggagaagctgaagaagacagcaacaggctggatgaccacaattaacggcaaggagctgaaggtggagggccagattacctactacaacagatacaagagacagaacgtagtcaaggacctgtccgtcgagctggatagactgagcgaagaatctgtgaacaacgacatctcctcctggacaaagggcagaagcggagaagctctgagcctcctgaagaaaagattctcccatagacccgtgcaggagaagttcgtgtgcctgaactgcggcttcgagacacacgcagccgagcaagccgccctgaacatcgccagatcctggctgttcctgcggagccaggagtacaagaaataccagacaaacaagacaaccggcaacaccgataagagagccttcgtcgagacctggcagtccttttaccggaagaagcttaaggaggtgtggaaacctgccgtgcggtctggcggatctggcggaggctccgaggagctgcccgtggtgttcgaggacgtggccgtgtacttcaccagggaggagtggggcgtgctggacaagaggcagaaggagctgtacagggacgtgatgaggatgaactacgagctgctggccagcctgggccccgccgccgccaagcccgacctgatcagcaagctggagaggagggccgccccctggatcaaggaccccaacggccccaagtggggcaagggcagggtgcccgcctgcggcggcccaagcagcggcgcccctcctcccagcggcggcagcccagccggctccccaacctctaccgaggagggcacctctgagtccgccacccccgagagcggccctggcacctccaccgagcccagcgagggcagcgcacccggcagccctgccggcagccccacctccacagaggagggaaccagcaccgagcccagcgaaggcagcgccccaggcaccagcaccgagcctagtgagcaggagattaaacggatcaacaagatcagaagaagacttgtgaaagacagcaacaccaagaaggccggcaagacaggccccatgaaaaccctgctggttagagtgatgacacccgatctgagagagcggctggaaaacctgagaaagaagcctgaaaatatcccccagcccatcagcaatacatctagagccaacctgaataagctgctgaccgattacaccgaaatgaagaaggcgatcctgcatgtgtactgggaagagttccagaaggaccctgtgggcctgatgagccgggtggcccagcctgccagcaagaagatcgatcagaacaagctgaaacctgagatggacgagaagggcaacctgaccaccgccggctttgcctgctctcagtgtggccagcccctgttcgtgtacaagctggagcaggtgtctgagaagggcaaggcttacaccaactacttcggacggtgcaatgtggccgagcacgaaaagctgatcctgctggcccagctgaagcccgagaaggatagcgacgaagccgtgacatatagcctgggaaagtttgggcagagggccctggatttctacagcattcatgtgaccaaggagtccacccaccccgtgaagcccctggcccagatcgccggaaacagatacgcctccggacctgtgggaaaggccctgagcgacgcatgtatgggcacaatcgcctccttcctgtctaagtaccaggacatcatcatcgaacaccagaaggtggtgaagggcaaccagaagagactggagagcctgcgggagctggccggcaaggaaaacctggaataccctagcgtgaccctgccacctcagcctcacaccaaggagggcgttgatgcctacaacgaagtgatcgcccgggtgcgaatgtgggtgaacctgaacctgtggcagaagctgaagctaagcagagatgatgccaagcctctgctgagactgaagggattcccttcctttcctctggtcgagagacaggccaacgaagtggactggtgggacatggtgtgtaacgtgaagaagctgatcaacgagaaaaaggaggatggcaaggtgttttggcagaatctggctggctacaagagacaggaagccctgagaccatacctgagcagcgaggaagatcggaagaagggaaagaaattcgctcggtaccagctgggcgacctgctgctgcacctggaaaagaagcacggcgaggactggggaaaggtgtacgacgaggcctgggagcggattgacaagaaagtggaaggcctgagcaagcacatcaagctggaagaggaacggagaagcgaggacgcccagagcaaggccgccctgaccgactggctgcgggctaaggccagcttcgtgatcgagggcctgaaggaggccgacaaggacgagttctgcagatgcgagctgaagctgcagaagtggtacggggacctgcggggaaagcccttcgccatcgaagccgagaacagcatcctggacatcagcggcttcagcaagcagtacaactgtgccttcatctggcagaaggacggcgtgaagaagctgaacctgtacctgatcatcaactacttcaagggcggcaagctgcggttcaagaagatcaaacctgaagccttcgaagccaacagattctacaccgtgatcaacaaaaagagcggcgagatcgtgcccatggaggtgaacttcaacttcgacgaccccaacctgatcatcctgcctctggcctttggcaagagacagggcagagaattcatctggaacgacctgctgtccctggaaaccggcagcctgaagctggccaacggaagagtgatcgagaagacactgtacaacagaagaacccggcaggatgagcctgccctgttcgtggccctgaccttcgagcggcgggaggtcctggactcctccaatatcaaaccaatgaacctgatcggcgtggcaagaggcgaaaacatccccgccgtgatcgccctgaccgaccccgagggctgcccactgagccggtttaaggatagcctgggaaacccaacccacatcctgagaatcggcgagagctataaggagaagcagcggaccatccaggccaagaaggaggtggagcagcggagagccggcggctacagccggaagtacgccagcaaagccaagaatctggcagacgatatggtgagaaacaccgctagagatctgctgtactacgccgtgacccaggatgccatgctgatcttcgccaacctgagccggggcttcggccggcagggcaagcggaccttcatggccgagagacagtacacacggatggaggactggctgaccgccaagctggcctacgagggcctgagcaagacctacctgtccaagacactggcccagtacacctccaagacatgcagcaactgtgggtttaccatcaccagcgccgactacgacagggtgctggagaagctgaagaagacagcaacaggctggatgaccacaattaacggcaaggagctgaaggtggagggccagattacctactacaacagatacaagagacagaacgtagtcaaggacctgtccgtcgagctggatagactgagcgaagaatctgtgaacaacgacatctcctcctggacaaagggcagaagcggagaagctctgagcctcctgaagaaaagattctcccatagacccgtgcaggagaagttcgtgtgcctgaactgcggcttcgagacacacgcagccgagcaagccgccctgaacatcgccagatcctggctgttcctgcggagccaggagtacaagaaataccagacaaacaagacaaccggcaacaccgataagagagccttcgtcgagacctggcagtccttttaccggaagaagcttaaggaggtgtggaaacctgccgtgcggtctggcggatctggcggaggctcctgaggagctgcccgtggtgttcgaggacgtggccgtgtacttcaccagggaggagtggggcgtgctggacaagaggcagaaggagctgtacagggacgtgatgaggatgaactacgagctgctggccagcctgggccccgccgccgccaagcccgacctgatcagcaagctggagaggagggccgccccctggatcaaggaccccaacggccccaagtggggcaagggcagggtgcccgcctgcggatctggctccggcagcggccccaagaaaaagagaaaagtctaagctgccttctgcggggcttgccttctggccatgcccttcttctctcccttgcacctgtacctcttggtctttgaataaagcctgagtaggaaggctagcaaaaaaaaaaaaaaaaaaaaaaaaaaaaaaaaaaaaaaaaaaaaaaaaaaaaaaaaaaaaaaaaaaaaaaaaaaaaaaaa

SEQ ID NO: 16136 - RNA, 9485 nt, synthetic construct
  source 1..9485: mol_type = other RNA
aggaaataagagagaaaagaagagtaagaagaaatataagagccaccatggcccctaagaagaagcgtaaagtgagccggatggaacgcctcgtctacgaggtgcggcagaagtgcagaaacatcgaggacatctgcatctcctgcggatctctgaacgtgaccctggagcacccactgttcatcggcggcatgtgccagaactgtaaaaactgttttctggagtgtgcctatcaatacgacgatgacggctaccagagctactgcaccatctgttgcggcggaagagaggtgctgatgtgtggaaataacaactgctgccggtgcttctgcgtggaatgcgtggacctgctggtgggccccggcgccgcccaggccgctattaaggaagatccttggaactgctacatgtgcggccacaagggcacatacggcctgctgagacggagagaggactggcctagcagactgcagatgttcttcgccaataaccacgaccaggagttcgacccccctaaggtgtaccctcccgtccccgccgagaagagaaagcccatccgggtcctgagcctgttcgatggcatcgccaccggtctgctggtgctgaaggacctgggcatccaggtggataggtacattgcctccgaggtgtgcgaggactccatcaccgtgggaatggtgcgtcatcagggcaagatcatgtacgtgggcgacgtgcggagcgtgacacagaagcatatccaggagtggggccctttcgacctggtgatcggcggcagcccttgcaatgacctgagcatcgtgaacccagcccggaagggcctgtacgagggaaccggcagactgttcttcgagttttacagactgctgcacgacgcccggcctaaggaaggcgacgaccggcccttcttttggctgttcgagaatgtggtggccatgggagtcagcgacaagcgggatattagccggttcctggagagcaaccccgtgatgatcgatgccaaggaagtgagcgccgcccaccgggccagatacttctggggcaatctgcctggcatgaacagacccctggccagcaccgtgaacgacaagctggagctgcaggagtgcctggagcacggccggatcgccaagttcagcaaggtgagaaccatcaccacccgaagcaacagcatcaaacaaggcaaggaccagcactttcctgtgttcatgaacgagaaggaggacatcctgtggtgtaccgagatggagagagtgttcgggttcccagtccactacacagatgtcagcaacatgtctagactggccagacagagactgctgggaagaagctggtccgtccctgtgatcagacacctgttcgcccctctgaaggagtacttcgcctgcgtgagcagcggcaacagcaacgccaacagccggggccccagcttctctagcggcctggtgccactgtccctgagagggagccacatgggccccatggagatctacaaaaccgtgagcgcctggaagcggcagcctgtgcgcgtgctgagcctgtttcggaatatcgataaagtcctgaaaagcctgggattcctggagagcggctctggctccggcggtggcaccctgaagtacgtggaggatgtgacaaacgtggtcagacgggatgtggagaagtggggccccttcgatctggtgtacggcagcacccaacccctgggcagctcttgtgaccggtgccctggctggtacatgtttcagttccaccggatcctgcagtacgccctgccgagacaggagtcccagcggccattcttttggattttcatggacaacttgctgctgaccgaggatgaccaggaaactaccactcggttcctgcagaccgaagccgtgaccctgcaggacgtgagaggccgggactaccagaacgccatgcgggtgtggtccaacatccctggactgaaaagcaagcacgcacctctgacccctaaagaagaggagtacctgcaggcccaggtgcggagcagaagcaagctggacgcccctaaggtggatctgctggtgaagaattgcctcctgcccctgagagagtacttcaagtatttcagccagaatagtctgcccctgggaggcagcggcggcggcgccctggtgacatttgaggacgtcgccgtgcggttcacccaggaggaatgggctctgctggatccttctcagaaaatcctgtaccgggacgtgatgagagagacataccggaatctgacctccgtgggcatcaactgggaatgttgggaccttgaagcctgcttcagaagcctgggaagaaacctgagagtgcaggtggtgaagagaaagtgcgagctgaccaacagcggcccctgcgccgagggcggcccaagcagcggcgcccctcctcccagcggcggcagcccagccggctccccaacctctaccgaggagggcacctctgagtccgccacccccgagagcggccctggcacctccaccgagcccagcgagggcagcgcacccggcagccctgccggcagccccacctccacagaggagggaaccagcaccgagcccagcgaaggcagcgccccaggcaccagcaccgagcctagtgagcaggagattaaacggatcaacaagatcagaagaagacttgtgaaagacagcaacaccaagaaggccggcaagacaggccccatgaaaaccctgctggttagagtgatgacacccgatctgagagagcggctggaaaacctgagaaagaagcctgaaaatatcccccagcccatcagcaatacatctagagccaacctgaataagctgctgaccgattacaccgaaatgaagaaggcgatcctgcatgtgtactgggaagagttccagaaggaccctgtgggcctgatgagccgggtggcccagcctgccagcaagaagatcgatcagaacaagctgaaacctgagatggacgagaagggcaacctgaccaccgccggctttgcctgctctcagtgtggccagcccctgttcgtgtacaagctggagcaggtgtctgagaagggcaaggcttacaccaactacttcggacggtgcaatgtggccgagcacgaaaagctgatcctgctggcccagctgaagcccgagaaggatagcgacgaagccgtgacatatagcctgggaaagtttgggcagagggccctggatttctacagcattcatgtgaccaaggagtccacccaccccgtgaagcccctggcccagatcgccggaaacagatacgcctccggacctgtgggaaaggccctgagcgacgcatgtatgggcacaatcgcctccttcctgtctaagtaccaggacatcatcatcgaacaccagaaggtggtgaagggcaaccagaagagactggagagcctgcgggagctggccggcaaggaaaacctggaataccctagcgtgaccctgccacctcagcctcacaccaaggagggcgttgatgcctacaacgaagtgatcgcccgggtgcgaatgtgggtgaacctgaacctgtggcagaagctgaagctaagcagagatgatgccaagcctctgctgagactgaagggattcccttcctttcctctggtcgagagacaggccaacgaagtggactggtgggacatggtgtgtaacgtgaagaagctgatcaacgagaaaaaggaggatggcaaggtgttttggcagaatctggctggctacaagagacaggaagccctgagaccatacctgagcagcgaggaagatcggaagaagggaaagaaattcgctcggtaccagctgggcgacctgctgctgcacctggaaaagaagcacggcgaggactggggaaaggtgtacgacgaggcctgggagcggattgacaagaaagtggaaggcctgagcaagcacatcaagctggaagaggaacggagaagcgaggacgcccagagcaaggccgccctgaccgactggctgcgggctaaggccagcttcgtgatcgagggcctgaaggaggccgacaaggacgagttctgcagatgcgagctgaagctgcagaagtggtacggggacctgcggggaaagcccttcgccatcgaagccgagaacagcatcctggacatcagcggcttcagcaagcagtacaactgtgccttcatctggcagaaggacggcgtgaagaagctgaacctgtacctgatcatcaactacttcaagggcggcaagctgcggttcaagaagatcaaacctgaagccttcgaagccaacagattctacaccgtgatcaacaaaaagagcggcgagatcgtgcccatggaggtgaacttcaacttcgacgaccccaacctgatcatcctgcctctggcctttggcaagagacagggcagagaattcatctggaacgacctgctgtccctggaaaccggcagcctgaagctggccaacggaagagtgatcgagaagacactgtacaacagaagaacccggcaggatgagcctgccctgttcgtggccctgaccttcgagcggcgggaggtcctggactcctccaatatcaaaccaatgaacctgatcggcgtggcaagaggcgaaaacatccccgccgtgatcgccctgaccgaccccgagggctgcccactgagccggtttaaggatagcctgggaaacccaacccacatcctgagaatcggcgagagctataaggagaagcagcggaccatccaggccaagaaggaggtggagcagcggagagccggcggctacagccggaagtacgccagcaaagccaagaatctggcagacgatatggtgagaaacaccgctagagatctgctgtactacgccgtgacccaggatgccatgctgatcttcgccaacctgagccggggcttcggccggcagggcaagcggaccttcatggccgagagacagtacacacggatggaggactggctgaccgccaagctggcctacgagggcctgagcaagacctacctgtccaagacactggcccagtacacctccaagacatgcagcaactgtgggtttaccatcaccagcgccgactacgacagggtgctggagaagctgaagaagacagcaacaggctggatgaccacaattaacggcaaggagctgaaggtggagggccagattacctactacaacagatacaagagacagaacgtagtcaaggacctgtccgtcgagctggatagactgagcgaagaatctgtgaacaacgacatctcctcctggacaaagggcagaagcggagaagctctgagcctcctgaagaaaagattctcccatagacccgtgcaggagaagttcgtgtgcctgaactgcggcttcgagacacacgcagccgagcaagccgccctgaacatcgccagatcctggctgttcctgcggagccaggagtacaagaaataccagacaaacaagacaaccggcaacaccgataagagagccttcgtcgagacctggcagtccttttaccggaagaagcttaaggaggtgtggaaacctgccgtgcggtctggcggatctggcggaggctccagccaggacctggtgaccttcaaggacgtggccatcgacttcagccaggaggagtggcagtggatgaaccccgcccagaagaggctgtacaggagcatgatgctggagaactaccagagcctggtgagcctgggcctgtgcgtgagcaagccctacgtgatcagcctgctggagcagggcagggagccctgggagatgaccagcgagatgaccaggagccccttcagcgactgggagagcatcggcggcccaagcagcggcgcccctcctcccagcggcggcagcccagccggctccccaacctctaccgaggagggcacctctgagtccgccacccccgagagcggccctggcacctccaccgagcccagcgagggcagcgcacccggcagccctgccggcagccccacctccacagaggagggaaccagcaccgagcccagcgaaggcagcgccccaggcaccagcaccgagcctagtgagcaggagattaaacggatcaacaagatcagaagaagacttgtgaaagacagcaacaccaagaaggccggcaagacaggccccatgaaaaccctgctggttagagtgatgacacccgatctgagagagcggctggaaaacctgagaaagaagcctgaaaatatcccccagcccatcagcaatacatctagagccaacctgaataagctgctgaccgattacaccgaaatgaagaaggcgatcctgcatgtgtactgggaagagttccagaaggaccctgtgggcctgatgagccgggtggcccagcctgccagcaagaagatcgatcagaacaagctgaaacctgagatggacgagaagggcaacctgaccaccgccggctttgcctgctctcagtgtggccagcccctgttcgtgtacaagctggagcaggtgtctgagaagggcaaggcttacaccaactacttcggacggtgcaatgtggccgagcacgaaaagctgatcctgctggcccagctgaagcccgagaaggatagcgacgaagccgtgacatatagcctgggaaagtttgggcagagggccctggatttctacagcattcatgtgaccaaggagtccacccaccccgtgaagcccctggcccagatcgccggaaacagatacgcctccggacctgtgggaaaggccctgagcgacgcatgtatgggcacaatcgcctccttcctgtctaagtaccaggacatcatcatcgaacaccagaaggtggtgaagggcaaccagaagagactggagagcctgcgggagctggccggcaaggaaaacctggaataccctagcgtgaccctgccacctcagcctcacaccaaggagggcgttgatgcctacaacgaagtgatcgcccgggtgcgaatgtgggtgaacctgaacctgtggcagaagctgaagctaagcagagatgatgccaagcctctgctgagactgaagggattcccttcctttcctctggtcgagagacaggccaacgaagtggactggtgggacatggtgtgtaacgtgaagaagctgatcaacgagaaaaaggaggatggcaaggtgttttggcagaatctggctggctacaagagacaggaagccctgagaccatacctgagcagcgaggaagatcggaagaagggaaagaaattcgctcggtaccagctgggcgacctgctgctgcacctggaaaagaagcacggcgaggactggggaaaggtgtacgacgaggcctgggagcggattgacaagaaagtggaaggcctgagcaagcacatcaagctggaagaggaacggagaagcgaggacgcccagagcaaggccgccctgaccgactggctgcgggctaaggccagcttcgtgatcgagggcctgaaggaggccgacaaggacgagttctgcagatgcgagctgaagctgcagaagtggtacggggacctgcggggaaagcccttcgccatcgaagccgagaacagcatcctggacatcagcggcttcagcaagcagtacaactgtgccttcatctggcagaaggacggcgtgaagaagctgaacctgtacctgatcatcaactacttcaagggcggcaagctgcggttcaagaagatcaaacctgaagccttcgaagccaacagattctacaccgtgatcaacaaaaagagcggcgagatcgtgcccatggaggtgaacttcaacttcgacgaccccaacctgatcatcctgcctctggcctttggcaagagacagggcagagaattcatctggaacgacctgctgtccctggaaaccggcagcctgaagctggccaacggaagagtgatcgagaagacactgtacaacagaagaacccggcaggatgagcctgccctgttcgtggccctgaccttcgagcggcgggaggtcctggactcctccaatatcaaaccaatgaacctgatcggcgtggcaagaggcgaaaacatccccgccgtgatcgccctgaccgaccccgagggctgcccactgagccggtttaaggatagcctgggaaacccaacccacatcctgagaatcggcgagagctataaggagaagcagcggaccatccaggccaagaaggaggtggagcagcggagagccggcggctacagccggaagtacgccagcaaagccaagaatctggcagacgatatggtgagaaacaccgctagagatctgctgtactacgccgtgacccaggatgccatgctgatcttcgccaacctgagccggggcttcggccggcagggcaagcggaccttcatggccgagagacagtacacacggatggaggactggctgaccgccaagctggcctacgagggcctgagcaagacctacctgtccaagacactggcccagtacacctccaagacatgcagcaactgtgggtttaccatcaccagcgccgactacgacagggtgctggagaagctgaagaagacagcaacaggctggatgaccacaattaacggcaaggagctgaaggtggagggccagattacctactacaacagatacaagagacagaacgtagtcaaggacctgtccgtcgagctggatagactgagcgaagaatctgtgaacaacgacatctcctcctggacaaagggcagaagcggagaagctctgagcctcctgaagaaaagattctcccatagacccgtgcaggagaagttcgtgtgcctgaactgcggcttcgagacacacgcagccgagcaagccgccctgaacatcgccagatcctggctgttcctgcggagccaggagtacaagaaataccagacaaacaagacaaccggcaacaccgataagagagccttcgtcgagacctggcagtccttttaccggaagaagcttaaggaggtgtggaaacctgccgtgcggtctggcggatctggcggaggctcctagccaggacctggtgaccttcaaggacgtggccatcgacttcagccaggaggagtggcagtggatgaaccccgcccagaagaggctgtacaggagcatgatgctggagaactaccagagcctggtgagcctgggcctgtgcgtgagcaagccctacgtgatcagcctgctggagcagggcagggagccctgggagatgaccagcgagatgaccaggagccccttcagcgactgggagagcatcggatctggctccggcagcggccccaagaaaaagagaaaagtctaagctgccttctgcggggcttgccttctggccatgcccttcttctctcccttgcacctgtacctcttggtctttgaataaagcctgagtaggaaggctagcaaaaaaaaaaaaaaaaaaaaaaaaaaaaaaaaaaaaaaaaaaaaaaaaaaaaaaaaaaaaaaaaaaaaaaaaaaaaaaaa

SEQ ID NO: 16137 - RNA, 9485 nt, synthetic construct
  source 1..9485: mol_type = other RNA
aggaaataagagagaaaagaagagtaagaagaaatataagagccaccatggcccctaagaagaagcgtaaagtgagccggatggaacgcctcgtctacgaggtgcggcagaagtgcagaaacatcgaggacatctgcatctcctgcggatctctgaacgtgaccctggagcacccactgttcatcggcggcatgtgccagaactgtaaaaactgttttctggagtgtgcctatcaatacgacgatgacggctaccagagctactgcaccatctgttgcggcggaagagaggtgctgatgtgtggaaataacaactgctgccggtgcttctgcgtggaatgcgtggacctgctggtgggccccggcgccgcccaggccgctattaaggaagatccttggaactgctacatgtgcggccacaagggcacatacggcctgctgagacggagagaggactggcctagcagactgcagatgttcttcgccaataaccacgaccaggagttcgacccccctaaggtgtaccctcccgtccccgccgagaagagaaagcccatccgggtcctgagcctgttcgatggcatcgccaccggtctgctggtgctgaaggacctgggcatccaggtggataggtacattgcctccgaggtgtgcgaggactccatcaccgtgggaatggtgcgtcatcagggcaagatcatgtacgtgggcgacgtgcggagcgtgacacagaagcatatccaggagtggggccctttcgacctggtgatcggcggcagcccttgcaatgacctgagcatcgtgaacccagcccggaagggcctgtacgagggaaccggcagactgttcttcgagttttacagactgctgcacgacgcccggcctaaggaaggcgacgaccggcccttcttttggctgttcgagaatgtggtggccatgggagtcagcgacaagcgggatattagccggttcctggagagcaaccccgtgatgatcgatgccaaggaagtgagcgccgcccaccgggccagatacttctggggcaatctgcctggcatgaacagacccctggccagcaccgtgaacgacaagctggagctgcaggagtgcctggagcacggccggatcgccaagttcagcaaggtgagaaccatcaccacccgaagcaacagcatcaaacaaggcaaggaccagcactttcctgtgttcatgaacgagaaggaggacatcctgtggtgtaccgagatggagagagtgttcgggttcccagtccactacacagatgtcagcaacatgtctagactggccagacagagactgctgggaagaagctggtccgtccctgtgatcagacacctgttcgcccctctgaaggagtacttcgcctgcgtgagcagcggcaacagcaacgccaacagccggggccccagcttctctagcggcctggtgccactgtccctgagagggagccacatgggccccatggagatctacaaaaccgtgagcgcctggaagcggcagcctgtgcgcgtgctgagcctgtttcggaatatcgataaagtcctgaaaagcctgggattcctggagagcggctctggctccggcggtggcaccctgaagtacgtggaggatgtgacaaacgtggtcagacgggatgtggagaagtggggccccttcgatctggtgtacggcagcacccaacccctgggcagctcttgtgaccggtgccctggctggtacatgtttcagttccaccggatcctgcagtacgccctgccgagacaggagtcccagcggccattcttttggattttcatggacaacttgctgctgaccgaggatgaccaggaaactaccactcggttcctgcagaccgaagccgtgaccctgcaggacgtgagaggccgggactaccagaacgccatgcgggtgtggtccaacatccctggactgaaaagcaagcacgcacctctgacccctaaagaagaggagtacctgcaggcccaggtgcggagcagaagcaagctggacgcccctaaggtggatctgctggtgaagaattgcctcctgcccctgagagagtacttcaagtatttcagccagaatagtctgcccctgggaggcagcggcggcggcgccctggtgacatttgaggacgtcgccgtgcggttcacccaggaggaatgggctctgctggatccttctcagaaaatcctgtaccgggacgtgatgagagagacataccggaatctgacctccgtgggcatcaactgggaatgttgggaccttgaagcctgcttcagaagcctgggaagaaacctgagagtgcaggtggtgaagagaaagtgcgagctgaccaacagcggcccctgcgccgagggcggcccaagcagcggcgcccctcctcccagcggcggcagcccagccggctccccaacctctaccgaggagggcacctctgagtccgccacccccgagagcggccctggcacctccaccgagcccagcgagggcagcgcacccggcagccctgccggcagccccacctccacagaggagggaaccagcaccgagcccagcgaaggcagcgccccaggcaccagcaccgagcctagtgagcaggagattaaacggatcaacaagatcagaagaagacttgtgaaagacagcaacaccaagaaggccggcaagacaggccccatgaaaaccctgctggttagagtgatgacacccgatctgagagagcggctggaaaacctgagaaagaagcctgaaaatatcccccagcccatcagcaatacatctagagccaacctgaataagctgctgaccgattacaccgaaatgaagaaggcgatcctgcatgtgtactgggaagagttccagaaggaccctgtgggcctgatgagccgggtggcccagcctgccagcaagaagatcgatcagaacaagctgaaacctgagatggacgagaagggcaacctgaccaccgccggctttgcctgctctcagtgtggccagcccctgttcgtgtacaagctggagcaggtgtctgagaagggcaaggcttacaccaactacttcggacggtgcaatgtggccgagcacgaaaagctgatcctgctggcccagctgaagcccgagaaggatagcgacgaagccgtgacatatagcctgggaaagtttgggcagagggccctggatttctacagcattcatgtgaccaaggagtccacccaccccgtgaagcccctggcccagatcgccggaaacagatacgcctccggacctgtgggaaaggccctgagcgacgcatgtatgggcacaatcgcctccttcctgtctaagtaccaggacatcatcatcgaacaccagaaggtggtgaagggcaaccagaagagactggagagcctgcgggagctggccggcaaggaaaacctggaataccctagcgtgaccctgccacctcagcctcacaccaaggagggcgttgatgcctacaacgaagtgatcgcccgggtgcgaatgtgggtgaacctgaacctgtggcagaagctgaagctaagcagagatgatgccaagcctctgctgagactgaagggattcccttcctttcctctggtcgagagacaggccaacgaagtggactggtgggacatggtgtgtaacgtgaagaagctgatcaacgagaaaaaggaggatggcaaggtgttttggcagaatctggctggctacaagagacaggaagccctgagaccatacctgagcagcgaggaagatcggaagaagggaaagaaattcgctcggtaccagctgggcgacctgctgctgcacctggaaaagaagcacggcgaggactggggaaaggtgtacgacgaggcctgggagcggattgacaagaaagtggaaggcctgagcaagcacatcaagctggaagaggaacggagaagcgaggacgcccagagcaaggccgccctgaccgactggctgcgggctaaggccagcttcgtgatcgagggcctgaaggaggccgacaaggacgagttctgcagatgcgagctgaagctgcagaagtggtacggggacctgcggggaaagcccttcgccatcgaagccgagaacagcatcctggacatcagcggcttcagcaagcagtacaactgtgccttcatctggcagaaggacggcgtgaagaagctgaacctgtacctgatcatcaactacttcaagggcggcaagctgcggttcaagaagatcaaacctgaagccttcgaagccaacagattctacaccgtgatcaacaaaaagagcggcgagatcgtgcccatggaggtgaacttcaacttcgacgaccccaacctgatcatcctgcctctggcctttggcaagagacagggcagagaattcatctggaacgacctgctgtccctggaaaccggcagcctgaagctggccaacggaagagtgatcgagaagacactgtacaacagaagaacccggcaggatgagcctgccctgttcgtggccctgaccttcgagcggcgggaggtcctggactcctccaatatcaaaccaatgaacctgatcggcgtggcaagaggcgaaaacatccccgccgtgatcgccctgaccgaccccgagggctgcccactgagccggtttaaggatagcctgggaaacccaacccacatcctgagaatcggcgagagctataaggagaagcagcggaccatccaggccaagaaggaggtggagcagcggagagccggcggctacagccggaagtacgccagcaaagccaagaatctggcagacgatatggtgagaaacaccgctagagatctgctgtactacgccgtgacccaggatgccatgctgatcttcgccaacctgagccggggcttcggccggcagggcaagcggaccttcatggccgagagacagtacacacggatggaggactggctgaccgccaagctggcctacgagggcctgagcaagacctacctgtccaagacactggcccagtacacctccaagacatgcagcaactgtgggtttaccatcaccagcgccgactacgacagggtgctggagaagctgaagaagacagcaacaggctggatgaccacaattaacggcaaggagctgaaggtggagggccagattacctactacaacagatacaagagacagaacgtagtcaaggacctgtccgtcgagctggatagactgagcgaagaatctgtgaacaacgacatctcctcctggacaaagggcagaagcggagaagctctgagcctcctgaagaaaagattctcccatagacccgtgcaggagaagttcgtgtgcctgaactgcggcttcgagacacacgcagccgagcaagccgccctgaacatcgccagatcctggctgttcctgcggagccaggagtacaagaaataccagacaaacaagacaaccggcaacaccgataagagagccttcgtcgagacctggcagtccttttaccggaagaagcttaaggaggtgtggaaacctgccgtgcggtctggcggatctggcggaggctccagcgaggagaccgtgaccttcaaggacgtggccgtggacttcacctgggaggagtggaagcagctgacccccgtgcagagggacctgtacagggacgtgatgctggagaactaccagaacctggtgagcctgggcctgcccgtgttccagagcgacctgatcagccagctggagaggggcgaggtgccctggatccccgagggcgagaccttcaggggcccctgccccggcagcatcaaccagggcggcccaagcagcggcgcccctcctcccagcggcggcagcccagccggctccccaacctctaccgaggagggcacctctgagtccgccacccccgagagcggccctggcacctccaccgagcccagcgagggcagcgcacccggcagccctgccggcagccccacctccacagaggagggaaccagcaccgagcccagcgaaggcagcgccccaggcaccagcaccgagcctagtgagcaggagattaaacggatcaacaagatcagaagaagacttgtgaaagacagcaacaccaagaaggccggcaagacaggccccatgaaaaccctgctggttagagtgatgacacccgatctgagagagcggctggaaaacctgagaaagaagcctgaaaatatcccccagcccatcagcaatacatctagagccaacctgaataagctgctgaccgattacaccgaaatgaagaaggcgatcctgcatgtgtactgggaagagttccagaaggaccctgtgggcctgatgagccgggtggcccagcctgccagcaagaagatcgatcagaacaagctgaaacctgagatggacgagaagggcaacctgaccaccgccggctttgcctgctctcagtgtggccagcccctgttcgtgtacaagctggagcaggtgtctgagaagggcaaggcttacaccaactacttcggacggtgcaatgtggccgagcacgaaaagctgatcctgctggcccagctgaagcccgagaaggatagcgacgaagccgtgacatatagcctgggaaagtttgggcagagggccctggatttctacagcattcatgtgaccaaggagtccacccaccccgtgaagcccctggcccagatcgccggaaacagatacgcctccggacctgtgggaaaggccctgagcgacgcatgtatgggcacaatcgcctccttcctgtctaagtaccaggacatcatcatcgaacaccagaaggtggtgaagggcaaccagaagagactggagagcctgcgggagctggccggcaaggaaaacctggaataccctagcgtgaccctgccacctcagcctcacaccaaggagggcgttgatgcctacaacgaagtgatcgcccgggtgcgaatgtgggtgaacctgaacctgtggcagaagctgaagctaagcagagatgatgccaagcctctgctgagactgaagggattcccttcctttcctctggtcgagagacaggccaacgaagtggactggtgggacatggtgtgtaacgtgaagaagctgatcaacgagaaaaaggaggatggcaaggtgttttggcagaatctggctggctacaagagacaggaagccctgagaccatacctgagcagcgaggaagatcggaagaagggaaagaaattcgctcggtaccagctgggcgacctgctgctgcacctggaaaagaagcacggcgaggactggggaaaggtgtacgacgaggcctgggagcggattgacaagaaagtggaaggcctgagcaagcacatcaagctggaagaggaacggagaagcgaggacgcccagagcaaggccgccctgaccgactggctgcgggctaaggccagcttcgtgatcgagggcctgaaggaggccgacaaggacgagttctgcagatgcgagctgaagctgcagaagtggtacggggacctgcggggaaagcccttcgccatcgaagccgagaacagcatcctggacatcagcggcttcagcaagcagtacaactgtgccttcatctggcagaaggacggcgtgaagaagctgaacctgtacctgatcatcaactacttcaagggcggcaagctgcggttcaagaagatcaaacctgaagccttcgaagccaacagattctacaccgtgatcaacaaaaagagcggcgagatcgtgcccatggaggtgaacttcaacttcgacgaccccaacctgatcatcctgcctctggcctttggcaagagacagggcagagaattcatctggaacgacctgctgtccctggaaaccggcagcctgaagctggccaacggaagagtgatcgagaagacactgtacaacagaagaacccggcaggatgagcctgccctgttcgtggccctgaccttcgagcggcgggaggtcctggactcctccaatatcaaaccaatgaacctgatcggcgtggcaagaggcgaaaacatccccgccgtgatcgccctgaccgaccccgagggctgcccactgagccggtttaaggatagcctgggaaacccaacccacatcctgagaatcggcgagagctataaggagaagcagcggaccatccaggccaagaaggaggtggagcagcggagagccggcggctacagccggaagtacgccagcaaagccaagaatctggcagacgatatggtgagaaacaccgctagagatctgctgtactacgccgtgacccaggatgccatgctgatcttcgccaacctgagccggggcttcggccggcagggcaagcggaccttcatggccgagagacagtacacacggatggaggactggctgaccgccaagctggcctacgagggcctgagcaagacctacctgtccaagacactggcccagtacacctccaagacatgcagcaactgtgggtttaccatcaccagcgccgactacgacagggtgctggagaagctgaagaagacagcaacaggctggatgaccacaattaacggcaaggagctgaaggtggagggccagattacctactacaacagatacaagagacagaacgtagtcaaggacctgtccgtcgagctggatagactgagcgaagaatctgtgaacaacgacatctcctcctggacaaagggcagaagcggagaagctctgagcctcctgaagaaaagattctcccatagacccgtgcaggagaagttcgtgtgcctgaactgcggcttcgagacacacgcagccgagcaagccgccctgaacatcgccagatcctggctgttcctgcggagccaggagtacaagaaataccagacaaacaagacaaccggcaacaccgataagagagccttcgtcgagacctggcagtccttttaccggaagaagcttaaggaggtgtggaaacctgccgtgcggtctggcggatctggcggaggctcctagcgaggagaccgtgaccttcaaggacgtggccgtggacttcacctgggaggagtggaagcagctgacccccgtgcagagggacctgtacagggacgtgatgctggagaactaccagaacctggtgagcctgggcctgcccgtgttccagagcgacctgatcagccagctggagaggggcgaggtgccctggatccccgagggcgagaccttcaggggcccctgccccggcagcatcaaccagggatctggctccggcagcggccccaagaaaaagagaaaagtctaagctgccttctgcggggcttgccttctggccatgcccttcttctctcccttgcacctgtacctcttggtctttgaataaagcctgagtaggaaggctagcaaaaaaaaaaaaaaaaaaaaaaaaaaaaaaaaaaaaaaaaaaaaaaaaaaaaaaaaaaaaaaaaaaaaaaaaaaaaaaaa

SEQ ID NO: 16138 - RNA, 9485 nt, synthetic construct
  source 1..9485: mol_type = other RNA
aggaaataagagagaaaagaagagtaagaagaaatataagagccaccatggcccctaagaagaagcgtaaagtgagccggatggaacgcctcgtctacgaggtgcggcagaagtgcagaaacatcgaggacatctgcatctcctgcggatctctgaacgtgaccctggagcacccactgttcatcggcggcatgtgccagaactgtaaaaactgttttctggagtgtgcctatcaatacgacgatgacggctaccagagctactgcaccatctgttgcggcggaagagaggtgctgatgtgtggaaataacaactgctgccggtgcttctgcgtggaatgcgtggacctgctggtgggccccggcgccgcccaggccgctattaaggaagatccttggaactgctacatgtgcggccacaagggcacatacggcctgctgagacggagagaggactggcctagcagactgcagatgttcttcgccaataaccacgaccaggagttcgacccccctaaggtgtaccctcccgtccccgccgagaagagaaagcccatccgggtcctgagcctgttcgatggcatcgccaccggtctgctggtgctgaaggacctgggcatccaggtggataggtacattgcctccgaggtgtgcgaggactccatcaccgtgggaatggtgcgtcatcagggcaagatcatgtacgtgggcgacgtgcggagcgtgacacagaagcatatccaggagtggggccctttcgacctggtgatcggcggcagcccttgcaatgacctgagcatcgtgaacccagcccggaagggcctgtacgagggaaccggcagactgttcttcgagttttacagactgctgcacgacgcccggcctaaggaaggcgacgaccggcccttcttttggctgttcgagaatgtggtggccatgggagtcagcgacaagcgggatattagccggttcctggagagcaaccccgtgatgatcgatgccaaggaagtgagcgccgcccaccgggccagatacttctggggcaatctgcctggcatgaacagacccctggccagcaccgtgaacgacaagctggagctgcaggagtgcctggagcacggccggatcgccaagttcagcaaggtgagaaccatcaccacccgaagcaacagcatcaaacaaggcaaggaccagcactttcctgtgttcatgaacgagaaggaggacatcctgtggtgtaccgagatggagagagtgttcgggttcccagtccactacacagatgtcagcaacatgtctagactggccagacagagactgctgggaagaagctggtccgtccctgtgatcagacacctgttcgcccctctgaaggagtacttcgcctgcgtgagcagcggcaacagcaacgccaacagccggggccccagcttctctagcggcctggtgccactgtccctgagagggagccacatgggccccatggagatctacaaaaccgtgagcgcctggaagcggcagcctgtgcgcgtgctgagcctgtttcggaatatcgataaagtcctgaaaagcctgggattcctggagagcggctctggctccggcggtggcaccctgaagtacgtggaggatgtgacaaacgtggtcagacgggatgtggagaagtggggccccttcgatctggtgtacggcagcacccaacccctgggcagctcttgtgaccggtgccctggctggtacatgtttcagttccaccggatcctgcagtacgccctgccgagacaggagtcccagcggccattcttttggattttcatggacaacttgctgctgaccgaggatgaccaggaaactaccactcggttcctgcagaccgaagccgtgaccctgcaggacgtgagaggccgggactaccagaacgccatgcgggtgtggtccaacatccctggactgaaaagcaagcacgcacctctgacccctaaagaagaggagtacctgcaggcccaggtgcggagcagaagcaagctggacgcccctaaggtggatctgctggtgaagaattgcctcctgcccctgagagagtacttcaagtatttcagccagaatagtctgcccctgggaggcagcggcggcggcgccctggtgacatttgaggacgtcgccgtgcggttcacccaggaggaatgggctctgctggatccttctcagaaaatcctgtaccgggacgtgatgagagagacataccggaatctgacctccgtgggcatcaactgggaatgttgggaccttgaagcctgcttcagaagcctgggaagaaacctgagagtgcaggtggtgaagagaaagtgcgagctgaccaacagcggcccctgcgccgagggcggcccaagcagcggcgcccctcctcccagcggcggcagcccagccggctccccaacctctaccgaggagggcacctctgagtccgccacccccgagagcggccctggcacctccaccgagcccagcgagggcagcgcacccggcagccctgccggcagccccacctccacagaggagggaaccagcaccgagcccagcgaaggcagcgccccaggcaccagcaccgagcctagtgagcaggagattaaacggatcaacaagatcagaagaagacttgtgaaagacagcaacaccaagaaggccggcaagacaggccccatgaaaaccctgctggttagagtgatgacacccgatctgagagagcggctggaaaacctgagaaagaagcctgaaaatatcccccagcccatcagcaatacatctagagccaacctgaataagctgctgaccgattacaccgaaatgaagaaggcgatcctgcatgtgtactgggaagagttccagaaggaccctgtgggcctgatgagccgggtggcccagcctgccagcaagaagatcgatcagaacaagctgaaacctgagatggacgagaagggcaacctgaccaccgccggctttgcctgctctcagtgtggccagcccctgttcgtgtacaagctggagcaggtgtctgagaagggcaaggcttacaccaactacttcggacggtgcaatgtggccgagcacgaaaagctgatcctgctggcccagctgaagcccgagaaggatagcgacgaagccgtgacatatagcctgggaaagtttgggcagagggccctggatttctacagcattcatgtgaccaaggagtccacccaccccgtgaagcccctggcccagatcgccggaaacagatacgcctccggacctgtgggaaaggccctgagcgacgcatgtatgggcacaatcgcctccttcctgtctaagtaccaggacatcatcatcgaacaccagaaggtggtgaagggcaaccagaagagactggagagcctgcgggagctggccggcaaggaaaacctggaataccctagcgtgaccctgccacctcagcctcacaccaaggagggcgttgatgcctacaacgaagtgatcgcccgggtgcgaatgtgggtgaacctgaacctgtggcagaagctgaagctaagcagagatgatgccaagcctctgctgagactgaagggattcccttcctttcctctggtcgagagacaggccaacgaagtggactggtgggacatggtgtgtaacgtgaagaagctgatcaacgagaaaaaggaggatggcaaggtgttttggcagaatctggctggctacaagagacaggaagccctgagaccatacctgagcagcgaggaagatcggaagaagggaaagaaattcgctcggtaccagctgggcgacctgctgctgcacctggaaaagaagcacggcgaggactggggaaaggtgtacgacgaggcctgggagcggattgacaagaaagtggaaggcctgagcaagcacatcaagctggaagaggaacggagaagcgaggacgcccagagcaaggccgccctgaccgactggctgcgggctaaggccagcttcgtgatcgagggcctgaaggaggccgacaaggacgagttctgcagatgcgagctgaagctgcagaagtggtacggggacctgcggggaaagcccttcgccatcgaagccgagaacagcatcctggacatcagcggcttcagcaagcagtacaactgtgccttcatctggcagaaggacggcgtgaagaagctgaacctgtacctgatcatcaactacttcaagggcggcaagctgcggttcaagaagatcaaacctgaagccttcgaagccaacagattctacaccgtgatcaacaaaaagagcggcgagatcgtgcccatggaggtgaacttcaacttcgacgaccccaacctgatcatcctgcctctggcctttggcaagagacagggcagagaattcatctggaacgacctgctgtccctggaaaccggcagcctgaagctggccaacggaagagtgatcgagaagacactgtacaacagaagaacccggcaggatgagcctgccctgttcgtggccctgaccttcgagcggcgggaggtcctggactcctccaatatcaaaccaatgaacctgatcggcgtggcaagaggcgaaaacatccccgccgtgatcgccctgaccgaccccgagggctgcccactgagccggtttaaggatagcctgggaaacccaacccacatcctgagaatcggcgagagctataaggagaagcagcggaccatccaggccaagaaggaggtggagcagcggagagccggcggctacagccggaagtacgccagcaaagccaagaatctggcagacgatatggtgagaaacaccgctagagatctgctgtactacgccgtgacccaggatgccatgctgatcttcgccaacctgagccggggcttcggccggcagggcaagcggaccttcatggccgagagacagtacacacggatggaggactggctgaccgccaagctggcctacgagggcctgagcaagacctacctgtccaagacactggcccagtacacctccaagacatgcagcaactgtgggtttaccatcaccagcgccgactacgacagggtgctggagaagctgaagaagacagcaacaggctggatgaccacaattaacggcaaggagctgaaggtggagggccagattacctactacaacagatacaagagacagaacgtagtcaaggacctgtccgtcgagctggatagactgagcgaagaatctgtgaacaacgacatctcctcctggacaaagggcagaagcggagaagctctgagcctcctgaagaaaagattctcccatagacccgtgcaggagaagttcgtgtgcctgaactgcggcttcgagacacacgcagccgagcaagccgccctgaacatcgccagatcctggctgttcctgcggagccaggagtacaagaaataccagacaaacaagacaaccggcaacaccgataagagagccttcgtcgagacctggcagtccttttaccggaagaagcttaaggaggtgtggaaacctgccgtgcggtctggcggatctggcggaggctccttccaggaggccgtgaccttcaaggacgtggccgtggccttcaccgaggaggagctgggcctgctggacagcgcccagaggaagctgtacagggaggtgatgctggagaacttcaggaacctggtgagcgtgggccaccagagcttcaagcccgagatgatcagccagctggagagggaggagaagctgtgggtgaaggagatccagacccagatgggcaggtgcaggggcggcaggaaccagggcggcccaagcagcggcgcccctcctcccagcggcggcagcccagccggctccccaacctctaccgaggagggcacctctgagtccgccacccccgagagcggccctggcacctccaccgagcccagcgagggcagcgcacccggcagccctgccggcagccccacctccacagaggagggaaccagcaccgagcccagcgaaggcagcgccccaggcaccagcaccgagcctagtgagcaggagattaaacggatcaacaagatcagaagaagacttgtgaaagacagcaacaccaagaaggccggcaagacaggccccatgaaaaccctgctggttagagtgatgacacccgatctgagagagcggctggaaaacctgagaaagaagcctgaaaatatcccccagcccatcagcaatacatctagagccaacctgaataagctgctgaccgattacaccgaaatgaagaaggcgatcctgcatgtgtactgggaagagttccagaaggaccctgtgggcctgatgagccgggtggcccagcctgccagcaagaagatcgatcagaacaagctgaaacctgagatggacgagaagggcaacctgaccaccgccggctttgcctgctctcagtgtggccagcccctgttcgtgtacaagctggagcaggtgtctgagaagggcaaggcttacaccaactacttcggacggtgcaatgtggccgagcacgaaaagctgatcctgctggcccagctgaagcccgagaaggatagcgacgaagccgtgacatatagcctgggaaagtttgggcagagggccctggatttctacagcattcatgtgaccaaggagtccacccaccccgtgaagcccctggcccagatcgccggaaacagatacgcctccggacctgtgggaaaggccctgagcgacgcatgtatgggcacaatcgcctccttcctgtctaagtaccaggacatcatcatcgaacaccagaaggtggtgaagggcaaccagaagagactggagagcctgcgggagctggccggcaaggaaaacctggaataccctagcgtgaccctgccacctcagcctcacaccaaggagggcgttgatgcctacaacgaagtgatcgcccgggtgcgaatgtgggtgaacctgaacctgtggcagaagctgaagctaagcagagatgatgccaagcctctgctgagactgaagggattcccttcctttcctctggtcgagagacaggccaacgaagtggactggtgggacatggtgtgtaacgtgaagaagctgatcaacgagaaaaaggaggatggcaaggtgttttggcagaatctggctggctacaagagacaggaagccctgagaccatacctgagcagcgaggaagatcggaagaagggaaagaaattcgctcggtaccagctgggcgacctgctgctgcacctggaaaagaagcacggcgaggactggggaaaggtgtacgacgaggcctgggagcggattgacaagaaagtggaaggcctgagcaagcacatcaagctggaagaggaacggagaagcgaggacgcccagagcaaggccgccctgaccgactggctgcgggctaaggccagcttcgtgatcgagggcctgaaggaggccgacaaggacgagttctgcagatgcgagctgaagctgcagaagtggtacggggacctgcggggaaagcccttcgccatcgaagccgagaacagcatcctggacatcagcggcttcagcaagcagtacaactgtgccttcatctggcagaaggacggcgtgaagaagctgaacctgtacctgatcatcaactacttcaagggcggcaagctgcggttcaagaagatcaaacctgaagccttcgaagccaacagattctacaccgtgatcaacaaaaagagcggcgagatcgtgcccatggaggtgaacttcaacttcgacgaccccaacctgatcatcctgcctctggcctttggcaagagacagggcagagaattcatctggaacgacctgctgtccctggaaaccggcagcctgaagctggccaacggaagagtgatcgagaagacactgtacaacagaagaacccggcaggatgagcctgccctgttcgtggccctgaccttcgagcggcgggaggtcctggactcctccaatatcaaaccaatgaacctgatcggcgtggcaagaggcgaaaacatccccgccgtgatcgccctgaccgaccccgagggctgcccactgagccggtttaaggatagcctgggaaacccaacccacatcctgagaatcggcgagagctataaggagaagcagcggaccatccaggccaagaaggaggtggagcagcggagagccggcggctacagccggaagtacgccagcaaagccaagaatctggcagacgatatggtgagaaacaccgctagagatctgctgtactacgccgtgacccaggatgccatgctgatcttcgccaacctgagccggggcttcggccggcagggcaagcggaccttcatggccgagagacagtacacacggatggaggactggctgaccgccaagctggcctacgagggcctgagcaagacctacctgtccaagacactggcccagtacacctccaagacatgcagcaactgtgggtttaccatcaccagcgccgactacgacagggtgctggagaagctgaagaagacagcaacaggctggatgaccacaattaacggcaaggagctgaaggtggagggccagattacctactacaacagatacaagagacagaacgtagtcaaggacctgtccgtcgagctggatagactgagcgaagaatctgtgaacaacgacatctcctcctggacaaagggcagaagcggagaagctctgagcctcctgaagaaaagattctcccatagacccgtgcaggagaagttcgtgtgcctgaactgcggcttcgagacacacgcagccgagcaagccgccctgaacatcgccagatcctggctgttcctgcggagccaggagtacaagaaataccagacaaacaagacaaccggcaacaccgataagagagccttcgtcgagacctggcagtccttttaccggaagaagcttaaggaggtgtggaaacctgccgtgcggtctggcggatctggcggaggctcctttccaggaggccgtgaccttcaaggacgtggccgtggccttcaccgaggaggagctgggcctgctggacagcgcccagaggaagctgtacagggaggtgatgctggagaacttcaggaacctggtgagcgtgggccaccagagcttcaagcccgagatgatcagccagctggagagggaggagaagctgtgggtgaaggagatccagacccagatgggcaggtgcaggggcggcaggaaccagggatctggctccggcagcggccccaagaaaaagagaaaagtctaagctgccttctgcggggcttgccttctggccatgcccttcttctctcccttgcacctgtacctcttggtctttgaataaagcctgagtaggaaggctagcaaaaaaaaaaaaaaaaaaaaaaaaaaaaaaaaaaaaaaaaaaaaaaaaaaaaaaaaaaaaaaaaaaaaaaaaaaaaaaaa

SEQ ID NO: 16139 - RNA, 9485 nt, synthetic construct
  source 1..9485: mol_type = other RNA
aggaaataagagagaaaagaagagtaagaagaaatataagagccaccatggcccctaagaagaagcgtaaagtgagccggatggaacgcctcgtctacgaggtgcggcagaagtgcagaaacatcgaggacatctgcatctcctgcggatctctgaacgtgaccctggagcacccactgttcatcggcggcatgtgccagaactgtaaaaactgttttctggagtgtgcctatcaatacgacgatgacggctaccagagctactgcaccatctgttgcggcggaagagaggtgctgatgtgtggaaataacaactgctgccggtgcttctgcgtggaatgcgtggacctgctggtgggccccggcgccgcccaggccgctattaaggaagatccttggaactgctacatgtgcggccacaagggcacatacggcctgctgagacggagagaggactggcctagcagactgcagatgttcttcgccaataaccacgaccaggagttcgacccccctaaggtgtaccctcccgtccccgccgagaagagaaagcccatccgggtcctgagcctgttcgatggcatcgccaccggtctgctggtgctgaaggacctgggcatccaggtggataggtacattgcctccgaggtgtgcgaggactccatcaccgtgggaatggtgcgtcatcagggcaagatcatgtacgtgggcgacgtgcggagcgtgacacagaagcatatccaggagtggggccctttcgacctggtgatcggcggcagcccttgcaatgacctgagcatcgtgaacccagcccggaagggcctgtacgagggaaccggcagactgttcttcgagttttacagactgctgcacgacgcccggcctaaggaaggcgacgaccggcccttcttttggctgttcgagaatgtggtggccatgggagtcagcgacaagcgggatattagccggttcctggagagcaaccccgtgatgatcgatgccaaggaagtgagcgccgcccaccgggccagatacttctggggcaatctgcctggcatgaacagacccctggccagcaccgtgaacgacaagctggagctgcaggagtgcctggagcacggccggatcgccaagttcagcaaggtgagaaccatcaccacccgaagcaacagcatcaaacaaggcaaggaccagcactttcctgtgttcatgaacgagaaggaggacatcctgtggtgtaccgagatggagagagtgttcgggttcccagtccactacacagatgtcagcaacatgtctagactggccagacagagactgctgggaagaagctggtccgtccctgtgatcagacacctgttcgcccctctgaaggagtacttcgcctgcgtgagcagcggcaacagcaacgccaacagccggggccccagcttctctagcggcctggtgccactgtccctgagagggagccacatgggccccatggagatctacaaaaccgtgagcgcctggaagcggcagcctgtgcgcgtgctgagcctgtttcggaatatcgataaagtcctgaaaagcctgggattcctggagagcggctctggctccggcggtggcaccctgaagtacgtggaggatgtgacaaacgtggtcagacgggatgtggagaagtggggccccttcgatctggtgtacggcagcacccaacccctgggcagctcttgtgaccggtgccctggctggtacatgtttcagttccaccggatcctgcagtacgccctgccgagacaggagtcccagcggccattcttttggattttcatggacaacttgctgctgaccgaggatgaccaggaaactaccactcggttcctgcagaccgaagccgtgaccctgcaggacgtgagaggccgggactaccagaacgccatgcgggtgtggtccaacatccctggactgaaaagcaagcacgcacctctgacccctaaagaagaggagtacctgcaggcccaggtgcggagcagaagcaagctggacgcccctaaggtggatctgctggtgaagaattgcctcctgcccctgagagagtacttcaagtatttcagccagaatagtctgcccctgggaggcagcggcggcggcgccctggtgacatttgaggacgtcgccgtgcggttcacccaggaggaatgggctctgctggatccttctcagaaaatcctgtaccgggacgtgatgagagagacataccggaatctgacctccgtgggcatcaactgggaatgttgggaccttgaagcctgcttcagaagcctgggaagaaacctgagagtgcaggtggtgaagagaaagtgcgagctgaccaacagcggcccctgcgccgagggcggcccaagcagcggcgcccctcctcccagcggcggcagcccagccggctccccaacctctaccgaggagggcacctctgagtccgccacccccgagagcggccctggcacctccaccgagcccagcgagggcagcgcacccggcagccctgccggcagccccacctccacagaggagggaaccagcaccgagcccagcgaaggcagcgccccaggcaccagcaccgagcctagtgagcaggagattaaacggatcaacaagatcagaagaagacttgtgaaagacagcaacaccaagaaggccggcaagacaggccccatgaaaaccctgctggttagagtgatgacacccgatctgagagagcggctggaaaacctgagaaagaagcctgaaaatatcccccagcccatcagcaatacatctagagccaacctgaataagctgctgaccgattacaccgaaatgaagaaggcgatcctgcatgtgtactgggaagagttccagaaggaccctgtgggcctgatgagccgggtggcccagcctgccagcaagaagatcgatcagaacaagctgaaacctgagatggacgagaagggcaacctgaccaccgccggctttgcctgctctcagtgtggccagcccctgttcgtgtacaagctggagcaggtgtctgagaagggcaaggcttacaccaactacttcggacggtgcaatgtggccgagcacgaaaagctgatcctgctggcccagctgaagcccgagaaggatagcgacgaagccgtgacatatagcctgggaaagtttgggcagagggccctggatttctacagcattcatgtgaccaaggagtccacccaccccgtgaagcccctggcccagatcgccggaaacagatacgcctccggacctgtgggaaaggccctgagcgacgcatgtatgggcacaatcgcctccttcctgtctaagtaccaggacatcatcatcgaacaccagaaggtggtgaagggcaaccagaagagactggagagcctgcgggagctggccggcaaggaaaacctggaataccctagcgtgaccctgccacctcagcctcacaccaaggagggcgttgatgcctacaacgaagtgatcgcccgggtgcgaatgtgggtgaacctgaacctgtggcagaagctgaagctaagcagagatgatgccaagcctctgctgagactgaagggattcccttcctttcctctggtcgagagacaggccaacgaagtggactggtgggacatggtgtgtaacgtgaagaagctgatcaacgagaaaaaggaggatggcaaggtgttttggcagaatctggctggctacaagagacaggaagccctgagaccatacctgagcagcgaggaagatcggaagaagggaaagaaattcgctcggtaccagctgggcgacctgctgctgcacctggaaaagaagcacggcgaggactggggaaaggtgtacgacgaggcctgggagcggattgacaagaaagtggaaggcctgagcaagcacatcaagctggaagaggaacggagaagcgaggacgcccagagcaaggccgccctgaccgactggctgcgggctaaggccagcttcgtgatcgagggcctgaaggaggccgacaaggacgagttctgcagatgcgagctgaagctgcagaagtggtacggggacctgcggggaaagcccttcgccatcgaagccgagaacagcatcctggacatcagcggcttcagcaagcagtacaactgtgccttcatctggcagaaggacggcgtgaagaagctgaacctgtacctgatcatcaactacttcaagggcggcaagctgcggttcaagaagatcaaacctgaagccttcgaagccaacagattctacaccgtgatcaacaaaaagagcggcgagatcgtgcccatggaggtgaacttcaacttcgacgaccccaacctgatcatcctgcctctggcctttggcaagagacagggcagagaattcatctggaacgacctgctgtccctggaaaccggcagcctgaagctggccaacggaagagtgatcgagaagacactgtacaacagaagaacccggcaggatgagcctgccctgttcgtggccctgaccttcgagcggcgggaggtcctggactcctccaatatcaaaccaatgaacctgatcggcgtggcaagaggcgaaaacatccccgccgtgatcgccctgaccgaccccgagggctgcccactgagccggtttaaggatagcctgggaaacccaacccacatcctgagaatcggcgagagctataaggagaagcagcggaccatccaggccaagaaggaggtggagcagcggagagccggcggctacagccggaagtacgccagcaaagccaagaatctggcagacgatatggtgagaaacaccgctagagatctgctgtactacgccgtgacccaggatgccatgctgatcttcgccaacctgagccggggcttcggccggcagggcaagcggaccttcatggccgagagacagtacacacggatggaggactggctgaccgccaagctggcctacgagggcctgagcaagacctacctgtccaagacactggcccagtacacctccaagacatgcagcaactgtgggtttaccatcaccagcgccgactacgacagggtgctggagaagctgaagaagacagcaacaggctggatgaccacaattaacggcaaggagctgaaggtggagggccagattacctactacaacagatacaagagacagaacgtagtcaaggacctgtccgtcgagctggatagactgagcgaagaatctgtgaacaacgacatctcctcctggacaaagggcagaagcggagaagctctgagcctcctgaagaaaagattctcccatagacccgtgcaggagaagttcgtgtgcctgaactgcggcttcgagacacacgcagccgagcaagccgccctgaacatcgccagatcctggctgttcctgcggagccaggagtacaagaaataccagacaaacaagacaaccggcaacaccgataagagagccttcgtcgagacctggcagtccttttaccggaagaagcttaaggaggtgtggaaacctgccgtgcggtctggcggatctggcggaggctcccaggccagcgtgaccttcgaggacgtggccgtgaggttcacccaggaggagtgggccctgctggaccccagccagaagatcctgtacggcgacgtgatgcaggagacctacaggaacctgaccagcgtgggcatcaactgggagtgctgggacctggaggcctacttcaggagcctggagaggaacctgagggtgcagctggtgaagagggactgcgagctgaagaacaacgacccctgcggcggcggcccaagcagcggcgcccctcctcccagcggcggcagcccagccggctccccaacctctaccgaggagggcacctctgagtccgccacccccgagagcggccctggcacctccaccgagcccagcgagggcagcgcacccggcagccctgccggcagccccacctccacagaggagggaaccagcaccgagcccagcgaaggcagcgccccaggcaccagcaccgagcctagtgagcaggagattaaacggatcaacaagatcagaagaagacttgtgaaagacagcaacaccaagaaggccggcaagacaggccccatgaaaaccctgctggttagagtgatgacacccgatctgagagagcggctggaaaacctgagaaagaagcctgaaaatatcccccagcccatcagcaatacatctagagccaacctgaataagctgctgaccgattacaccgaaatgaagaaggcgatcctgcatgtgtactgggaagagttccagaaggaccctgtgggcctgatgagccgggtggcccagcctgccagcaagaagatcgatcagaacaagctgaaacctgagatggacgagaagggcaacctgaccaccgccggctttgcctgctctcagtgtggccagcccctgttcgtgtacaagctggagcaggtgtctgagaagggcaaggcttacaccaactacttcggacggtgcaatgtggccgagcacgaaaagctgatcctgctggcccagctgaagcccgagaaggatagcgacgaagccgtgacatatagcctgggaaagtttgggcagagggccctggatttctacagcattcatgtgaccaaggagtccacccaccccgtgaagcccctggcccagatcgccggaaacagatacgcctccggacctgtgggaaaggccctgagcgacgcatgtatgggcacaatcgcctccttcctgtctaagtaccaggacatcatcatcgaacaccagaaggtggtgaagggcaaccagaagagactggagagcctgcgggagctggccggcaaggaaaacctggaataccctagcgtgaccctgccacctcagcctcacaccaaggagggcgttgatgcctacaacgaagtgatcgcccgggtgcgaatgtgggtgaacctgaacctgtggcagaagctgaagctaagcagagatgatgccaagcctctgctgagactgaagggattcccttcctttcctctggtcgagagacaggccaacgaagtggactggtgggacatggtgtgtaacgtgaagaagctgatcaacgagaaaaaggaggatggcaaggtgttttggcagaatctggctggctacaagagacaggaagccctgagaccatacctgagcagcgaggaagatcggaagaagggaaagaaattcgctcggtaccagctgggcgacctgctgctgcacctggaaaagaagcacggcgaggactggggaaaggtgtacgacgaggcctgggagcggattgacaagaaagtggaaggcctgagcaagcacatcaagctggaagaggaacggagaagcgaggacgcccagagcaaggccgccctgaccgactggctgcgggctaaggccagcttcgtgatcgagggcctgaaggaggccgacaaggacgagttctgcagatgcgagctgaagctgcagaagtggtacggggacctgcggggaaagcccttcgccatcgaagccgagaacagcatcctggacatcagcggcttcagcaagcagtacaactgtgccttcatctggcagaaggacggcgtgaagaagctgaacctgtacctgatcatcaactacttcaagggcggcaagctgcggttcaagaagatcaaacctgaagccttcgaagccaacagattctacaccgtgatcaacaaaaagagcggcgagatcgtgcccatggaggtgaacttcaacttcgacgaccccaacctgatcatcctgcctctggcctttggcaagagacagggcagagaattcatctggaacgacctgctgtccctggaaaccggcagcctgaagctggccaacggaagagtgatcgagaagacactgtacaacagaagaacccggcaggatgagcctgccctgttcgtggccctgaccttcgagcggcgggaggtcctggactcctccaatatcaaaccaatgaacctgatcggcgtggcaagaggcgaaaacatccccgccgtgatcgccctgaccgaccccgagggctgcccactgagccggtttaaggatagcctgggaaacccaacccacatcctgagaatcggcgagagctataaggagaagcagcggaccatccaggccaagaaggaggtggagcagcggagagccggcggctacagccggaagtacgccagcaaagccaagaatctggcagacgatatggtgagaaacaccgctagagatctgctgtactacgccgtgacccaggatgccatgctgatcttcgccaacctgagccggggcttcggccggcagggcaagcggaccttcatggccgagagacagtacacacggatggaggactggctgaccgccaagctggcctacgagggcctgagcaagacctacctgtccaagacactggcccagtacacctccaagacatgcagcaactgtgggtttaccatcaccagcgccgactacgacagggtgctggagaagctgaagaagacagcaacaggctggatgaccacaattaacggcaaggagctgaaggtggagggccagattacctactacaacagatacaagagacagaacgtagtcaaggacctgtccgtcgagctggatagactgagcgaagaatctgtgaacaacgacatctcctcctggacaaagggcagaagcggagaagctctgagcctcctgaagaaaagattctcccatagacccgtgcaggagaagttcgtgtgcctgaactgcggcttcgagacacacgcagccgagcaagccgccctgaacatcgccagatcctggctgttcctgcggagccaggagtacaagaaataccagacaaacaagacaaccggcaacaccgataagagagccttcgtcgagacctggcagtccttttaccggaagaagcttaaggaggtgtggaaacctgccgtgcggtctggcggatctggcggaggctcctcaggccagcgtgaccttcgaggacgtggccgtgaggttcacccaggaggagtgggccctgctggaccccagccagaagatcctgtacggcgacgtgatgcaggagacctacaggaacctgaccagcgtgggcatcaactgggagtgctgggacctggaggcctacttcaggagcctggagaggaacctgagggtgcagctggtgaagagggactgcgagctgaagaacaacgacccctgcggcggatctggctccggcagcggccccaagaaaaagagaaaagtctaagctgccttctgcggggcttgccttctggccatgcccttcttctctcccttgcacctgtacctcttggtctttgaataaagcctgagtaggaaggctagcaaaaaaaaaaaaaaaaaaaaaaaaaaaaaaaaaaaaaaaaaaaaaaaaaaaaaaaaaaaaaaaaaaaaaaaaaaaaaaaa

SEQ ID NO: 16140 - RNA, 9485 nt, synthetic construct
  source 1..9485: mol_type = other RNA
aggaaataagagagaaaagaagagtaagaagaaatataagagccaccatggcccctaagaagaagcgtaaagtgagccggatggaacgcctcgtctacgaggtgcggcagaagtgcagaaacatcgaggacatctgcatctcctgcggatctctgaacgtgaccctggagcacccactgttcatcggcggcatgtgccagaactgtaaaaactgttttctggagtgtgcctatcaatacgacgatgacggctaccagagctactgcaccatctgttgcggcggaagagaggtgctgatgtgtggaaataacaactgctgccggtgcttctgcgtggaatgcgtggacctgctggtgggccccggcgccgcccaggccgctattaaggaagatccttggaactgctacatgtgcggccacaagggcacatacggcctgctgagacggagagaggactggcctagcagactgcagatgttcttcgccaataaccacgaccaggagttcgacccccctaaggtgtaccctcccgtccccgccgagaagagaaagcccatccgggtcctgagcctgttcgatggcatcgccaccggtctgctggtgctgaaggacctgggcatccaggtggataggtacattgcctccgaggtgtgcgaggactccatcaccgtgggaatggtgcgtcatcagggcaagatcatgtacgtgggcgacgtgcggagcgtgacacagaagcatatccaggagtggggccctttcgacctggtgatcggcggcagcccttgcaatgacctgagcatcgtgaacccagcccggaagggcctgtacgagggaaccggcagactgttcttcgagttttacagactgctgcacgacgcccggcctaaggaaggcgacgaccggcccttcttttggctgttcgagaatgtggtggccatgggagtcagcgacaagcgggatattagccggttcctggagagcaaccccgtgatgatcgatgccaaggaagtgagcgccgcccaccgggccagatacttctggggcaatctgcctggcatgaacagacccctggccagcaccgtgaacgacaagctggagctgcaggagtgcctggagcacggccggatcgccaagttcagcaaggtgagaaccatcaccacccgaagcaacagcatcaaacaaggcaaggaccagcactttcctgtgttcatgaacgagaaggaggacatcctgtggtgtaccgagatggagagagtgttcgggttcccagtccactacacagatgtcagcaacatgtctagactggccagacagagactgctgggaagaagctggtccgtccctgtgatcagacacctgttcgcccctctgaaggagtacttcgcctgcgtgagcagcggcaacagcaacgccaacagccggggccccagcttctctagcggcctggtgccactgtccctgagagggagccacatgggccccatggagatctacaaaaccgtgagcgcctggaagcggcagcctgtgcgcgtgctgagcctgtttcggaatatcgataaagtcctgaaaagcctgggattcctggagagcggctctggctccggcggtggcaccctgaagtacgtggaggatgtgacaaacgtggtcagacgggatgtggagaagtggggccccttcgatctggtgtacggcagcacccaacccctgggcagctcttgtgaccggtgccctggctggtacatgtttcagttccaccggatcctgcagtacgccctgccgagacaggagtcccagcggccattcttttggattttcatggacaacttgctgctgaccgaggatgaccaggaaactaccactcggttcctgcagaccgaagccgtgaccctgcaggacgtgagaggccgggactaccagaacgccatgcgggtgtggtccaacatccctggactgaaaagcaagcacgcacctctgacccctaaagaagaggagtacctgcaggcccaggtgcggagcagaagcaagctggacgcccctaaggtggatctgctggtgaagaattgcctcctgcccctgagagagtacttcaagtatttcagccagaatagtctgcccctgggaggcagcggcggcggcgccctggtgacatttgaggacgtcgccgtgcggttcacccaggaggaatgggctctgctggatccttctcagaaaatcctgtaccgggacgtgatgagagagacataccggaatctgacctccgtgggcatcaactgggaatgttgggaccttgaagcctgcttcagaagcctgggaagaaacctgagagtgcaggtggtgaagagaaagtgcgagctgaccaacagcggcccctgcgccgagggcggcccaagcagcggcgcccctcctcccagcggcggcagcccagccggctccccaacctctaccgaggagggcacctctgagtccgccacccccgagagcggccctggcacctccaccgagcccagcgagggcagcgcacccggcagccctgccggcagccccacctccacagaggagggaaccagcaccgagcccagcgaaggcagcgccccaggcaccagcaccgagcctagtgagcaggagattaaacggatcaacaagatcagaagaagacttgtgaaagacagcaacaccaagaaggccggcaagacaggccccatgaaaaccctgctggttagagtgatgacacccgatctgagagagcggctggaaaacctgagaaagaagcctgaaaatatcccccagcccatcagcaatacatctagagccaacctgaataagctgctgaccgattacaccgaaatgaagaaggcgatcctgcatgtgtactgggaagagttccagaaggaccctgtgggcctgatgagccgggtggcccagcctgccagcaagaagatcgatcagaacaagctgaaacctgagatggacgagaagggcaacctgaccaccgccggctttgcctgctctcagtgtggccagcccctgttcgtgtacaagctggagcaggtgtctgagaagggcaaggcttacaccaactacttcggacggtgcaatgtggccgagcacgaaaagctgatcctgctggcccagctgaagcccgagaaggatagcgacgaagccgtgacatatagcctgggaaagtttgggcagagggccctggatttctacagcattcatgtgaccaaggagtccacccaccccgtgaagcccctggcccagatcgccggaaacagatacgcctccggacctgtgggaaaggccctgagcgacgcatgtatgggcacaatcgcctccttcctgtctaagtaccaggacatcatcatcgaacaccagaaggtggtgaagggcaaccagaagagactggagagcctgcgggagctggccggcaaggaaaacctggaataccctagcgtgaccctgccacctcagcctcacaccaaggagggcgttgatgcctacaacgaagtgatcgcccgggtgcgaatgtgggtgaacctgaacctgtggcagaagctgaagctaagcagagatgatgccaagcctctgctgagactgaagggattcccttcctttcctctggtcgagagacaggccaacgaagtggactggtgggacatggtgtgtaacgtgaagaagctgatcaacgagaaaaaggaggatggcaaggtgttttggcagaatctggctggctacaagagacaggaagccctgagaccatacctgagcagcgaggaagatcggaagaagggaaagaaattcgctcggtaccagctgggcgacctgctgctgcacctggaaaagaagcacggcgaggactggggaaaggtgtacgacgaggcctgggagcggattgacaagaaagtggaaggcctgagcaagcacatcaagctggaagaggaacggagaagcgaggacgcccagagcaaggccgccctgaccgactggctgcgggctaaggccagcttcgtgatcgagggcctgaaggaggccgacaaggacgagttctgcagatgcgagctgaagctgcagaagtggtacggggacctgcggggaaagcccttcgccatcgaagccgagaacagcatcctggacatcagcggcttcagcaagcagtacaactgtgccttcatctggcagaaggacggcgtgaagaagctgaacctgtacctgatcatcaactacttcaagggcggcaagctgcggttcaagaagatcaaacctgaagccttcgaagccaacagattctacaccgtgatcaacaaaaagagcggcgagatcgtgcccatggaggtgaacttcaacttcgacgaccccaacctgatcatcctgcctctggcctttggcaagagacagggcagagaattcatctggaacgacctgctgtccctggaaaccggcagcctgaagctggccaacggaagagtgatcgagaagacactgtacaacagaagaacccggcaggatgagcctgccctgttcgtggccctgaccttcgagcggcgggaggtcctggactcctccaatatcaaaccaatgaacctgatcggcgtggcaagaggcgaaaacatccccgccgtgatcgccctgaccgaccccgagggctgcccactgagccggtttaaggatagcctgggaaacccaacccacatcctgagaatcggcgagagctataaggagaagcagcggaccatccaggccaagaaggaggtggagcagcggagagccggcggctacagccggaagtacgccagcaaagccaagaatctggcagacgatatggtgagaaacaccgctagagatctgctgtactacgccgtgacccaggatgccatgctgatcttcgccaacctgagccggggcttcggccggcagggcaagcggaccttcatggccgagagacagtacacacggatggaggactggctgaccgccaagctggcctacgagggcctgagcaagacctacctgtccaagacactggcccagtacacctccaagacatgcagcaactgtgggtttaccatcaccagcgccgactacgacagggtgctggagaagctgaagaagacagcaacaggctggatgaccacaattaacggcaaggagctgaaggtggagggccagattacctactacaacagatacaagagacagaacgtagtcaaggacctgtccgtcgagctggatagactgagcgaagaatctgtgaacaacgacatctcctcctggacaaagggcagaagcggagaagctctgagcctcctgaagaaaagattctcccatagacccgtgcaggagaagttcgtgtgcctgaactgcggcttcgagacacacgcagccgagcaagccgccctgaacatcgccagatcctggctgttcctgcggagccaggagtacaagaaataccagacaaacaagacaaccggcaacaccgataagagagccttcgtcgagacctggcagtccttttaccggaagaagcttaaggaggtgtggaaacctgccgtgcggtctggcggatctggcggaggctccatggacagcgtggccttcgaggacgtggccgtgaacttcacccaggaggagtgggccctgctgagccccagccagaagaacctgtacagggacgtgatgctggaggccttcaggaacctggccagcgtgggcatccagtggaaggaccaggacaccgagaacctgtaccagaacctgggcatcaagctgaggcacatgagggcccacgccggccacaccaggagcgagtgcggcggcgagtggggcggcccaagcagcggcgcccctcctcccagcggcggcagcccagccggctccccaacctctaccgaggagggcacctctgagtccgccacccccgagagcggccctggcacctccaccgagcccagcgagggcagcgcacccggcagccctgccggcagccccacctccacagaggagggaaccagcaccgagcccagcgaaggcagcgccccaggcaccagcaccgagcctagtgagcaggagattaaacggatcaacaagatcagaagaagacttgtgaaagacagcaacaccaagaaggccggcaagacaggccccatgaaaaccctgctggttagagtgatgacacccgatctgagagagcggctggaaaacctgagaaagaagcctgaaaatatcccccagcccatcagcaatacatctagagccaacctgaataagctgctgaccgattacaccgaaatgaagaaggcgatcctgcatgtgtactgggaagagttccagaaggaccctgtgggcctgatgagccgggtggcccagcctgccagcaagaagatcgatcagaacaagctgaaacctgagatggacgagaagggcaacctgaccaccgccggctttgcctgctctcagtgtggccagcccctgttcgtgtacaagctggagcaggtgtctgagaagggcaaggcttacaccaactacttcggacggtgcaatgtggccgagcacgaaaagctgatcctgctggcccagctgaagcccgagaaggatagcgacgaagccgtgacatatagcctgggaaagtttgggcagagggccctggatttctacagcattcatgtgaccaaggagtccacccaccccgtgaagcccctggcccagatcgccggaaacagatacgcctccggacctgtgggaaaggccctgagcgacgcatgtatgggcacaatcgcctccttcctgtctaagtaccaggacatcatcatcgaacaccagaaggtggtgaagggcaaccagaagagactggagagcctgcgggagctggccggcaaggaaaacctggaataccctagcgtgaccctgccacctcagcctcacaccaaggagggcgttgatgcctacaacgaagtgatcgcccgggtgcgaatgtgggtgaacctgaacctgtggcagaagctgaagctaagcagagatgatgccaagcctctgctgagactgaagggattcccttcctttcctctggtcgagagacaggccaacgaagtggactggtgggacatggtgtgtaacgtgaagaagctgatcaacgagaaaaaggaggatggcaaggtgttttggcagaatctggctggctacaagagacaggaagccctgagaccatacctgagcagcgaggaagatcggaagaagggaaagaaattcgctcggtaccagctgggcgacctgctgctgcacctggaaaagaagcacggcgaggactggggaaaggtgtacgacgaggcctgggagcggattgacaagaaagtggaaggcctgagcaagcacatcaagctggaagaggaacggagaagcgaggacgcccagagcaaggccgccctgaccgactggctgcgggctaaggccagcttcgtgatcgagggcctgaaggaggccgacaaggacgagttctgcagatgcgagctgaagctgcagaagtggtacggggacctgcggggaaagcccttcgccatcgaagccgagaacagcatcctggacatcagcggcttcagcaagcagtacaactgtgccttcatctggcagaaggacggcgtgaagaagctgaacctgtacctgatcatcaactacttcaagggcggcaagctgcggttcaagaagatcaaacctgaagccttcgaagccaacagattctacaccgtgatcaacaaaaagagcggcgagatcgtgcccatggaggtgaacttcaacttcgacgaccccaacctgatcatcctgcctctggcctttggcaagagacagggcagagaattcatctggaacgacctgctgtccctggaaaccggcagcctgaagctggccaacggaagagtgatcgagaagacactgtacaacagaagaacccggcaggatgagcctgccctgttcgtggccctgaccttcgagcggcgggaggtcctggactcctccaatatcaaaccaatgaacctgatcggcgtggcaagaggcgaaaacatccccgccgtgatcgccctgaccgaccccgagggctgcccactgagccggtttaaggatagcctgggaaacccaacccacatcctgagaatcggcgagagctataaggagaagcagcggaccatccaggccaagaaggaggtggagcagcggagagccggcggctacagccggaagtacgccagcaaagccaagaatctggcagacgatatggtgagaaacaccgctagagatctgctgtactacgccgtgacccaggatgccatgctgatcttcgccaacctgagccggggcttcggccggcagggcaagcggaccttcatggccgagagacagtacacacggatggaggactggctgaccgccaagctggcctacgagggcctgagcaagacctacctgtccaagacactggcccagtacacctccaagacatgcagcaactgtgggtttaccatcaccagcgccgactacgacagggtgctggagaagctgaagaagacagcaacaggctggatgaccacaattaacggcaaggagctgaaggtggagggccagattacctactacaacagatacaagagacagaacgtagtcaaggacctgtccgtcgagctggatagactgagcgaagaatctgtgaacaacgacatctcctcctggacaaagggcagaagcggagaagctctgagcctcctgaagaaaagattctcccatagacccgtgcaggagaagttcgtgtgcctgaactgcggcttcgagacacacgcagccgagcaagccgccctgaacatcgccagatcctggctgttcctgcggagccaggagtacaagaaataccagacaaacaagacaaccggcaacaccgataagagagccttcgtcgagacctggcagtccttttaccggaagaagcttaaggaggtgtggaaacctgccgtgcggtctggcggatctggcggaggctcctatggacagcgtggccttcgaggacgtggccgtgaacttcacccaggaggagtgggccctgctgagccccagccagaagaacctgtacagggacgtgatgctggaggccttcaggaacctggccagcgtgggcatccagtggaaggaccaggacaccgagaacctgtaccagaacctgggcatcaagctgaggcacatgagggcccacgccggccacaccaggagcgagtgcggcggcgagtggggatctggctccggcagcggccccaagaaaaagagaaaagtctaagctgccttctgcggggcttgccttctggccatgcccttcttctctcccttgcacctgtacctcttggtctttgaataaagcctgagtaggaaggctagcaaaaaaaaaaaaaaaaaaaaaaaaaaaaaaaaaaaaaaaaaaaaaaaaaaaaaaaaaaaaaaaaaaaaaaaaaaaaaaaa

SEQ ID NO: 16141 - RNA, 9485 nt, synthetic construct
  source 1..9485: mol_type = other RNA
aggaaataagagagaaaagaagagtaagaagaaatataagagccaccatggcccctaagaagaagcgtaaagtgagccggatggaacgcctcgtctacgaggtgcggcagaagtgcagaaacatcgaggacatctgcatctcctgcggatctctgaacgtgaccctggagcacccactgttcatcggcggcatgtgccagaactgtaaaaactgttttctggagtgtgcctatcaatacgacgatgacggctaccagagctactgcaccatctgttgcggcggaagagaggtgctgatgtgtggaaataacaactgctgccggtgcttctgcgtggaatgcgtggacctgctggtgggccccggcgccgcccaggccgctattaaggaagatccttggaactgctacatgtgcggccacaagggcacatacggcctgctgagacggagagaggactggcctagcagactgcagatgttcttcgccaataaccacgaccaggagttcgacccccctaaggtgtaccctcccgtccccgccgagaagagaaagcccatccgggtcctgagcctgttcgatggcatcgccaccggtctgctggtgctgaaggacctgggcatccaggtggataggtacattgcctccgaggtgtgcgaggactccatcaccgtgggaatggtgcgtcatcagggcaagatcatgtacgtgggcgacgtgcggagcgtgacacagaagcatatccaggagtggggccctttcgacctggtgatcggcggcagcccttgcaatgacctgagcatcgtgaacccagcccggaagggcctgtacgagggaaccggcagactgttcttcgagttttacagactgctgcacgacgcccggcctaaggaaggcgacgaccggcccttcttttggctgttcgagaatgtggtggccatgggagtcagcgacaagcgggatattagccggttcctggagagcaaccccgtgatgatcgatgccaaggaagtgagcgccgcccaccgggccagatacttctggggcaatctgcctggcatgaacagacccctggccagcaccgtgaacgacaagctggagctgcaggagtgcctggagcacggccggatcgccaagttcagcaaggtgagaaccatcaccacccgaagcaacagcatcaaacaaggcaaggaccagcactttcctgtgttcatgaacgagaaggaggacatcctgtggtgtaccgagatggagagagtgttcgggttcccagtccactacacagatgtcagcaacatgtctagactggccagacagagactgctgggaagaagctggtccgtccctgtgatcagacacctgttcgcccctctgaaggagtacttcgcctgcgtgagcagcggcaacagcaacgccaacagccggggccccagcttctctagcggcctggtgccactgtccctgagagggagccacatgggccccatggagatctacaaaaccgtgagcgcctggaagcggcagcctgtgcgcgtgctgagcctgtttcggaatatcgataaagtcctgaaaagcctgggattcctggagagcggctctggctccggcggtggcaccctgaagtacgtggaggatgtgacaaacgtggtcagacgggatgtggagaagtggggccccttcgatctggtgtacggcagcacccaacccctgggcagctcttgtgaccggtgccctggctggtacatgtttcagttccaccggatcctgcagtacgccctgccgagacaggagtcccagcggccattcttttggattttcatggacaacttgctgctgaccgaggatgaccaggaaactaccactcggttcctgcagaccgaagccgtgaccctgcaggacgtgagaggccgggactaccagaacgccatgcgggtgtggtccaacatccctggactgaaaagcaagcacgcacctctgacccctaaagaagaggagtacctgcaggcccaggtgcggagcagaagcaagctggacgcccctaaggtggatctgctggtgaagaattgcctcctgcccctgagagagtacttcaagtatttcagccagaatagtctgcccctgggaggcagcggcggcggcgccctggtgacatttgaggacgtcgccgtgcggttcacccaggaggaatgggctctgctggatccttctcagaaaatcctgtaccgggacgtgatgagagagacataccggaatctgacctccgtgggcatcaactgggaatgttgggaccttgaagcctgcttcagaagcctgggaagaaacctgagagtgcaggtggtgaagagaaagtgcgagctgaccaacagcggcccctgcgccgagggcggcccaagcagcggcgcccctcctcccagcggcggcagcccagccggctccccaacctctaccgaggagggcacctctgagtccgccacccccgagagcggccctggcacctccaccgagcccagcgagggcagcgcacccggcagccctgccggcagccccacctccacagaggagggaaccagcaccgagcccagcgaaggcagcgccccaggcaccagcaccgagcctagtgagcaggagattaaacggatcaacaagatcagaagaagacttgtgaaagacagcaacaccaagaaggccggcaagacaggccccatgaaaaccctgctggttagagtgatgacacccgatctgagagagcggctggaaaacctgagaaagaagcctgaaaatatcccccagcccatcagcaatacatctagagccaacctgaataagctgctgaccgattacaccgaaatgaagaaggcgatcctgcatgtgtactgggaagagttccagaaggaccctgtgggcctgatgagccgggtggcccagcctgccagcaagaagatcgatcagaacaagctgaaacctgagatggacgagaagggcaacctgaccaccgccggctttgcctgctctcagtgtggccagcccctgttcgtgtacaagctggagcaggtgtctgagaagggcaaggcttacaccaactacttcggacggtgcaatgtggccgagcacgaaaagctgatcctgctggcccagctgaagcccgagaaggatagcgacgaagccgtgacatatagcctgggaaagtttgggcagagggccctggatttctacagcattcatgtgaccaaggagtccacccaccccgtgaagcccctggcccagatcgccggaaacagatacgcctccggacctgtgggaaaggccctgagcgacgcatgtatgggcacaatcgcctccttcctgtctaagtaccaggacatcatcatcgaacaccagaaggtggtgaagggcaaccagaagagactggagagcctgcgggagctggccggcaaggaaaacctggaataccctagcgtgaccctgccacctcagcctcacaccaaggagggcgttgatgcctacaacgaagtgatcgcccgggtgcgaatgtgggtgaacctgaacctgtggcagaagctgaagctaagcagagatgatgccaagcctctgctgagactgaagggattcccttcctttcctctggtcgagagacaggccaacgaagtggactggtgggacatggtgtgtaacgtgaagaagctgatcaacgagaaaaaggaggatggcaaggtgttttggcagaatctggctggctacaagagacaggaagccctgagaccatacctgagcagcgaggaagatcggaagaagggaaagaaattcgctcggtaccagctgggcgacctgctgctgcacctggaaaagaagcacggcgaggactggggaaaggtgtacgacgaggcctgggagcggattgacaagaaagtggaaggcctgagcaagcacatcaagctggaagaggaacggagaagcgaggacgcccagagcaaggccgccctgaccgactggctgcgggctaaggccagcttcgtgatcgagggcctgaaggaggccgacaaggacgagttctgcagatgcgagctgaagctgcagaagtggtacggggacctgcggggaaagcccttcgccatcgaagccgagaacagcatcctggacatcagcggcttcagcaagcagtacaactgtgccttcatctggcagaaggacggcgtgaagaagctgaacctgtacctgatcatcaactacttcaagggcggcaagctgcggttcaagaagatcaaacctgaagccttcgaagccaacagattctacaccgtgatcaacaaaaagagcggcgagatcgtgcccatggaggtgaacttcaacttcgacgaccccaacctgatcatcctgcctctggcctttggcaagagacagggcagagaattcatctggaacgacctgctgtccctggaaaccggcagcctgaagctggccaacggaagagtgatcgagaagacactgtacaacagaagaacccggcaggatgagcctgccctgttcgtggccctgaccttcgagcggcgggaggtcctggactcctccaatatcaaaccaatgaacctgatcggcgtggcaagaggcgaaaacatccccgccgtgatcgccctgaccgaccccgagggctgcccactgagccggtttaaggatagcctgggaaacccaacccacatcctgagaatcggcgagagctataaggagaagcagcggaccatccaggccaagaaggaggtggagcagcggagagccggcggctacagccggaagtacgccagcaaagccaagaatctggcagacgatatggtgagaaacaccgctagagatctgctgtactacgccgtgacccaggatgccatgctgatcttcgccaacctgagccggggcttcggccggcagggcaagcggaccttcatggccgagagacagtacacacggatggaggactggctgaccgccaagctggcctacgagggcctgagcaagacctacctgtccaagacactggcccagtacacctccaagacatgcagcaactgtgggtttaccatcaccagcgccgactacgacagggtgctggagaagctgaagaagacagcaacaggctggatgaccacaattaacggcaaggagctgaaggtggagggccagattacctactacaacagatacaagagacagaacgtagtcaaggacctgtccgtcgagctggatagactgagcgaagaatctgtgaacaacgacatctcctcctggacaaagggcagaagcggagaagctctgagcctcctgaagaaaagattctcccatagacccgtgcaggagaagttcgtgtgcctgaactgcggcttcgagacacacgcagccgagcaagccgccctgaacatcgccagatcctggctgttcctgcggagccaggagtacaagaaataccagacaaacaagacaaccggcaacaccgataagagagccttcgtcgagacctggcagtccttttaccggaagaagcttaaggaggtgtggaaacctgccgtgcggtctggcggatctggcggaggctccatggtgcacggcagcgtgaccttcagggacgtggccatcgacttcagccaggaggagtgggagtgcctgcagcccgaccagaggaccctgtacagggacgtgatgctggagaactacagccacctgatcagcctgggcagcagcatcagcaagcccgacgtgatcaccctgctggagcaggagaaggagccctggatggtggtgaggaaggagaccagcaggaggtaccccgacctggagagcggcggcccaagcagcggcgcccctcctcccagcggcggcagcccagccggctccccaacctctaccgaggagggcacctctgagtccgccacccccgagagcggccctggcacctccaccgagcccagcgagggcagcgcacccggcagccctgccggcagccccacctccacagaggagggaaccagcaccgagcccagcgaaggcagcgccccaggcaccagcaccgagcctagtgagcaggagattaaacggatcaacaagatcagaagaagacttgtgaaagacagcaacaccaagaaggccggcaagacaggccccatgaaaaccctgctggttagagtgatgacacccgatctgagagagcggctggaaaacctgagaaagaagcctgaaaatatcccccagcccatcagcaatacatctagagccaacctgaataagctgctgaccgattacaccgaaatgaagaaggcgatcctgcatgtgtactgggaagagttccagaaggaccctgtgggcctgatgagccgggtggcccagcctgccagcaagaagatcgatcagaacaagctgaaacctgagatggacgagaagggcaacctgaccaccgccggctttgcctgctctcagtgtggccagcccctgttcgtgtacaagctggagcaggtgtctgagaagggcaaggcttacaccaactacttcggacggtgcaatgtggccgagcacgaaaagctgatcctgctggcccagctgaagcccgagaaggatagcgacgaagccgtgacatatagcctgggaaagtttgggcagagggccctggatttctacagcattcatgtgaccaaggagtccacccaccccgtgaagcccctggcccagatcgccggaaacagatacgcctccggacctgtgggaaaggccctgagcgacgcatgtatgggcacaatcgcctccttcctgtctaagtaccaggacatcatcatcgaacaccagaaggtggtgaagggcaaccagaagagactggagagcctgcgggagctggccggcaaggaaaacctggaataccctagcgtgaccctgccacctcagcctcacaccaaggagggcgttgatgcctacaacgaagtgatcgcccgggtgcgaatgtgggtgaacctgaacctgtggcagaagctgaagctaagcagagatgatgccaagcctctgctgagactgaagggattcccttcctttcctctggtcgagagacaggccaacgaagtggactggtgggacatggtgtgtaacgtgaagaagctgatcaacgagaaaaaggaggatggcaaggtgttttggcagaatctggctggctacaagagacaggaagccctgagaccatacctgagcagcgaggaagatcggaagaagggaaagaaattcgctcggtaccagctgggcgacctgctgctgcacctggaaaagaagcacggcgaggactggggaaaggtgtacgacgaggcctgggagcggattgacaagaaagtggaaggcctgagcaagcacatcaagctggaagaggaacggagaagcgaggacgcccagagcaaggccgccctgaccgactggctgcgggctaaggccagcttcgtgatcgagggcctgaaggaggccgacaaggacgagttctgcagatgcgagctgaagctgcagaagtggtacggggacctgcggggaaagcccttcgccatcgaagccgagaacagcatcctggacatcagcggcttcagcaagcagtacaactgtgccttcatctggcagaaggacggcgtgaagaagctgaacctgtacctgatcatcaactacttcaagggcggcaagctgcggttcaagaagatcaaacctgaagccttcgaagccaacagattctacaccgtgatcaacaaaaagagcggcgagatcgtgcccatggaggtgaacttcaacttcgacgaccccaacctgatcatcctgcctctggcctttggcaagagacagggcagagaattcatctggaacgacctgctgtccctggaaaccggcagcctgaagctggccaacggaagagtgatcgagaagacactgtacaacagaagaacccggcaggatgagcctgccctgttcgtggccctgaccttcgagcggcgggaggtcctggactcctccaatatcaaaccaatgaacctgatcggcgtggcaagaggcgaaaacatccccgccgtgatcgccctgaccgaccccgagggctgcccactgagccggtttaaggatagcctgggaaacccaacccacatcctgagaatcggcgagagctataaggagaagcagcggaccatccaggccaagaaggaggtggagcagcggagagccggcggctacagccggaagtacgccagcaaagccaagaatctggcagacgatatggtgagaaacaccgctagagatctgctgtactacgccgtgacccaggatgccatgctgatcttcgccaacctgagccggggcttcggccggcagggcaagcggaccttcatggccgagagacagtacacacggatggaggactggctgaccgccaagctggcctacgagggcctgagcaagacctacctgtccaagacactggcccagtacacctccaagacatgcagcaactgtgggtttaccatcaccagcgccgactacgacagggtgctggagaagctgaagaagacagcaacaggctggatgaccacaattaacggcaaggagctgaaggtggagggccagattacctactacaacagatacaagagacagaacgtagtcaaggacctgtccgtcgagctggatagactgagcgaagaatctgtgaacaacgacatctcctcctggacaaagggcagaagcggagaagctctgagcctcctgaagaaaagattctcccatagacccgtgcaggagaagttcgtgtgcctgaactgcggcttcgagacacacgcagccgagcaagccgccctgaacatcgccagatcctggctgttcctgcggagccaggagtacaagaaataccagacaaacaagacaaccggcaacaccgataagagagccttcgtcgagacctggcagtccttttaccggaagaagcttaaggaggtgtggaaacctgccgtgcggtctggcggatctggcggaggctcctatggtgcacggcagcgtgaccttcagggacgtggccatcgacttcagccaggaggagtgggagtgcctgcagcccgaccagaggaccctgtacagggacgtgatgctggagaactacagccacctgatcagcctgggcagcagcatcagcaagcccgacgtgatcaccctgctggagcaggagaaggagccctggatggtggtgaggaaggagaccagcaggaggtaccccgacctggagagcggatctggctccggcagcggccccaagaaaaagagaaaagtctaagctgccttctgcggggcttgccttctggccatgcccttcttctctcccttgcacctgtacctcttggtctttgaataaagcctgagtaggaaggctagcaaaaaaaaaaaaaaaaaaaaaaaaaaaaaaaaaaaaaaaaaaaaaaaaaaaaaaaaaaaaaaaaaaaaaaaaaaaaaaaa

SEQ ID NO: 16142 - RNA, 9485 nt, synthetic construct
  source 1..9485: mol_type = other RNA
aggaaataagagagaaaagaagagtaagaagaaatataagagccaccatggcccctaagaagaagcgtaaagtgagccggatggaacgcctcgtctacgaggtgcggcagaagtgcagaaacatcgaggacatctgcatctcctgcggatctctgaacgtgaccctggagcacccactgttcatcggcggcatgtgccagaactgtaaaaactgttttctggagtgtgcctatcaatacgacgatgacggctaccagagctactgcaccatctgttgcggcggaagagaggtgctgatgtgtggaaataacaactgctgccggtgcttctgcgtggaatgcgtggacctgctggtgggccccggcgccgcccaggccgctattaaggaagatccttggaactgctacatgtgcggccacaagggcacatacggcctgctgagacggagagaggactggcctagcagactgcagatgttcttcgccaataaccacgaccaggagttcgacccccctaaggtgtaccctcccgtccccgccgagaagagaaagcccatccgggtcctgagcctgttcgatggcatcgccaccggtctgctggtgctgaaggacctgggcatccaggtggataggtacattgcctccgaggtgtgcgaggactccatcaccgtgggaatggtgcgtcatcagggcaagatcatgtacgtgggcgacgtgcggagcgtgacacagaagcatatccaggagtggggccctttcgacctggtgatcggcggcagcccttgcaatgacctgagcatcgtgaacccagcccggaagggcctgtacgagggaaccggcagactgttcttcgagttttacagactgctgcacgacgcccggcctaaggaaggcgacgaccggcccttcttttggctgttcgagaatgtggtggccatgggagtcagcgacaagcgggatattagccggttcctggagagcaaccccgtgatgatcgatgccaaggaagtgagcgccgcccaccgggccagatacttctggggcaatctgcctggcatgaacagacccctggccagcaccgtgaacgacaagctggagctgcaggagtgcctggagcacggccggatcgccaagttcagcaaggtgagaaccatcaccacccgaagcaacagcatcaaacaaggcaaggaccagcactttcctgtgttcatgaacgagaaggaggacatcctgtggtgtaccgagatggagagagtgttcgggttcccagtccactacacagatgtcagcaacatgtctagactggccagacagagactgctgggaagaagctggtccgtccctgtgatcagacacctgttcgcccctctgaaggagtacttcgcctgcgtgagcagcggcaacagcaacgccaacagccggggccccagcttctctagcggcctggtgccactgtccctgagagggagccacatgggccccatggagatctacaaaaccgtgagcgcctggaagcggcagcctgtgcgcgtgctgagcctgtttcggaatatcgataaagtcctgaaaagcctgggattcctggagagcggctctggctccggcggtggcaccctgaagtacgtggaggatgtgacaaacgtggtcagacgggatgtggagaagtggggccccttcgatctggtgtacggcagcacccaacccctgggcagctcttgtgaccggtgccctggctggtacatgtttcagttccaccggatcctgcagtacgccctgccgagacaggagtcccagcggccattcttttggattttcatggacaacttgctgctgaccgaggatgaccaggaaactaccactcggttcctgcagaccgaagccgtgaccctgcaggacgtgagaggccgggactaccagaacgccatgcgggtgtggtccaacatccctggactgaaaagcaagcacgcacctctgacccctaaagaagaggagtacctgcaggcccaggtgcggagcagaagcaagctggacgcccctaaggtggatctgctggtgaagaattgcctcctgcccctgagagagtacttcaagtatttcagccagaatagtctgcccctgggaggcagcggcggcggcgccctggtgacatttgaggacgtcgccgtgcggttcacccaggaggaatgggctctgctggatccttctcagaaaatcctgtaccgggacgtgatgagagagacataccggaatctgacctccgtgggcatcaactgggaatgttgggaccttgaagcctgcttcagaagcctgggaagaaacctgagagtgcaggtggtgaagagaaagtgcgagctgaccaacagcggcccctgcgccgagggcggcccaagcagcggcgcccctcctcccagcggcggcagcccagccggctccccaacctctaccgaggagggcacctctgagtccgccacccccgagagcggccctggcacctccaccgagcccagcgagggcagcgcacccggcagccctgccggcagccccacctccacagaggagggaaccagcaccgagcccagcgaaggcagcgccccaggcaccagcaccgagcctagtgagcaggagattaaacggatcaacaagatcagaagaagacttgtgaaagacagcaacaccaagaaggccggcaagacaggccccatgaaaaccctgctggttagagtgatgacacccgatctgagagagcggctggaaaacctgagaaagaagcctgaaaatatcccccagcccatcagcaatacatctagagccaacctgaataagctgctgaccgattacaccgaaatgaagaaggcgatcctgcatgtgtactgggaagagttccagaaggaccctgtgggcctgatgagccgggtggcccagcctgccagcaagaagatcgatcagaacaagctgaaacctgagatggacgagaagggcaacctgaccaccgccggctttgcctgctctcagtgtggccagcccctgttcgtgtacaagctggagcaggtgtctgagaagggcaaggcttacaccaactacttcggacggtgcaatgtggccgagcacgaaaagctgatcctgctggcccagctgaagcccgagaaggatagcgacgaagccgtgacatatagcctgggaaagtttgggcagagggccctggatttctacagcattcatgtgaccaaggagtccacccaccccgtgaagcccctggcccagatcgccggaaacagatacgcctccggacctgtgggaaaggccctgagcgacgcatgtatgggcacaatcgcctccttcctgtctaagtaccaggacatcatcatcgaacaccagaaggtggtgaagggcaaccagaagagactggagagcctgcgggagctggccggcaaggaaaacctggaataccctagcgtgaccctgccacctcagcctcacaccaaggagggcgttgatgcctacaacgaagtgatcgcccgggtgcgaatgtgggtgaacctgaacctgtggcagaagctgaagctaagcagagatgatgccaagcctctgctgagactgaagggattcccttcctttcctctggtcgagagacaggccaacgaagtggactggtgggacatggtgtgtaacgtgaagaagctgatcaacgagaaaaaggaggatggcaaggtgttttggcagaatctggctggctacaagagacaggaagccctgagaccatacctgagcagcgaggaagatcggaagaagggaaagaaattcgctcggtaccagctgggcgacctgctgctgcacctggaaaagaagcacggcgaggactggggaaaggtgtacgacgaggcctgggagcggattgacaagaaagtggaaggcctgagcaagcacatcaagctggaagaggaacggagaagcgaggacgcccagagcaaggccgccctgaccgactggctgcgggctaaggccagcttcgtgatcgagggcctgaaggaggccgacaaggacgagttctgcagatgcgagctgaagctgcagaagtggtacggggacctgcggggaaagcccttcgccatcgaagccgagaacagcatcctggacatcagcggcttcagcaagcagtacaactgtgccttcatctggcagaaggacggcgtgaagaagctgaacctgtacctgatcatcaactacttcaagggcggcaagctgcggttcaagaagatcaaacctgaagccttcgaagccaacagattctacaccgtgatcaacaaaaagagcggcgagatcgtgcccatggaggtgaacttcaacttcgacgaccccaacctgatcatcctgcctctggcctttggcaagagacagggcagagaattcatctggaacgacctgctgtccctggaaaccggcagcctgaagctggccaacggaagagtgatcgagaagacactgtacaacagaagaacccggcaggatgagcctgccctgttcgtggccctgaccttcgagcggcgggaggtcctggactcctccaatatcaaaccaatgaacctgatcggcgtggcaagaggcgaaaacatccccgccgtgatcgccctgaccgaccccgagggctgcccactgagccggtttaaggatagcctgggaaacccaacccacatcctgagaatcggcgagagctataaggagaagcagcggaccatccaggccaagaaggaggtggagcagcggagagccggcggctacagccggaagtacgccagcaaagccaagaatctggcagacgatatggtgagaaacaccgctagagatctgctgtactacgccgtgacccaggatgccatgctgatcttcgccaacctgagccggggcttcggccggcagggcaagcggaccttcatggccgagagacagtacacacggatggaggactggctgaccgccaagctggcctacgagggcctgagcaagacctacctgtccaagacactggcccagtacacctccaagacatgcagcaactgtgggtttaccatcaccagcgccgactacgacagggtgctggagaagctgaagaagacagcaacaggctggatgaccacaattaacggcaaggagctgaaggtggagggccagattacctactacaacagatacaagagacagaacgtagtcaaggacctgtccgtcgagctggatagactgagcgaagaatctgtgaacaacgacatctcctcctggacaaagggcagaagcggagaagctctgagcctcctgaagaaaagattctcccatagacccgtgcaggagaagttcgtgtgcctgaactgcggcttcgagacacacgcagccgagcaagccgccctgaacatcgccagatcctggctgttcctgcggagccaggagtacaagaaataccagacaaacaagacaaccggcaacaccgataagagagccttcgtcgagacctggcagtccttttaccggaagaagcttaaggaggtgtggaaacctgccgtgcggtctggcggatctggcggaggctccacccaggtgagcgtgaccttcgacgacgtggccgtgaccttcacccaggaggagtggggccacctggaccccgcccagaggaccctgtacagggaggtgatgctggagacctgcaggctgctgatgagcctgggctgccccgtgcccaggcccgagctgatctaccagcaggagcacggccaggagctgtggaccgtgaagagggacctgagcaggagcacctgcgccggctacagcagcgagggcggcccaagcagcggcgcccctcctcccagcggcggcagcccagccggctccccaacctctaccgaggagggcacctctgagtccgccacccccgagagcggccctggcacctccaccgagcccagcgagggcagcgcacccggcagccctgccggcagccccacctccacagaggagggaaccagcaccgagcccagcgaaggcagcgccccaggcaccagcaccgagcctagtgagcaggagattaaacggatcaacaagatcagaagaagacttgtgaaagacagcaacaccaagaaggccggcaagacaggccccatgaaaaccctgctggttagagtgatgacacccgatctgagagagcggctggaaaacctgagaaagaagcctgaaaatatcccccagcccatcagcaatacatctagagccaacctgaataagctgctgaccgattacaccgaaatgaagaaggcgatcctgcatgtgtactgggaagagttccagaaggaccctgtgggcctgatgagccgggtggcccagcctgccagcaagaagatcgatcagaacaagctgaaacctgagatggacgagaagggcaacctgaccaccgccggctttgcctgctctcagtgtggccagcccctgttcgtgtacaagctggagcaggtgtctgagaagggcaaggcttacaccaactacttcggacggtgcaatgtggccgagcacgaaaagctgatcctgctggcccagctgaagcccgagaaggatagcgacgaagccgtgacatatagcctgggaaagtttgggcagagggccctggatttctacagcattcatgtgaccaaggagtccacccaccccgtgaagcccctggcccagatcgccggaaacagatacgcctccggacctgtgggaaaggccctgagcgacgcatgtatgggcacaatcgcctccttcctgtctaagtaccaggacatcatcatcgaacaccagaaggtggtgaagggcaaccagaagagactggagagcctgcgggagctggccggcaaggaaaacctggaataccctagcgtgaccctgccacctcagcctcacaccaaggagggcgttgatgcctacaacgaagtgatcgcccgggtgcgaatgtgggtgaacctgaacctgtggcagaagctgaagctaagcagagatgatgccaagcctctgctgagactgaagggattcccttcctttcctctggtcgagagacaggccaacgaagtggactggtgggacatggtgtgtaacgtgaagaagctgatcaacgagaaaaaggaggatggcaaggtgttttggcagaatctggctggctacaagagacaggaagccctgagaccatacctgagcagcgaggaagatcggaagaagggaaagaaattcgctcggtaccagctgggcgacctgctgctgcacctggaaaagaagcacggcgaggactggggaaaggtgtacgacgaggcctgggagcggattgacaagaaagtggaaggcctgagcaagcacatcaagctggaagaggaacggagaagcgaggacgcccagagcaaggccgccctgaccgactggctgcgggctaaggccagcttcgtgatcgagggcctgaaggaggccgacaaggacgagttctgcagatgcgagctgaagctgcagaagtggtacggggacctgcggggaaagcccttcgccatcgaagccgagaacagcatcctggacatcagcggcttcagcaagcagtacaactgtgccttcatctggcagaaggacggcgtgaagaagctgaacctgtacctgatcatcaactacttcaagggcggcaagctgcggttcaagaagatcaaacctgaagccttcgaagccaacagattctacaccgtgatcaacaaaaagagcggcgagatcgtgcccatggaggtgaacttcaacttcgacgaccccaacctgatcatcctgcctctggcctttggcaagagacagggcagagaattcatctggaacgacctgctgtccctggaaaccggcagcctgaagctggccaacggaagagtgatcgagaagacactgtacaacagaagaacccggcaggatgagcctgccctgttcgtggccctgaccttcgagcggcgggaggtcctggactcctccaatatcaaaccaatgaacctgatcggcgtggcaagaggcgaaaacatccccgccgtgatcgccctgaccgaccccgagggctgcccactgagccggtttaaggatagcctgggaaacccaacccacatcctgagaatcggcgagagctataaggagaagcagcggaccatccaggccaagaaggaggtggagcagcggagagccggcggctacagccggaagtacgccagcaaagccaagaatctggcagacgatatggtgagaaacaccgctagagatctgctgtactacgccgtgacccaggatgccatgctgatcttcgccaacctgagccggggcttcggccggcagggcaagcggaccttcatggccgagagacagtacacacggatggaggactggctgaccgccaagctggcctacgagggcctgagcaagacctacctgtccaagacactggcccagtacacctccaagacatgcagcaactgtgggtttaccatcaccagcgccgactacgacagggtgctggagaagctgaagaagacagcaacaggctggatgaccacaattaacggcaaggagctgaaggtggagggccagattacctactacaacagatacaagagacagaacgtagtcaaggacctgtccgtcgagctggatagactgagcgaagaatctgtgaacaacgacatctcctcctggacaaagggcagaagcggagaagctctgagcctcctgaagaaaagattctcccatagacccgtgcaggagaagttcgtgtgcctgaactgcggcttcgagacacacgcagccgagcaagccgccctgaacatcgccagatcctggctgttcctgcggagccaggagtacaagaaataccagacaaacaagacaaccggcaacaccgataagagagccttcgtcgagacctggcagtccttttaccggaagaagcttaaggaggtgtggaaacctgccgtgcggtctggcggatctggcggaggctcctacccaggtgagcgtgaccttcgacgacgtggccgtgaccttcacccaggaggagtggggccacctggaccccgcccagaggaccctgtacagggaggtgatgctggagacctgcaggctgctgatgagcctgggctgccccgtgcccaggcccgagctgatctaccagcaggagcacggccaggagctgtggaccgtgaagagggacctgagcaggagcacctgcgccggctacagcagcgagggatctggctccggcagcggccccaagaaaaagagaaaagtctaagctgccttctgcggggcttgccttctggccatgcccttcttctctcccttgcacctgtacctcttggtctttgaataaagcctgagtaggaaggctagcaaaaaaaaaaaaaaaaaaaaaaaaaaaaaaaaaaaaaaaaaaaaaaaaaaaaaaaaaaaaaaaaaaaaaaaaaaaaaaaa

SEQ ID NO: 16143 - RNA, 9485 nt, synthetic construct
  source 1..9485: mol_type = other RNA
aggaaataagagagaaaagaagagtaagaagaaatataagagccaccatggcccctaagaagaagcgtaaagtgagccggatggaacgcctcgtctacgaggtgcggcagaagtgcagaaacatcgaggacatctgcatctcctgcggatctctgaacgtgaccctggagcacccactgttcatcggcggcatgtgccagaactgtaaaaactgttttctggagtgtgcctatcaatacgacgatgacggctaccagagctactgcaccatctgttgcggcggaagagaggtgctgatgtgtggaaataacaactgctgccggtgcttctgcgtggaatgcgtggacctgctggtgggccccggcgccgcccaggccgctattaaggaagatccttggaactgctacatgtgcggccacaagggcacatacggcctgctgagacggagagaggactggcctagcagactgcagatgttcttcgccaataaccacgaccaggagttcgacccccctaaggtgtaccctcccgtccccgccgagaagagaaagcccatccgggtcctgagcctgttcgatggcatcgccaccggtctgctggtgctgaaggacctgggcatccaggtggataggtacattgcctccgaggtgtgcgaggactccatcaccgtgggaatggtgcgtcatcagggcaagatcatgtacgtgggcgacgtgcggagcgtgacacagaagcatatccaggagtggggccctttcgacctggtgatcggcggcagcccttgcaatgacctgagcatcgtgaacccagcccggaagggcctgtacgagggaaccggcagactgttcttcgagttttacagactgctgcacgacgcccggcctaaggaaggcgacgaccggcccttcttttggctgttcgagaatgtggtggccatgggagtcagcgacaagcgggatattagccggttcctggagagcaaccccgtgatgatcgatgccaaggaagtgagcgccgcccaccgggccagatacttctggggcaatctgcctggcatgaacagacccctggccagcaccgtgaacgacaagctggagctgcaggagtgcctggagcacggccggatcgccaagttcagcaaggtgagaaccatcaccacccgaagcaacagcatcaaacaaggcaaggaccagcactttcctgtgttcatgaacgagaaggaggacatcctgtggtgtaccgagatggagagagtgttcgggttcccagtccactacacagatgtcagcaacatgtctagactggccagacagagactgctgggaagaagctggtccgtccctgtgatcagacacctgttcgcccctctgaaggagtacttcgcctgcgtgagcagcggcaacagcaacgccaacagccggggccccagcttctctagcggcctggtgccactgtccctgagagggagccacatgggccccatggagatctacaaaaccgtgagcgcctggaagcggcagcctgtgcgcgtgctgagcctgtttcggaatatcgataaagtcctgaaaagcctgggattcctggagagcggctctggctccggcggtggcaccctgaagtacgtggaggatgtgacaaacgtggtcagacgggatgtggagaagtggggccccttcgatctggtgtacggcagcacccaacccctgggcagctcttgtgaccggtgccctggctggtacatgtttcagttccaccggatcctgcagtacgccctgccgagacaggagtcccagcggccattcttttggattttcatggacaacttgctgctgaccgaggatgaccaggaaactaccactcggttcctgcagaccgaagccgtgaccctgcaggacgtgagaggccgggactaccagaacgccatgcgggtgtggtccaacatccctggactgaaaagcaagcacgcacctctgacccctaaagaagaggagtacctgcaggcccaggtgcggagcagaagcaagctggacgcccctaaggtggatctgctggtgaagaattgcctcctgcccctgagagagtacttcaagtatttcagccagaatagtctgcccctgggaggcagcggcggcggcgccctggtgacatttgaggacgtcgccgtgcggttcacccaggaggaatgggctctgctggatccttctcagaaaatcctgtaccgggacgtgatgagagagacataccggaatctgacctccgtgggcatcaactgggaatgttgggaccttgaagcctgcttcagaagcctgggaagaaacctgagagtgcaggtggtgaagagaaagtgcgagctgaccaacagcggcccctgcgccgagggcggcccaagcagcggcgcccctcctcccagcggcggcagcccagccggctccccaacctctaccgaggagggcacctctgagtccgccacccccgagagcggccctggcacctccaccgagcccagcgagggcagcgcacccggcagccctgccggcagccccacctccacagaggagggaaccagcaccgagcccagcgaaggcagcgccccaggcaccagcaccgagcctagtgagcaggagattaaacggatcaacaagatcagaagaagacttgtgaaagacagcaacaccaagaaggccggcaagacaggccccatgaaaaccctgctggttagagtgatgacacccgatctgagagagcggctggaaaacctgagaaagaagcctgaaaatatcccccagcccatcagcaatacatctagagccaacctgaataagctgctgaccgattacaccgaaatgaagaaggcgatcctgcatgtgtactgggaagagttccagaaggaccctgtgggcctgatgagccgggtggcccagcctgccagcaagaagatcgatcagaacaagctgaaacctgagatggacgagaagggcaacctgaccaccgccggctttgcctgctctcagtgtggccagcccctgttcgtgtacaagctggagcaggtgtctgagaagggcaaggcttacaccaactacttcggacggtgcaatgtggccgagcacgaaaagctgatcctgctggcccagctgaagcccgagaaggatagcgacgaagccgtgacatatagcctgggaaagtttgggcagagggccctggatttctacagcattcatgtgaccaaggagtccacccaccccgtgaagcccctggcccagatcgccggaaacagatacgcctccggacctgtgggaaaggccctgagcgacgcatgtatgggcacaatcgcctccttcctgtctaagtaccaggacatcatcatcgaacaccagaaggtggtgaagggcaaccagaagagactggagagcctgcgggagctggccggcaaggaaaacctggaataccctagcgtgaccctgccacctcagcctcacaccaaggagggcgttgatgcctacaacgaagtgatcgcccgggtgcgaatgtgggtgaacctgaacctgtggcagaagctgaagctaagcagagatgatgccaagcctctgctgagactgaagggattcccttcctttcctctggtcgagagacaggccaacgaagtggactggtgggacatggtgtgtaacgtgaagaagctgatcaacgagaaaaaggaggatggcaaggtgttttggcagaatctggctggctacaagagacaggaagccctgagaccatacctgagcagcgaggaagatcggaagaagggaaagaaattcgctcggtaccagctgggcgacctgctgctgcacctggaaaagaagcacggcgaggactggggaaaggtgtacgacgaggcctgggagcggattgacaagaaagtggaaggcctgagcaagcacatcaagctggaagaggaacggagaagcgaggacgcccagagcaaggccgccctgaccgactggctgcgggctaaggccagcttcgtgatcgagggcctgaaggaggccgacaaggacgagttctgcagatgcgagctgaagctgcagaagtggtacggggacctgcggggaaagcccttcgccatcgaagccgagaacagcatcctggacatcagcggcttcagcaagcagtacaactgtgccttcatctggcagaaggacggcgtgaagaagctgaacctgtacctgatcatcaactacttcaagggcggcaagctgcggttcaagaagatcaaacctgaagccttcgaagccaacagattctacaccgtgatcaacaaaaagagcggcgagatcgtgcccatggaggtgaacttcaacttcgacgaccccaacctgatcatcctgcctctggcctttggcaagagacagggcagagaattcatctggaacgacctgctgtccctggaaaccggcagcctgaagctggccaacggaagagtgatcgagaagacactgtacaacagaagaacccggcaggatgagcctgccctgttcgtggccctgaccttcgagcggcgggaggtcctggactcctccaatatcaaaccaatgaacctgatcggcgtggcaagaggcgaaaacatccccgccgtgatcgccctgaccgaccccgagggctgcccactgagccggtttaaggatagcctgggaaacccaacccacatcctgagaatcggcgagagctataaggagaagcagcggaccatccaggccaagaaggaggtggagcagcggagagccggcggctacagccggaagtacgccagcaaagccaagaatctggcagacgatatggtgagaaacaccgctagagatctgctgtactacgccgtgacccaggatgccatgctgatcttcgccaacctgagccggggcttcggccggcagggcaagcggaccttcatggccgagagacagtacacacggatggaggactggctgaccgccaagctggcctacgagggcctgagcaagacctacctgtccaagacactggcccagtacacctccaagacatgcagcaactgtgggtttaccatcaccagcgccgactacgacagggtgctggagaagctgaagaagacagcaacaggctggatgaccacaattaacggcaaggagctgaaggtggagggccagattacctactacaacagatacaagagacagaacgtagtcaaggacctgtccgtcgagctggatagactgagcgaagaatctgtgaacaacgacatctcctcctggacaaagggcagaagcggagaagctctgagcctcctgaagaaaagattctcccatagacccgtgcaggagaagttcgtgtgcctgaactgcggcttcgagacacacgcagccgagcaagccgccctgaacatcgccagatcctggctgttcctgcggagccaggagtacaagaaataccagacaaacaagacaaccggcaacaccgataagagagccttcgtcgagacctggcagtccttttaccggaagaagcttaaggaggtgtggaaacctgccgtgcggtctggcggatctggcggaggctccatggccttcgaggacgtggccgtgtacttcagcgaggaggagtggggcctgctggacaccgcccagagggccctgtacaggcacgtgatgctggagaacttcaccctggtgaccagcctgggcctgagcaccagcaggcccctggtggtgatccagctggagaggggcgaggacccctgggtgcccagcgtgaaggacatgaccctggccaggaacgcctacggcaggaggaccaccggcagcggcggcccaagcagcggcgcccctcctcccagcggcggcagcccagccggctccccaacctctaccgaggagggcacctctgagtccgccacccccgagagcggccctggcacctccaccgagcccagcgagggcagcgcacccggcagccctgccggcagccccacctccacagaggagggaaccagcaccgagcccagcgaaggcagcgccccaggcaccagcaccgagcctagtgagcaggagattaaacggatcaacaagatcagaagaagacttgtgaaagacagcaacaccaagaaggccggcaagacaggccccatgaaaaccctgctggttagagtgatgacacccgatctgagagagcggctggaaaacctgagaaagaagcctgaaaatatcccccagcccatcagcaatacatctagagccaacctgaataagctgctgaccgattacaccgaaatgaagaaggcgatcctgcatgtgtactgggaagagttccagaaggaccctgtgggcctgatgagccgggtggcccagcctgccagcaagaagatcgatcagaacaagctgaaacctgagatggacgagaagggcaacctgaccaccgccggctttgcctgctctcagtgtggccagcccctgttcgtgtacaagctggagcaggtgtctgagaagggcaaggcttacaccaactacttcggacggtgcaatgtggccgagcacgaaaagctgatcctgctggcccagctgaagcccgagaaggatagcgacgaagccgtgacatatagcctgggaaagtttgggcagagggccctggatttctacagcattcatgtgaccaaggagtccacccaccccgtgaagcccctggcccagatcgccggaaacagatacgcctccggacctgtgggaaaggccctgagcgacgcatgtatgggcacaatcgcctccttcctgtctaagtaccaggacatcatcatcgaacaccagaaggtggtgaagggcaaccagaagagactggagagcctgcgggagctggccggcaaggaaaacctggaataccctagcgtgaccctgccacctcagcctcacaccaaggagggcgttgatgcctacaacgaagtgatcgcccgggtgcgaatgtgggtgaacctgaacctgtggcagaagctgaagctaagcagagatgatgccaagcctctgctgagactgaagggattcccttcctttcctctggtcgagagacaggccaacgaagtggactggtgggacatggtgtgtaacgtgaagaagctgatcaacgagaaaaaggaggatggcaaggtgttttggcagaatctggctggctacaagagacaggaagccctgagaccatacctgagcagcgaggaagatcggaagaagggaaagaaattcgctcggtaccagctgggcgacctgctgctgcacctggaaaagaagcacggcgaggactggggaaaggtgtacgacgaggcctgggagcggattgacaagaaagtggaaggcctgagcaagcacatcaagctggaagaggaacggagaagcgaggacgcccagagcaaggccgccctgaccgactggctgcgggctaaggccagcttcgtgatcgagggcctgaaggaggccgacaaggacgagttctgcagatgcgagctgaagctgcagaagtggtacggggacctgcggggaaagcccttcgccatcgaagccgagaacagcatcctggacatcagcggcttcagcaagcagtacaactgtgccttcatctggcagaaggacggcgtgaagaagctgaacctgtacctgatcatcaactacttcaagggcggcaagctgcggttcaagaagatcaaacctgaagccttcgaagccaacagattctacaccgtgatcaacaaaaagagcggcgagatcgtgcccatggaggtgaacttcaacttcgacgaccccaacctgatcatcctgcctctggcctttggcaagagacagggcagagaattcatctggaacgacctgctgtccctggaaaccggcagcctgaagctggccaacggaagagtgatcgagaagacactgtacaacagaagaacccggcaggatgagcctgccctgttcgtggccctgaccttcgagcggcgggaggtcctggactcctccaatatcaaaccaatgaacctgatcggcgtggcaagaggcgaaaacatccccgccgtgatcgccctgaccgaccccgagggctgcccactgagccggtttaaggatagcctgggaaacccaacccacatcctgagaatcggcgagagctataaggagaagcagcggaccatccaggccaagaaggaggtggagcagcggagagccggcggctacagccggaagtacgccagcaaagccaagaatctggcagacgatatggtgagaaacaccgctagagatctgctgtactacgccgtgacccaggatgccatgctgatcttcgccaacctgagccggggcttcggccggcagggcaagcggaccttcatggccgagagacagtacacacggatggaggactggctgaccgccaagctggcctacgagggcctgagcaagacctacctgtccaagacactggcccagtacacctccaagacatgcagcaactgtgggtttaccatcaccagcgccgactacgacagggtgctggagaagctgaagaagacagcaacaggctggatgaccacaattaacggcaaggagctgaaggtggagggccagattacctactacaacagatacaagagacagaacgtagtcaaggacctgtccgtcgagctggatagactgagcgaagaatctgtgaacaacgacatctcctcctggacaaagggcagaagcggagaagctctgagcctcctgaagaaaagattctcccatagacccgtgcaggagaagttcgtgtgcctgaactgcggcttcgagacacacgcagccgagcaagccgccctgaacatcgccagatcctggctgttcctgcggagccaggagtacaagaaataccagacaaacaagacaaccggcaacaccgataagagagccttcgtcgagacctggcagtccttttaccggaagaagcttaaggaggtgtggaaacctgccgtgcggtctggcggatctggcggaggctcctatggccttcgaggacgtggccgtgtacttcagcgaggaggagtggggcctgctggacaccgcccagagggccctgtacaggcacgtgatgctggagaacttcaccctggtgaccagcctgggcctgagcaccagcaggcccctggtggtgatccagctggagaggggcgaggacccctgggtgcccagcgtgaaggacatgaccctggccaggaacgcctacggcaggaggaccaccggcagcggatctggctccggcagcggccccaagaaaaagagaaaagtctaagctgccttctgcggggcttgccttctggccatgcccttcttctctcccttgcacctgtacctcttggtctttgaataaagcctgagtaggaaggctagcaaaaaaaaaaaaaaaaaaaaaaaaaaaaaaaaaaaaaaaaaaaaaaaaaaaaaaaaaaaaaaaaaaaaaaaaaaaaaaaa

SEQ ID NO: 16144 - RNA, 9485 nt, synthetic construct
  source 1..9485: mol_type = other RNA
aggaaataagagagaaaagaagagtaagaagaaatataagagccaccatggcccctaagaagaagcgtaaagtgagccggatggaacgcctcgtctacgaggtgcggcagaagtgcagaaacatcgaggacatctgcatctcctgcggatctctgaacgtgaccctggagcacccactgttcatcggcggcatgtgccagaactgtaaaaactgttttctggagtgtgcctatcaatacgacgatgacggctaccagagctactgcaccatctgttgcggcggaagagaggtgctgatgtgtggaaataacaactgctgccggtgcttctgcgtggaatgcgtggacctgctggtgggccccggcgccgcccaggccgctattaaggaagatccttggaactgctacatgtgcggccacaagggcacatacggcctgctgagacggagagaggactggcctagcagactgcagatgttcttcgccaataaccacgaccaggagttcgacccccctaaggtgtaccctcccgtccccgccgagaagagaaagcccatccgggtcctgagcctgttcgatggcatcgccaccggtctgctggtgctgaaggacctgggcatccaggtggataggtacattgcctccgaggtgtgcgaggactccatcaccgtgggaatggtgcgtcatcagggcaagatcatgtacgtgggcgacgtgcggagcgtgacacagaagcatatccaggagtggggccctttcgacctggtgatcggcggcagcccttgcaatgacctgagcatcgtgaacccagcccggaagggcctgtacgagggaaccggcagactgttcttcgagttttacagactgctgcacgacgcccggcctaaggaaggcgacgaccggcccttcttttggctgttcgagaatgtggtggccatgggagtcagcgacaagcgggatattagccggttcctggagagcaaccccgtgatgatcgatgccaaggaagtgagcgccgcccaccgggccagatacttctggggcaatctgcctggcatgaacagacccctggccagcaccgtgaacgacaagctggagctgcaggagtgcctggagcacggccggatcgccaagttcagcaaggtgagaaccatcaccacccgaagcaacagcatcaaacaaggcaaggaccagcactttcctgtgttcatgaacgagaaggaggacatcctgtggtgtaccgagatggagagagtgttcgggttcccagtccactacacagatgtcagcaacatgtctagactggccagacagagactgctgggaagaagctggtccgtccctgtgatcagacacctgttcgcccctctgaaggagtacttcgcctgcgtgagcagcggcaacagcaacgccaacagccggggccccagcttctctagcggcctggtgccactgtccctgagagggagccacatgggccccatggagatctacaaaaccgtgagcgcctggaagcggcagcctgtgcgcgtgctgagcctgtttcggaatatcgataaagtcctgaaaagcctgggattcctggagagcggctctggctccggcggtggcaccctgaagtacgtggaggatgtgacaaacgtggtcagacgggatgtggagaagtggggccccttcgatctggtgtacggcagcacccaacccctgggcagctcttgtgaccggtgccctggctggtacatgtttcagttccaccggatcctgcagtacgccctgccgagacaggagtcccagcggccattcttttggattttcatggacaacttgctgctgaccgaggatgaccaggaaactaccactcggttcctgcagaccgaagccgtgaccctgcaggacgtgagaggccgggactaccagaacgccatgcgggtgtggtccaacatccctggactgaaaagcaagcacgcacctctgacccctaaagaagaggagtacctgcaggcccaggtgcggagcagaagcaagctggacgcccctaaggtggatctgctggtgaagaattgcctcctgcccctgagagagtacttcaagtatttcagccagaatagtctgcccctgggaggcagcggcggcggcgccctggtgacatttgaggacgtcgccgtgcggttcacccaggaggaatgggctctgctggatccttctcagaaaatcctgtaccgggacgtgatgagagagacataccggaatctgacctccgtgggcatcaactgggaatgttgggaccttgaagcctgcttcagaagcctgggaagaaacctgagagtgcaggtggtgaagagaaagtgcgagctgaccaacagcggcccctgcgccgagggcggcccaagcagcggcgcccctcctcccagcggcggcagcccagccggctccccaacctctaccgaggagggcacctctgagtccgccacccccgagagcggccctggcacctccaccgagcccagcgagggcagcgcacccggcagccctgccggcagccccacctccacagaggagggaaccagcaccgagcccagcgaaggcagcgccccaggcaccagcaccgagcctagtgagcaggagattaaacggatcaacaagatcagaagaagacttgtgaaagacagcaacaccaagaaggccggcaagacaggccccatgaaaaccctgctggttagagtgatgacacccgatctgagagagcggctggaaaacctgagaaagaagcctgaaaatatcccccagcccatcagcaatacatctagagccaacctgaataagctgctgaccgattacaccgaaatgaagaaggcgatcctgcatgtgtactgggaagagttccagaaggaccctgtgggcctgatgagccgggtggcccagcctgccagcaagaagatcgatcagaacaagctgaaacctgagatggacgagaagggcaacctgaccaccgccggctttgcctgctctcagtgtggccagcccctgttcgtgtacaagctggagcaggtgtctgagaagggcaaggcttacaccaactacttcggacggtgcaatgtggccgagcacgaaaagctgatcctgctggcccagctgaagcccgagaaggatagcgacgaagccgtgacatatagcctgggaaagtttgggcagagggccctggatttctacagcattcatgtgaccaaggagtccacccaccccgtgaagcccctggcccagatcgccggaaacagatacgcctccggacctgtgggaaaggccctgagcgacgcatgtatgggcacaatcgcctccttcctgtctaagtaccaggacatcatcatcgaacaccagaaggtggtgaagggcaaccagaagagactggagagcctgcgggagctggccggcaaggaaaacctggaataccctagcgtgaccctgccacctcagcctcacaccaaggagggcgttgatgcctacaacgaagtgatcgcccgggtgcgaatgtgggtgaacctgaacctgtggcagaagctgaagctaagcagagatgatgccaagcctctgctgagactgaagggattcccttcctttcctctggtcgagagacaggccaacgaagtggactggtgggacatggtgtgtaacgtgaagaagctgatcaacgagaaaaaggaggatggcaaggtgttttggcagaatctggctggctacaagagacaggaagccctgagaccatacctgagcagcgaggaagatcggaagaagggaaagaaattcgctcggtaccagctgggcgacctgctgctgcacctggaaaagaagcacggcgaggactggggaaaggtgtacgacgaggcctgggagcggattgacaagaaagtggaaggcctgagcaagcacatcaagctggaagaggaacggagaagcgaggacgcccagagcaaggccgccctgaccgactggctgcgggctaaggccagcttcgtgatcgagggcctgaaggaggccgacaaggacgagttctgcagatgcgagctgaagctgcagaagtggtacggggacctgcggggaaagcccttcgccatcgaagccgagaacagcatcctggacatcagcggcttcagcaagcagtacaactgtgccttcatctggcagaaggacggcgtgaagaagctgaacctgtacctgatcatcaactacttcaagggcggcaagctgcggttcaagaagatcaaacctgaagccttcgaagccaacagattctacaccgtgatcaacaaaaagagcggcgagatcgtgcccatggaggtgaacttcaacttcgacgaccccaacctgatcatcctgcctctggcctttggcaagagacagggcagagaattcatctggaacgacctgctgtccctggaaaccggcagcctgaagctggccaacggaagagtgatcgagaagacactgtacaacagaagaacccggcaggatgagcctgccctgttcgtggccctgaccttcgagcggcgggaggtcctggactcctccaatatcaaaccaatgaacctgatcggcgtggcaagaggcgaaaacatccccgccgtgatcgccctgaccgaccccgagggctgcccactgagccggtttaaggatagcctgggaaacccaacccacatcctgagaatcggcgagagctataaggagaagcagcggaccatccaggccaagaaggaggtggagcagcggagagccggcggctacagccggaagtacgccagcaaagccaagaatctggcagacgatatggtgagaaacaccgctagagatctgctgtactacgccgtgacccaggatgccatgctgatcttcgccaacctgagccggggcttcggccggcagggcaagcggaccttcatggccgagagacagtacacacggatggaggactggctgaccgccaagctggcctacgagggcctgagcaagacctacctgtccaagacactggcccagtacacctccaagacatgcagcaactgtgggtttaccatcaccagcgccgactacgacagggtgctggagaagctgaagaagacagcaacaggctggatgaccacaattaacggcaaggagctgaaggtggagggccagattacctactacaacagatacaagagacagaacgtagtcaaggacctgtccgtcgagctggatagactgagcgaagaatctgtgaacaacgacatctcctcctggacaaagggcagaagcggagaagctctgagcctcctgaagaaaagattctcccatagacccgtgcaggagaagttcgtgtgcctgaactgcggcttcgagacacacgcagccgagcaagccgccctgaacatcgccagatcctggctgttcctgcggagccaggagtacaagaaataccagacaaacaagacaaccggcaacaccgataagagagccttcgtcgagacctggcagtccttttaccggaagaagcttaaggaggtgtggaaacctgccgtgcggtctggcggatctggcggaggctccatggccgccagccaggagagcctgaccttcaaggacgtgagcgtggacttcagcctggaggagtgggagtgcctggaccccgcccagaggaagctgtacagcgacgtgatgctggagaactacagcaacctggtgagcctgggcctggtggtgagcaagcccggcctggtgaccttcctggagcagatgcaggaggtgtgggacgtgagcaggaagaagagcatcagcaccccccccggcaggggcggcccaagcagcggcgcccctcctcccagcggcggcagcccagccggctccccaacctctaccgaggagggcacctctgagtccgccacccccgagagcggccctggcacctccaccgagcccagcgagggcagcgcacccggcagccctgccggcagccccacctccacagaggagggaaccagcaccgagcccagcgaaggcagcgccccaggcaccagcaccgagcctagtgagcaggagattaaacggatcaacaagatcagaagaagacttgtgaaagacagcaacaccaagaaggccggcaagacaggccccatgaaaaccctgctggttagagtgatgacacccgatctgagagagcggctggaaaacctgagaaagaagcctgaaaatatcccccagcccatcagcaatacatctagagccaacctgaataagctgctgaccgattacaccgaaatgaagaaggcgatcctgcatgtgtactgggaagagttccagaaggaccctgtgggcctgatgagccgggtggcccagcctgccagcaagaagatcgatcagaacaagctgaaacctgagatggacgagaagggcaacctgaccaccgccggctttgcctgctctcagtgtggccagcccctgttcgtgtacaagctggagcaggtgtctgagaagggcaaggcttacaccaactacttcggacggtgcaatgtggccgagcacgaaaagctgatcctgctggcccagctgaagcccgagaaggatagcgacgaagccgtgacatatagcctgggaaagtttgggcagagggccctggatttctacagcattcatgtgaccaaggagtccacccaccccgtgaagcccctggcccagatcgccggaaacagatacgcctccggacctgtgggaaaggccctgagcgacgcatgtatgggcacaatcgcctccttcctgtctaagtaccaggacatcatcatcgaacaccagaaggtggtgaagggcaaccagaagagactggagagcctgcgggagctggccggcaaggaaaacctggaataccctagcgtgaccctgccacctcagcctcacaccaaggagggcgttgatgcctacaacgaagtgatcgcccgggtgcgaatgtgggtgaacctgaacctgtggcagaagctgaagctaagcagagatgatgccaagcctctgctgagactgaagggattcccttcctttcctctggtcgagagacaggccaacgaagtggactggtgggacatggtgtgtaacgtgaagaagctgatcaacgagaaaaaggaggatggcaaggtgttttggcagaatctggctggctacaagagacaggaagccctgagaccatacctgagcagcgaggaagatcggaagaagggaaagaaattcgctcggtaccagctgggcgacctgctgctgcacctggaaaagaagcacggcgaggactggggaaaggtgtacgacgaggcctgggagcggattgacaagaaagtggaaggcctgagcaagcacatcaagctggaagaggaacggagaagcgaggacgcccagagcaaggccgccctgaccgactggctgcgggctaaggccagcttcgtgatcgagggcctgaaggaggccgacaaggacgagttctgcagatgcgagctgaagctgcagaagtggtacggggacctgcggggaaagcccttcgccatcgaagccgagaacagcatcctggacatcagcggcttcagcaagcagtacaactgtgccttcatctggcagaaggacggcgtgaagaagctgaacctgtacctgatcatcaactacttcaagggcggcaagctgcggttcaagaagatcaaacctgaagccttcgaagccaacagattctacaccgtgatcaacaaaaagagcggcgagatcgtgcccatggaggtgaacttcaacttcgacgaccccaacctgatcatcctgcctctggcctttggcaagagacagggcagagaattcatctggaacgacctgctgtccctggaaaccggcagcctgaagctggccaacggaagagtgatcgagaagacactgtacaacagaagaacccggcaggatgagcctgccctgttcgtggccctgaccttcgagcggcgggaggtcctggactcctccaatatcaaaccaatgaacctgatcggcgtggcaagaggcgaaaacatccccgccgtgatcgccctgaccgaccccgagggctgcccactgagccggtttaaggatagcctgggaaacccaacccacatcctgagaatcggcgagagctataaggagaagcagcggaccatccaggccaagaaggaggtggagcagcggagagccggcggctacagccggaagtacgccagcaaagccaagaatctggcagacgatatggtgagaaacaccgctagagatctgctgtactacgccgtgacccaggatgccatgctgatcttcgccaacctgagccggggcttcggccggcagggcaagcggaccttcatggccgagagacagtacacacggatggaggactggctgaccgccaagctggcctacgagggcctgagcaagacctacctgtccaagacactggcccagtacacctccaagacatgcagcaactgtgggtttaccatcaccagcgccgactacgacagggtgctggagaagctgaagaagacagcaacaggctggatgaccacaattaacggcaaggagctgaaggtggagggccagattacctactacaacagatacaagagacagaacgtagtcaaggacctgtccgtcgagctggatagactgagcgaagaatctgtgaacaacgacatctcctcctggacaaagggcagaagcggagaagctctgagcctcctgaagaaaagattctcccatagacccgtgcaggagaagttcgtgtgcctgaactgcggcttcgagacacacgcagccgagcaagccgccctgaacatcgccagatcctggctgttcctgcggagccaggagtacaagaaataccagacaaacaagacaaccggcaacaccgataagagagccttcgtcgagacctggcagtccttttaccggaagaagcttaaggaggtgtggaaacctgccgtgcggtctggcggatctggcggaggctcctatggccgccagccaggagagcctgaccttcaaggacgtgagcgtggacttcagcctggaggagtgggagtgcctggaccccgcccagaggaagctgtacagcgacgtgatgctggagaactacagcaacctggtgagcctgggcctggtggtgagcaagcccggcctggtgaccttcctggagcagatgcaggaggtgtgggacgtgagcaggaagaagagcatcagcaccccccccggcaggggatctggctccggcagcggccccaagaaaaagagaaaagtctaagctgccttctgcggggcttgccttctggccatgcccttcttctctcccttgcacctgtacctcttggtctttgaataaagcctgagtaggaaggctagcaaaaaaaaaaaaaaaaaaaaaaaaaaaaaaaaaaaaaaaaaaaaaaaaaaaaaaaaaaaaaaaaaaaaaaaaaaaaaaaa

SEQ ID NO: 16145 - RNA, 9485 nt, synthetic construct
  source 1..9485: mol_type = other RNA
aggaaataagagagaaaagaagagtaagaagaaatataagagccaccatggcccctaagaagaagcgtaaagtgagccggatggaacgcctcgtctacgaggtgcggcagaagtgcagaaacatcgaggacatctgcatctcctgcggatctctgaacgtgaccctggagcacccactgttcatcggcggcatgtgccagaactgtaaaaactgttttctggagtgtgcctatcaatacgacgatgacggctaccagagctactgcaccatctgttgcggcggaagagaggtgctgatgtgtggaaataacaactgctgccggtgcttctgcgtggaatgcgtggacctgctggtgggccccggcgccgcccaggccgctattaaggaagatccttggaactgctacatgtgcggccacaagggcacatacggcctgctgagacggagagaggactggcctagcagactgcagatgttcttcgccaataaccacgaccaggagttcgacccccctaaggtgtaccctcccgtccccgccgagaagagaaagcccatccgggtcctgagcctgttcgatggcatcgccaccggtctgctggtgctgaaggacctgggcatccaggtggataggtacattgcctccgaggtgtgcgaggactccatcaccgtgggaatggtgcgtcatcagggcaagatcatgtacgtgggcgacgtgcggagcgtgacacagaagcatatccaggagtggggccctttcgacctggtgatcggcggcagcccttgcaatgacctgagcatcgtgaacccagcccggaagggcctgtacgagggaaccggcagactgttcttcgagttttacagactgctgcacgacgcccggcctaaggaaggcgacgaccggcccttcttttggctgttcgagaatgtggtggccatgggagtcagcgacaagcgggatattagccggttcctggagagcaaccccgtgatgatcgatgccaaggaagtgagcgccgcccaccgggccagatacttctggggcaatctgcctggcatgaacagacccctggccagcaccgtgaacgacaagctggagctgcaggagtgcctggagcacggccggatcgccaagttcagcaaggtgagaaccatcaccacccgaagcaacagcatcaaacaaggcaaggaccagcactttcctgtgttcatgaacgagaaggaggacatcctgtggtgtaccgagatggagagagtgttcgggttcccagtccactacacagatgtcagcaacatgtctagactggccagacagagactgctgggaagaagctggtccgtccctgtgatcagacacctgttcgcccctctgaaggagtacttcgcctgcgtgagcagcggcaacagcaacgccaacagccggggccccagcttctctagcggcctggtgccactgtccctgagagggagccacatgggccccatggagatctacaaaaccgtgagcgcctggaagcggcagcctgtgcgcgtgctgagcctgtttcggaatatcgataaagtcctgaaaagcctgggattcctggagagcggctctggctccggcggtggcaccctgaagtacgtggaggatgtgacaaacgtggtcagacgggatgtggagaagtggggccccttcgatctggtgtacggcagcacccaacccctgggcagctcttgtgaccggtgccctggctggtacatgtttcagttccaccggatcctgcagtacgccctgccgagacaggagtcccagcggccattcttttggattttcatggacaacttgctgctgaccgaggatgaccaggaaactaccactcggttcctgcagaccgaagccgtgaccctgcaggacgtgagaggccgggactaccagaacgccatgcgggtgtggtccaacatccctggactgaaaagcaagcacgcacctctgacccctaaagaagaggagtacctgcaggcccaggtgcggagcagaagcaagctggacgcccctaaggtggatctgctggtgaagaattgcctcctgcccctgagagagtacttcaagtatttcagccagaatagtctgcccctgggaggcagcggcggcggcgccctggtgacatttgaggacgtcgccgtgcggttcacccaggaggaatgggctctgctggatccttctcagaaaatcctgtaccgggacgtgatgagagagacataccggaatctgacctccgtgggcatcaactgggaatgttgggaccttgaagcctgcttcagaagcctgggaagaaacctgagagtgcaggtggtgaagagaaagtgcgagctgaccaacagcggcccctgcgccgagggcggcccaagcagcggcgcccctcctcccagcggcggcagcccagccggctccccaacctctaccgaggagggcacctctgagtccgccacccccgagagcggccctggcacctccaccgagcccagcgagggcagcgcacccggcagccctgccggcagccccacctccacagaggagggaaccagcaccgagcccagcgaaggcagcgccccaggcaccagcaccgagcctagtgagcaggagattaaacggatcaacaagatcagaagaagacttgtgaaagacagcaacaccaagaaggccggcaagacaggccccatgaaaaccctgctggttagagtgatgacacccgatctgagagagcggctggaaaacctgagaaagaagcctgaaaatatcccccagcccatcagcaatacatctagagccaacctgaataagctgctgaccgattacaccgaaatgaagaaggcgatcctgcatgtgtactgggaagagttccagaaggaccctgtgggcctgatgagccgggtggcccagcctgccagcaagaagatcgatcagaacaagctgaaacctgagatggacgagaagggcaacctgaccaccgccggctttgcctgctctcagtgtggccagcccctgttcgtgtacaagctggagcaggtgtctgagaagggcaaggcttacaccaactacttcggacggtgcaatgtggccgagcacgaaaagctgatcctgctggcccagctgaagcccgagaaggatagcgacgaagccgtgacatatagcctgggaaagtttgggcagagggccctggatttctacagcattcatgtgaccaaggagtccacccaccccgtgaagcccctggcccagatcgccggaaacagatacgcctccggacctgtgggaaaggccctgagcgacgcatgtatgggcacaatcgcctccttcctgtctaagtaccaggacatcatcatcgaacaccagaaggtggtgaagggcaaccagaagagactggagagcctgcgggagctggccggcaaggaaaacctggaataccctagcgtgaccctgccacctcagcctcacaccaaggagggcgttgatgcctacaacgaagtgatcgcccgggtgcgaatgtgggtgaacctgaacctgtggcagaagctgaagctaagcagagatgatgccaagcctctgctgagactgaagggattcccttcctttcctctggtcgagagacaggccaacgaagtggactggtgggacatggtgtgtaacgtgaagaagctgatcaacgagaaaaaggaggatggcaaggtgttttggcagaatctggctggctacaagagacaggaagccctgagaccatacctgagcagcgaggaagatcggaagaagggaaagaaattcgctcggtaccagctgggcgacctgctgctgcacctggaaaagaagcacggcgaggactggggaaaggtgtacgacgaggcctgggagcggattgacaagaaagtggaaggcctgagcaagcacatcaagctggaagaggaacggagaagcgaggacgcccagagcaaggccgccctgaccgactggctgcgggctaaggccagcttcgtgatcgagggcctgaaggaggccgacaaggacgagttctgcagatgcgagctgaagctgcagaagtggtacggggacctgcggggaaagcccttcgccatcgaagccgagaacagcatcctggacatcagcggcttcagcaagcagtacaactgtgccttcatctggcagaaggacggcgtgaagaagctgaacctgtacctgatcatcaactacttcaagggcggcaagctgcggttcaagaagatcaaacctgaagccttcgaagccaacagattctacaccgtgatcaacaaaaagagcggcgagatcgtgcccatggaggtgaacttcaacttcgacgaccccaacctgatcatcctgcctctggcctttggcaagagacagggcagagaattcatctggaacgacctgctgtccctggaaaccggcagcctgaagctggccaacggaagagtgatcgagaagacactgtacaacagaagaacccggcaggatgagcctgccctgttcgtggccctgaccttcgagcggcgggaggtcctggactcctccaatatcaaaccaatgaacctgatcggcgtggcaagaggcgaaaacatccccgccgtgatcgccctgaccgaccccgagggctgcccactgagccggtttaaggatagcctgggaaacccaacccacatcctgagaatcggcgagagctataaggagaagcagcggaccatccaggccaagaaggaggtggagcagcggagagccggcggctacagccggaagtacgccagcaaagccaagaatctggcagacgatatggtgagaaacaccgctagagatctgctgtactacgccgtgacccaggatgccatgctgatcttcgccaacctgagccggggcttcggccggcagggcaagcggaccttcatggccgagagacagtacacacggatggaggactggctgaccgccaagctggcctacgagggcctgagcaagacctacctgtccaagacactggcccagtacacctccaagacatgcagcaactgtgggtttaccatcaccagcgccgactacgacagggtgctggagaagctgaagaagacagcaacaggctggatgaccacaattaacggcaaggagctgaaggtggagggccagattacctactacaacagatacaagagacagaacgtagtcaaggacctgtccgtcgagctggatagactgagcgaagaatctgtgaacaacgacatctcctcctggacaaagggcagaagcggagaagctctgagcctcctgaagaaaagattctcccatagacccgtgcaggagaagttcgtgtgcctgaactgcggcttcgagacacacgcagccgagcaagccgccctgaacatcgccagatcctggctgttcctgcggagccaggagtacaagaaataccagacaaacaagacaaccggcaacaccgataagagagccttcgtcgagacctggcagtccttttaccggaagaagcttaaggaggtgtggaaacctgccgtgcggtctggcggatctggcggaggctccagccagggcctggtgaccttcggcgacgtggccctggacttcagccaggaggagtgggagtggctgaaccccagccagaaggacctgtacagggacgtgatgctggagaactacaggaacctggtgtggctgggcctgagcatcagcaagcccaacatgatcagcctgctggagcagggcaaggagccctggatggtggagagggagatgagccacggccagtgcgccgactgggagagctggggcggcccaagcagcggcgcccctcctcccagcggcggcagcccagccggctccccaacctctaccgaggagggcacctctgagtccgccacccccgagagcggccctggcacctccaccgagcccagcgagggcagcgcacccggcagccctgccggcagccccacctccacagaggagggaaccagcaccgagcccagcgaaggcagcgccccaggcaccagcaccgagcctagtgagcaggagattaaacggatcaacaagatcagaagaagacttgtgaaagacagcaacaccaagaaggccggcaagacaggccccatgaaaaccctgctggttagagtgatgacacccgatctgagagagcggctggaaaacctgagaaagaagcctgaaaatatcccccagcccatcagcaatacatctagagccaacctgaataagctgctgaccgattacaccgaaatgaagaaggcgatcctgcatgtgtactgggaagagttccagaaggaccctgtgggcctgatgagccgggtggcccagcctgccagcaagaagatcgatcagaacaagctgaaacctgagatggacgagaagggcaacctgaccaccgccggctttgcctgctctcagtgtggccagcccctgttcgtgtacaagctggagcaggtgtctgagaagggcaaggcttacaccaactacttcggacggtgcaatgtggccgagcacgaaaagctgatcctgctggcccagctgaagcccgagaaggatagcgacgaagccgtgacatatagcctgggaaagtttgggcagagggccctggatttctacagcattcatgtgaccaaggagtccacccaccccgtgaagcccctggcccagatcgccggaaacagatacgcctccggacctgtgggaaaggccctgagcgacgcatgtatgggcacaatcgcctccttcctgtctaagtaccaggacatcatcatcgaacaccagaaggtggtgaagggcaaccagaagagactggagagcctgcgggagctggccggcaaggaaaacctggaataccctagcgtgaccctgccacctcagcctcacaccaaggagggcgttgatgcctacaacgaagtgatcgcccgggtgcgaatgtgggtgaacctgaacctgtggcagaagctgaagctaagcagagatgatgccaagcctctgctgagactgaagggattcccttcctttcctctggtcgagagacaggccaacgaagtggactggtgggacatggtgtgtaacgtgaagaagctgatcaacgagaaaaaggaggatggcaaggtgttttggcagaatctggctggctacaagagacaggaagccctgagaccatacctgagcagcgaggaagatcggaagaagggaaagaaattcgctcggtaccagctgggcgacctgctgctgcacctggaaaagaagcacggcgaggactggggaaaggtgtacgacgaggcctgggagcggattgacaagaaagtggaaggcctgagcaagcacatcaagctggaagaggaacggagaagcgaggacgcccagagcaaggccgccctgaccgactggctgcgggctaaggccagcttcgtgatcgagggcctgaaggaggccgacaaggacgagttctgcagatgcgagctgaagctgcagaagtggtacggggacctgcggggaaagcccttcgccatcgaagccgagaacagcatcctggacatcagcggcttcagcaagcagtacaactgtgccttcatctggcagaaggacggcgtgaagaagctgaacctgtacctgatcatcaactacttcaagggcggcaagctgcggttcaagaagatcaaacctgaagccttcgaagccaacagattctacaccgtgatcaacaaaaagagcggcgagatcgtgcccatggaggtgaacttcaacttcgacgaccccaacctgatcatcctgcctctggcctttggcaagagacagggcagagaattcatctggaacgacctgctgtccctggaaaccggcagcctgaagctggccaacggaagagtgatcgagaagacactgtacaacagaagaacccggcaggatgagcctgccctgttcgtggccctgaccttcgagcggcgggaggtcctggactcctccaatatcaaaccaatgaacctgatcggcgtggcaagaggcgaaaacatccccgccgtgatcgccctgaccgaccccgagggctgcccactgagccggtttaaggatagcctgggaaacccaacccacatcctgagaatcggcgagagctataaggagaagcagcggaccatccaggccaagaaggaggtggagcagcggagagccggcggctacagccggaagtacgccagcaaagccaagaatctggcagacgatatggtgagaaacaccgctagagatctgctgtactacgccgtgacccaggatgccatgctgatcttcgccaacctgagccggggcttcggccggcagggcaagcggaccttcatggccgagagacagtacacacggatggaggactggctgaccgccaagctggcctacgagggcctgagcaagacctacctgtccaagacactggcccagtacacctccaagacatgcagcaactgtgggtttaccatcaccagcgccgactacgacagggtgctggagaagctgaagaagacagcaacaggctggatgaccacaattaacggcaaggagctgaaggtggagggccagattacctactacaacagatacaagagacagaacgtagtcaaggacctgtccgtcgagctggatagactgagcgaagaatctgtgaacaacgacatctcctcctggacaaagggcagaagcggagaagctctgagcctcctgaagaaaagattctcccatagacccgtgcaggagaagttcgtgtgcctgaactgcggcttcgagacacacgcagccgagcaagccgccctgaacatcgccagatcctggctgttcctgcggagccaggagtacaagaaataccagacaaacaagacaaccggcaacaccgataagagagccttcgtcgagacctggcagtccttttaccggaagaagcttaaggaggtgtggaaacctgccgtgcggtctggcggatctggcggaggctcctagccagggcctggtgaccttcggcgacgtggccctggacttcagccaggaggagtgggagtggctgaaccccagccagaaggacctgtacagggacgtgatgctggagaactacaggaacctggtgtggctgggcctgagcatcagcaagcccaacatgatcagcctgctggagcagggcaaggagccctggatggtggagagggagatgagccacggccagtgcgccgactgggagagctggggatctggctccggcagcggccccaagaaaaagagaaaagtctaagctgccttctgcggggcttgccttctggccatgcccttcttctctcccttgcacctgtacctcttggtctttgaataaagcctgagtaggaaggctagcaaaaaaaaaaaaaaaaaaaaaaaaaaaaaaaaaaaaaaaaaaaaaaaaaaaaaaaaaaaaaaaaaaaaaaaaaaaaaaaa

SEQ ID NO: 16146 - RNA, 9485 nt, synthetic construct
  source 1..9485: mol_type = other RNA
aggaaataagagagaaaagaagagtaagaagaaatataagagccaccatggcccctaagaagaagcgtaaagtgagccggatggaacgcctcgtctacgaggtgcggcagaagtgcagaaacatcgaggacatctgcatctcctgcggatctctgaacgtgaccctggagcacccactgttcatcggcggcatgtgccagaactgtaaaaactgttttctggagtgtgcctatcaatacgacgatgacggctaccagagctactgcaccatctgttgcggcggaagagaggtgctgatgtgtggaaataacaactgctgccggtgcttctgcgtggaatgcgtggacctgctggtgggccccggcgccgcccaggccgctattaaggaagatccttggaactgctacatgtgcggccacaagggcacatacggcctgctgagacggagagaggactggcctagcagactgcagatgttcttcgccaataaccacgaccaggagttcgacccccctaaggtgtaccctcccgtccccgccgagaagagaaagcccatccgggtcctgagcctgttcgatggcatcgccaccggtctgctggtgctgaaggacctgggcatccaggtggataggtacattgcctccgaggtgtgcgaggactccatcaccgtgggaatggtgcgtcatcagggcaagatcatgtacgtgggcgacgtgcggagcgtgacacagaagcatatccaggagtggggccctttcgacctggtgatcggcggcagcccttgcaatgacctgagcatcgtgaacccagcccggaagggcctgtacgagggaaccggcagactgttcttcgagttttacagactgctgcacgacgcccggcctaaggaaggcgacgaccggcccttcttttggctgttcgagaatgtggtggccatgggagtcagcgacaagcgggatattagccggttcctggagagcaaccccgtgatgatcgatgccaaggaagtgagcgccgcccaccgggccagatacttctggggcaatctgcctggcatgaacagacccctggccagcaccgtgaacgacaagctggagctgcaggagtgcctggagcacggccggatcgccaagttcagcaaggtgagaaccatcaccacccgaagcaacagcatcaaacaaggcaaggaccagcactttcctgtgttcatgaacgagaaggaggacatcctgtggtgtaccgagatggagagagtgttcgggttcccagtccactacacagatgtcagcaacatgtctagactggccagacagagactgctgggaagaagctggtccgtccctgtgatcagacacctgttcgcccctctgaaggagtacttcgcctgcgtgagcagcggcaacagcaacgccaacagccggggccccagcttctctagcggcctggtgccactgtccctgagagggagccacatgggccccatggagatctacaaaaccgtgagcgcctggaagcggcagcctgtgcgcgtgctgagcctgtttcggaatatcgataaagtcctgaaaagcctgggattcctggagagcggctctggctccggcggtggcaccctgaagtacgtggaggatgtgacaaacgtggtcagacgggatgtggagaagtggggccccttcgatctggtgtacggcagcacccaacccctgggcagctcttgtgaccggtgccctggctggtacatgtttcagttccaccggatcctgcagtacgccctgccgagacaggagtcccagcggccattcttttggattttcatggacaacttgctgctgaccgaggatgaccaggaaactaccactcggttcctgcagaccgaagccgtgaccctgcaggacgtgagaggccgggactaccagaacgccatgcgggtgtggtccaacatccctggactgaaaagcaagcacgcacctctgacccctaaagaagaggagtacctgcaggcccaggtgcggagcagaagcaagctggacgcccctaaggtggatctgctggtgaagaattgcctcctgcccctgagagagtacttcaagtatttcagccagaatagtctgcccctgggaggcagcggcggcggcgccctggtgacatttgaggacgtcgccgtgcggttcacccaggaggaatgggctctgctggatccttctcagaaaatcctgtaccgggacgtgatgagagagacataccggaatctgacctccgtgggcatcaactgggaatgttgggaccttgaagcctgcttcagaagcctgggaagaaacctgagagtgcaggtggtgaagagaaagtgcgagctgaccaacagcggcccctgcgccgagggcggcccaagcagcggcgcccctcctcccagcggcggcagcccagccggctccccaacctctaccgaggagggcacctctgagtccgccacccccgagagcggccctggcacctccaccgagcccagcgagggcagcgcacccggcagccctgccggcagccccacctccacagaggagggaaccagcaccgagcccagcgaaggcagcgccccaggcaccagcaccgagcctagtgagcaggagattaaacggatcaacaagatcagaagaagacttgtgaaagacagcaacaccaagaaggccggcaagacaggccccatgaaaaccctgctggttagagtgatgacacccgatctgagagagcggctggaaaacctgagaaagaagcctgaaaatatcccccagcccatcagcaatacatctagagccaacctgaataagctgctgaccgattacaccgaaatgaagaaggcgatcctgcatgtgtactgggaagagttccagaaggaccctgtgggcctgatgagccgggtggcccagcctgccagcaagaagatcgatcagaacaagctgaaacctgagatggacgagaagggcaacctgaccaccgccggctttgcctgctctcagtgtggccagcccctgttcgtgtacaagctggagcaggtgtctgagaagggcaaggcttacaccaactacttcggacggtgcaatgtggccgagcacgaaaagctgatcctgctggcccagctgaagcccgagaaggatagcgacgaagccgtgacatatagcctgggaaagtttgggcagagggccctggatttctacagcattcatgtgaccaaggagtccacccaccccgtgaagcccctggcccagatcgccggaaacagatacgcctccggacctgtgggaaaggccctgagcgacgcatgtatgggcacaatcgcctccttcctgtctaagtaccaggacatcatcatcgaacaccagaaggtggtgaagggcaaccagaagagactggagagcctgcgggagctggccggcaaggaaaacctggaataccctagcgtgaccctgccacctcagcctcacaccaaggagggcgttgatgcctacaacgaagtgatcgcccgggtgcgaatgtgggtgaacctgaacctgtggcagaagctgaagctaagcagagatgatgccaagcctctgctgagactgaagggattcccttcctttcctctggtcgagagacaggccaacgaagtggactggtgggacatggtgtgtaacgtgaagaagctgatcaacgagaaaaaggaggatggcaaggtgttttggcagaatctggctggctacaagagacaggaagccctgagaccatacctgagcagcgaggaagatcggaagaagggaaagaaattcgctcggtaccagctgggcgacctgctgctgcacctggaaaagaagcacggcgaggactggggaaaggtgtacgacgaggcctgggagcggattgacaagaaagtggaaggcctgagcaagcacatcaagctggaagaggaacggagaagcgaggacgcccagagcaaggccgccctgaccgactggctgcgggctaaggccagcttcgtgatcgagggcctgaaggaggccgacaaggacgagttctgcagatgcgagctgaagctgcagaagtggtacggggacctgcggggaaagcccttcgccatcgaagccgagaacagcatcctggacatcagcggcttcagcaagcagtacaactgtgccttcatctggcagaaggacggcgtgaagaagctgaacctgtacctgatcatcaactacttcaagggcggcaagctgcggttcaagaagatcaaacctgaagccttcgaagccaacagattctacaccgtgatcaacaaaaagagcggcgagatcgtgcccatggaggtgaacttcaacttcgacgaccccaacctgatcatcctgcctctggcctttggcaagagacagggcagagaattcatctggaacgacctgctgtccctggaaaccggcagcctgaagctggccaacggaagagtgatcgagaagacactgtacaacagaagaacccggcaggatgagcctgccctgttcgtggccctgaccttcgagcggcgggaggtcctggactcctccaatatcaaaccaatgaacctgatcggcgtggcaagaggcgaaaacatccccgccgtgatcgccctgaccgaccccgagggctgcccactgagccggtttaaggatagcctgggaaacccaacccacatcctgagaatcggcgagagctataaggagaagcagcggaccatccaggccaagaaggaggtggagcagcggagagccggcggctacagccggaagtacgccagcaaagccaagaatctggcagacgatatggtgagaaacaccgctagagatctgctgtactacgccgtgacccaggatgccatgctgatcttcgccaacctgagccggggcttcggccggcagggcaagcggaccttcatggccgagagacagtacacacggatggaggactggctgaccgccaagctggcctacgagggcctgagcaagacctacctgtccaagacactggcccagtacacctccaagacatgcagcaactgtgggtttaccatcaccagcgccgactacgacagggtgctggagaagctgaagaagacagcaacaggctggatgaccacaattaacggcaaggagctgaaggtggagggccagattacctactacaacagatacaagagacagaacgtagtcaaggacctgtccgtcgagctggatagactgagcgaagaatctgtgaacaacgacatctcctcctggacaaagggcagaagcggagaagctctgagcctcctgaagaaaagattctcccatagacccgtgcaggagaagttcgtgtgcctgaactgcggcttcgagacacacgcagccgagcaagccgccctgaacatcgccagatcctggctgttcctgcggagccaggagtacaagaaataccagacaaacaagacaaccggcaacaccgataagagagccttcgtcgagacctggcagtccttttaccggaagaagcttaaggaggtgtggaaacctgccgtgcggtctggcggatctggcggaggctccgagaagggccccctgaccttcagggacgtggccatcgagttcagcctggaggagtggcagtgcctggacaccgcccagcaggacctgtacaggagggtgatgctggagaactacaggaacctggtgttcctgggcatcgccgtgagcaaccccgacctgatcacctgcctggagcagggcaaggagccctggaacatgaagaggcacgccatggccgacgagccccccgtgatgtacagccacggcggcccaagcagcggcgcccctcctcccagcggcggcagcccagccggctccccaacctctaccgaggagggcacctctgagtccgccacccccgagagcggccctggcacctccaccgagcccagcgagggcagcgcacccggcagccctgccggcagccccacctccacagaggagggaaccagcaccgagcccagcgaaggcagcgccccaggcaccagcaccgagcctagtgagcaggagattaaacggatcaacaagatcagaagaagacttgtgaaagacagcaacaccaagaaggccggcaagacaggccccatgaaaaccctgctggttagagtgatgacacccgatctgagagagcggctggaaaacctgagaaagaagcctgaaaatatcccccagcccatcagcaatacatctagagccaacctgaataagctgctgaccgattacaccgaaatgaagaaggcgatcctgcatgtgtactgggaagagttccagaaggaccctgtgggcctgatgagccgggtggcccagcctgccagcaagaagatcgatcagaacaagctgaaacctgagatggacgagaagggcaacctgaccaccgccggctttgcctgctctcagtgtggccagcccctgttcgtgtacaagctggagcaggtgtctgagaagggcaaggcttacaccaactacttcggacggtgcaatgtggccgagcacgaaaagctgatcctgctggcccagctgaagcccgagaaggatagcgacgaagccgtgacatatagcctgggaaagtttgggcagagggccctggatttctacagcattcatgtgaccaaggagtccacccaccccgtgaagcccctggcccagatcgccggaaacagatacgcctccggacctgtgggaaaggccctgagcgacgcatgtatgggcacaatcgcctccttcctgtctaagtaccaggacatcatcatcgaacaccagaaggtggtgaagggcaaccagaagagactggagagcctgcgggagctggccggcaaggaaaacctggaataccctagcgtgaccctgccacctcagcctcacaccaaggagggcgttgatgcctacaacgaagtgatcgcccgggtgcgaatgtgggtgaacctgaacctgtggcagaagctgaagctaagcagagatgatgccaagcctctgctgagactgaagggattcccttcctttcctctggtcgagagacaggccaacgaagtggactggtgggacatggtgtgtaacgtgaagaagctgatcaacgagaaaaaggaggatggcaaggtgttttggcagaatctggctggctacaagagacaggaagccctgagaccatacctgagcagcgaggaagatcggaagaagggaaagaaattcgctcggtaccagctgggcgacctgctgctgcacctggaaaagaagcacggcgaggactggggaaaggtgtacgacgaggcctgggagcggattgacaagaaagtggaaggcctgagcaagcacatcaagctggaagaggaacggagaagcgaggacgcccagagcaaggccgccctgaccgactggctgcgggctaaggccagcttcgtgatcgagggcctgaaggaggccgacaaggacgagttctgcagatgcgagctgaagctgcagaagtggtacggggacctgcggggaaagcccttcgccatcgaagccgagaacagcatcctggacatcagcggcttcagcaagcagtacaactgtgccttcatctggcagaaggacggcgtgaagaagctgaacctgtacctgatcatcaactacttcaagggcggcaagctgcggttcaagaagatcaaacctgaagccttcgaagccaacagattctacaccgtgatcaacaaaaagagcggcgagatcgtgcccatggaggtgaacttcaacttcgacgaccccaacctgatcatcctgcctctggcctttggcaagagacagggcagagaattcatctggaacgacctgctgtccctggaaaccggcagcctgaagctggccaacggaagagtgatcgagaagacactgtacaacagaagaacccggcaggatgagcctgccctgttcgtggccctgaccttcgagcggcgggaggtcctggactcctccaatatcaaaccaatgaacctgatcggcgtggcaagaggcgaaaacatccccgccgtgatcgccctgaccgaccccgagggctgcccactgagccggtttaaggatagcctgggaaacccaacccacatcctgagaatcggcgagagctataaggagaagcagcggaccatccaggccaagaaggaggtggagcagcggagagccggcggctacagccggaagtacgccagcaaagccaagaatctggcagacgatatggtgagaaacaccgctagagatctgctgtactacgccgtgacccaggatgccatgctgatcttcgccaacctgagccggggcttcggccggcagggcaagcggaccttcatggccgagagacagtacacacggatggaggactggctgaccgccaagctggcctacgagggcctgagcaagacctacctgtccaagacactggcccagtacacctccaagacatgcagcaactgtgggtttaccatcaccagcgccgactacgacagggtgctggagaagctgaagaagacagcaacaggctggatgaccacaattaacggcaaggagctgaaggtggagggccagattacctactacaacagatacaagagacagaacgtagtcaaggacctgtccgtcgagctggatagactgagcgaagaatctgtgaacaacgacatctcctcctggacaaagggcagaagcggagaagctctgagcctcctgaagaaaagattctcccatagacccgtgcaggagaagttcgtgtgcctgaactgcggcttcgagacacacgcagccgagcaagccgccctgaacatcgccagatcctggctgttcctgcggagccaggagtacaagaaataccagacaaacaagacaaccggcaacaccgataagagagccttcgtcgagacctggcagtccttttaccggaagaagcttaaggaggtgtggaaacctgccgtgcggtctggcggatctggcggaggctcctgagaagggccccctgaccttcagggacgtggccatcgagttcagcctggaggagtggcagtgcctggacaccgcccagcaggacctgtacaggagggtgatgctggagaactacaggaacctggtgttcctgggcatcgccgtgagcaaccccgacctgatcacctgcctggagcagggcaaggagccctggaacatgaagaggcacgccatggccgacgagccccccgtgatgtacagccacggatctggctccggcagcggccccaagaaaaagagaaaagtctaagctgccttctgcggggcttgccttctggccatgcccttcttctctcccttgcacctgtacctcttggtctttgaataaagcctgagtaggaaggctagcaaaaaaaaaaaaaaaaaaaaaaaaaaaaaaaaaaaaaaaaaaaaaaaaaaaaaaaaaaaaaaaaaaaaaaaaaaaaaaaa

SEQ ID NO: 16147 - RNA, 9485 nt, synthetic construct
  source 1..9485: mol_type = other RNA
aggaaataagagagaaaagaagagtaagaagaaatataagagccaccatggcccctaagaagaagcgtaaagtgagccggatggaacgcctcgtctacgaggtgcggcagaagtgcagaaacatcgaggacatctgcatctcctgcggatctctgaacgtgaccctggagcacccactgttcatcggcggcatgtgccagaactgtaaaaactgttttctggagtgtgcctatcaatacgacgatgacggctaccagagctactgcaccatctgttgcggcggaagagaggtgctgatgtgtggaaataacaactgctgccggtgcttctgcgtggaatgcgtggacctgctggtgggccccggcgccgcccaggccgctattaaggaagatccttggaactgctacatgtgcggccacaagggcacatacggcctgctgagacggagagaggactggcctagcagactgcagatgttcttcgccaataaccacgaccaggagttcgacccccctaaggtgtaccctcccgtccccgccgagaagagaaagcccatccgggtcctgagcctgttcgatggcatcgccaccggtctgctggtgctgaaggacctgggcatccaggtggataggtacattgcctccgaggtgtgcgaggactccatcaccgtgggaatggtgcgtcatcagggcaagatcatgtacgtgggcgacgtgcggagcgtgacacagaagcatatccaggagtggggccctttcgacctggtgatcggcggcagcccttgcaatgacctgagcatcgtgaacccagcccggaagggcctgtacgagggaaccggcagactgttcttcgagttttacagactgctgcacgacgcccggcctaaggaaggcgacgaccggcccttcttttggctgttcgagaatgtggtggccatgggagtcagcgacaagcgggatattagccggttcctggagagcaaccccgtgatgatcgatgccaaggaagtgagcgccgcccaccgggccagatacttctggggcaatctgcctggcatgaacagacccctggccagcaccgtgaacgacaagctggagctgcaggagtgcctggagcacggccggatcgccaagttcagcaaggtgagaaccatcaccacccgaagcaacagcatcaaacaaggcaaggaccagcactttcctgtgttcatgaacgagaaggaggacatcctgtggtgtaccgagatggagagagtgttcgggttcccagtccactacacagatgtcagcaacatgtctagactggccagacagagactgctgggaagaagctggtccgtccctgtgatcagacacctgttcgcccctctgaaggagtacttcgcctgcgtgagcagcggcaacagcaacgccaacagccggggccccagcttctctagcggcctggtgccactgtccctgagagggagccacatgggccccatggagatctacaaaaccgtgagcgcctggaagcggcagcctgtgcgcgtgctgagcctgtttcggaatatcgataaagtcctgaaaagcctgggattcctggagagcggctctggctccggcggtggcaccctgaagtacgtggaggatgtgacaaacgtggtcagacgggatgtggagaagtggggccccttcgatctggtgtacggcagcacccaacccctgggcagctcttgtgaccggtgccctggctggtacatgtttcagttccaccggatcctgcagtacgccctgccgagacaggagtcccagcggccattcttttggattttcatggacaacttgctgctgaccgaggatgaccaggaaactaccactcggttcctgcagaccgaagccgtgaccctgcaggacgtgagaggccgggactaccagaacgccatgcgggtgtggtccaacatccctggactgaaaagcaagcacgcacctctgacccctaaagaagaggagtacctgcaggcccaggtgcggagcagaagcaagctggacgcccctaaggtggatctgctggtgaagaattgcctcctgcccctgagagagtacttcaagtatttcagccagaatagtctgcccctgggaggcagcggcggcggcgccctggtgacatttgaggacgtcgccgtgcggttcacccaggaggaatgggctctgctggatccttctcagaaaatcctgtaccgggacgtgatgagagagacataccggaatctgacctccgtgggcatcaactgggaatgttgggaccttgaagcctgcttcagaagcctgggaagaaacctgagagtgcaggtggtgaagagaaagtgcgagctgaccaacagcggcccctgcgccgagggcggcccaagcagcggcgcccctcctcccagcggcggcagcccagccggctccccaacctctaccgaggagggcacctctgagtccgccacccccgagagcggccctggcacctccaccgagcccagcgagggcagcgcacccggcagccctgccggcagccccacctccacagaggagggaaccagcaccgagcccagcgaaggcagcgccccaggcaccagcaccgagcctagtgagcaggagattaaacggatcaacaagatcagaagaagacttgtgaaagacagcaacaccaagaaggccggcaagacaggccccatgaaaaccctgctggttagagtgatgacacccgatctgagagagcggctggaaaacctgagaaagaagcctgaaaatatcccccagcccatcagcaatacatctagagccaacctgaataagctgctgaccgattacaccgaaatgaagaaggcgatcctgcatgtgtactgggaagagttccagaaggaccctgtgggcctgatgagccgggtggcccagcctgccagcaagaagatcgatcagaacaagctgaaacctgagatggacgagaagggcaacctgaccaccgccggctttgcctgctctcagtgtggccagcccctgttcgtgtacaagctggagcaggtgtctgagaagggcaaggcttacaccaactacttcggacggtgcaatgtggccgagcacgaaaagctgatcctgctggcccagctgaagcccgagaaggatagcgacgaagccgtgacatatagcctgggaaagtttgggcagagggccctggatttctacagcattcatgtgaccaaggagtccacccaccccgtgaagcccctggcccagatcgccggaaacagatacgcctccggacctgtgggaaaggccctgagcgacgcatgtatgggcacaatcgcctccttcctgtctaagtaccaggacatcatcatcgaacaccagaaggtggtgaagggcaaccagaagagactggagagcctgcgggagctggccggcaaggaaaacctggaataccctagcgtgaccctgccacctcagcctcacaccaaggagggcgttgatgcctacaacgaagtgatcgcccgggtgcgaatgtgggtgaacctgaacctgtggcagaagctgaagctaagcagagatgatgccaagcctctgctgagactgaagggattcccttcctttcctctggtcgagagacaggccaacgaagtggactggtgggacatggtgtgtaacgtgaagaagctgatcaacgagaaaaaggaggatggcaaggtgttttggcagaatctggctggctacaagagacaggaagccctgagaccatacctgagcagcgaggaagatcggaagaagggaaagaaattcgctcggtaccagctgggcgacctgctgctgcacctggaaaagaagcacggcgaggactggggaaaggtgtacgacgaggcctgggagcggattgacaagaaagtggaaggcctgagcaagcacatcaagctggaagaggaacggagaagcgaggacgcccagagcaaggccgccctgaccgactggctgcgggctaaggccagcttcgtgatcgagggcctgaaggaggccgacaaggacgagttctgcagatgcgagctgaagctgcagaagtggtacggggacctgcggggaaagcccttcgccatcgaagccgagaacagcatcctggacatcagcggcttcagcaagcagtacaactgtgccttcatctggcagaaggacggcgtgaagaagctgaacctgtacctgatcatcaactacttcaagggcggcaagctgcggttcaagaagatcaaacctgaagccttcgaagccaacagattctacaccgtgatcaacaaaaagagcggcgagatcgtgcccatggaggtgaacttcaacttcgacgaccccaacctgatcatcctgcctctggcctttggcaagagacagggcagagaattcatctggaacgacctgctgtccctggaaaccggcagcctgaagctggccaacggaagagtgatcgagaagacactgtacaacagaagaacccggcaggatgagcctgccctgttcgtggccctgaccttcgagcggcgggaggtcctggactcctccaatatcaaaccaatgaacctgatcggcgtggcaagaggcgaaaacatccccgccgtgatcgccctgaccgaccccgagggctgcccactgagccggtttaaggatagcctgggaaacccaacccacatcctgagaatcggcgagagctataaggagaagcagcggaccatccaggccaagaaggaggtggagcagcggagagccggcggctacagccggaagtacgccagcaaagccaagaatctggcagacgatatggtgagaaacaccgctagagatctgctgtactacgccgtgacccaggatgccatgctgatcttcgccaacctgagccggggcttcggccggcagggcaagcggaccttcatggccgagagacagtacacacggatggaggactggctgaccgccaagctggcctacgagggcctgagcaagacctacctgtccaagacactggcccagtacacctccaagacatgcagcaactgtgggtttaccatcaccagcgccgactacgacagggtgctggagaagctgaagaagacagcaacaggctggatgaccacaattaacggcaaggagctgaaggtggagggccagattacctactacaacagatacaagagacagaacgtagtcaaggacctgtccgtcgagctggatagactgagcgaagaatctgtgaacaacgacatctcctcctggacaaagggcagaagcggagaagctctgagcctcctgaagaaaagattctcccatagacccgtgcaggagaagttcgtgtgcctgaactgcggcttcgagacacacgcagccgagcaagccgccctgaacatcgccagatcctggctgttcctgcggagccaggagtacaagaaataccagacaaacaagacaaccggcaacaccgataagagagccttcgtcgagacctggcagtccttttaccggaagaagcttaaggaggtgtggaaacctgccgtgcggtctggcggatctggcggaggctccctgagcacccagctgaccgtggaggacgtggacatcaagttcacccccgaggagtgggagtgcctggaccccgcccagaggaccctgtacagggacgtgatggaggagacctacaggaacctgctgagcgtgggcatcggccccaggctgcccgactgcagcagctgcatccacatgaccaagaagctgcaggccaaggagaacagcggcaagggcgagatcctgcagagggtgatgtgcggcggcggcccaagcagcggcgcccctcctcccagcggcggcagcccagccggctccccaacctctaccgaggagggcacctctgagtccgccacccccgagagcggccctggcacctccaccgagcccagcgagggcagcgcacccggcagccctgccggcagccccacctccacagaggagggaaccagcaccgagcccagcgaaggcagcgccccaggcaccagcaccgagcctagtgagcaggagattaaacggatcaacaagatcagaagaagacttgtgaaagacagcaacaccaagaaggccggcaagacaggccccatgaaaaccctgctggttagagtgatgacacccgatctgagagagcggctggaaaacctgagaaagaagcctgaaaatatcccccagcccatcagcaatacatctagagccaacctgaataagctgctgaccgattacaccgaaatgaagaaggcgatcctgcatgtgtactgggaagagttccagaaggaccctgtgggcctgatgagccgggtggcccagcctgccagcaagaagatcgatcagaacaagctgaaacctgagatggacgagaagggcaacctgaccaccgccggctttgcctgctctcagtgtggccagcccctgttcgtgtacaagctggagcaggtgtctgagaagggcaaggcttacaccaactacttcggacggtgcaatgtggccgagcacgaaaagctgatcctgctggcccagctgaagcccgagaaggatagcgacgaagccgtgacatatagcctgggaaagtttgggcagagggccctggatttctacagcattcatgtgaccaaggagtccacccaccccgtgaagcccctggcccagatcgccggaaacagatacgcctccggacctgtgggaaaggccctgagcgacgcatgtatgggcacaatcgcctccttcctgtctaagtaccaggacatcatcatcgaacaccagaaggtggtgaagggcaaccagaagagactggagagcctgcgggagctggccggcaaggaaaacctggaataccctagcgtgaccctgccacctcagcctcacaccaaggagggcgttgatgcctacaacgaagtgatcgcccgggtgcgaatgtgggtgaacctgaacctgtggcagaagctgaagctaagcagagatgatgccaagcctctgctgagactgaagggattcccttcctttcctctggtcgagagacaggccaacgaagtggactggtgggacatggtgtgtaacgtgaagaagctgatcaacgagaaaaaggaggatggcaaggtgttttggcagaatctggctggctacaagagacaggaagccctgagaccatacctgagcagcgaggaagatcggaagaagggaaagaaattcgctcggtaccagctgggcgacctgctgctgcacctggaaaagaagcacggcgaggactggggaaaggtgtacgacgaggcctgggagcggattgacaagaaagtggaaggcctgagcaagcacatcaagctggaagaggaacggagaagcgaggacgcccagagcaaggccgccctgaccgactggctgcgggctaaggccagcttcgtgatcgagggcctgaaggaggccgacaaggacgagttctgcagatgcgagctgaagctgcagaagtggtacggggacctgcggggaaagcccttcgccatcgaagccgagaacagcatcctggacatcagcggcttcagcaagcagtacaactgtgccttcatctggcagaaggacggcgtgaagaagctgaacctgtacctgatcatcaactacttcaagggcggcaagctgcggttcaagaagatcaaacctgaagccttcgaagccaacagattctacaccgtgatcaacaaaaagagcggcgagatcgtgcccatggaggtgaacttcaacttcgacgaccccaacctgatcatcctgcctctggcctttggcaagagacagggcagagaattcatctggaacgacctgctgtccctggaaaccggcagcctgaagctggccaacggaagagtgatcgagaagacactgtacaacagaagaacccggcaggatgagcctgccctgttcgtggccctgaccttcgagcggcgggaggtcctggactcctccaatatcaaaccaatgaacctgatcggcgtggcaagaggcgaaaacatccccgccgtgatcgccctgaccgaccccgagggctgcccactgagccggtttaaggatagcctgggaaacccaacccacatcctgagaatcggcgagagctataaggagaagcagcggaccatccaggccaagaaggaggtggagcagcggagagccggcggctacagccggaagtacgccagcaaagccaagaatctggcagacgatatggtgagaaacaccgctagagatctgctgtactacgccgtgacccaggatgccatgctgatcttcgccaacctgagccggggcttcggccggcagggcaagcggaccttcatggccgagagacagtacacacggatggaggactggctgaccgccaagctggcctacgagggcctgagcaagacctacctgtccaagacactggcccagtacacctccaagacatgcagcaactgtgggtttaccatcaccagcgccgactacgacagggtgctggagaagctgaagaagacagcaacaggctggatgaccacaattaacggcaaggagctgaaggtggagggccagattacctactacaacagatacaagagacagaacgtagtcaaggacctgtccgtcgagctggatagactgagcgaagaatctgtgaacaacgacatctcctcctggacaaagggcagaagcggagaagctctgagcctcctgaagaaaagattctcccatagacccgtgcaggagaagttcgtgtgcctgaactgcggcttcgagacacacgcagccgagcaagccgccctgaacatcgccagatcctggctgttcctgcggagccaggagtacaagaaataccagacaaacaagacaaccggcaacaccgataagagagccttcgtcgagacctggcagtccttttaccggaagaagcttaaggaggtgtggaaacctgccgtgcggtctggcggatctggcggaggctcctctgagcacccagctgaccgtggaggacgtggacatcaagttcacccccgaggagtgggagtgcctggaccccgcccagaggaccctgtacagggacgtgatggaggagacctacaggaacctgctgagcgtgggcatcggccccaggctgcccgactgcagcagctgcatccacatgaccaagaagctgcaggccaaggagaacagcggcaagggcgagatcctgcagagggtgatgtgcggcggatctggctccggcagcggccccaagaaaaagagaaaagtctaagctgccttctgcggggcttgccttctggccatgcccttcttctctcccttgcacctgtacctcttggtctttgaataaagcctgagtaggaaggctagcaaaaaaaaaaaaaaaaaaaaaaaaaaaaaaaaaaaaaaaaaaaaaaaaaaaaaaaaaaaaaaaaaaaaaaaaaaaaaaaa

SEQ ID NO: 16148 - RNA, 9485 nt, synthetic construct
  source 1..9485: mol_type = other RNA
aggaaataagagagaaaagaagagtaagaagaaatataagagccaccatggcccctaagaagaagcgtaaagtgagccggatggaacgcctcgtctacgaggtgcggcagaagtgcagaaacatcgaggacatctgcatctcctgcggatctctgaacgtgaccctggagcacccactgttcatcggcggcatgtgccagaactgtaaaaactgttttctggagtgtgcctatcaatacgacgatgacggctaccagagctactgcaccatctgttgcggcggaagagaggtgctgatgtgtggaaataacaactgctgccggtgcttctgcgtggaatgcgtggacctgctggtgggccccggcgccgcccaggccgctattaaggaagatccttggaactgctacatgtgcggccacaagggcacatacggcctgctgagacggagagaggactggcctagcagactgcagatgttcttcgccaataaccacgaccaggagttcgacccccctaaggtgtaccctcccgtccccgccgagaagagaaagcccatccgggtcctgagcctgttcgatggcatcgccaccggtctgctggtgctgaaggacctgggcatccaggtggataggtacattgcctccgaggtgtgcgaggactccatcaccgtgggaatggtgcgtcatcagggcaagatcatgtacgtgggcgacgtgcggagcgtgacacagaagcatatccaggagtggggccctttcgacctggtgatcggcggcagcccttgcaatgacctgagcatcgtgaacccagcccggaagggcctgtacgagggaaccggcagactgttcttcgagttttacagactgctgcacgacgcccggcctaaggaaggcgacgaccggcccttcttttggctgttcgagaatgtggtggccatgggagtcagcgacaagcgggatattagccggttcctggagagcaaccccgtgatgatcgatgccaaggaagtgagcgccgcccaccgggccagatacttctggggcaatctgcctggcatgaacagacccctggccagcaccgtgaacgacaagctggagctgcaggagtgcctggagcacggccggatcgccaagttcagcaaggtgagaaccatcaccacccgaagcaacagcatcaaacaaggcaaggaccagcactttcctgtgttcatgaacgagaaggaggacatcctgtggtgtaccgagatggagagagtgttcgggttcccagtccactacacagatgtcagcaacatgtctagactggccagacagagactgctgggaagaagctggtccgtccctgtgatcagacacctgttcgcccctctgaaggagtacttcgcctgcgtgagcagcggcaacagcaacgccaacagccggggccccagcttctctagcggcctggtgccactgtccctgagagggagccacatgggccccatggagatctacaaaaccgtgagcgcctggaagcggcagcctgtgcgcgtgctgagcctgtttcggaatatcgataaagtcctgaaaagcctgggattcctggagagcggctctggctccggcggtggcaccctgaagtacgtggaggatgtgacaaacgtggtcagacgggatgtggagaagtggggccccttcgatctggtgtacggcagcacccaacccctgggcagctcttgtgaccggtgccctggctggtacatgtttcagttccaccggatcctgcagtacgccctgccgagacaggagtcccagcggccattcttttggattttcatggacaacttgctgctgaccgaggatgaccaggaaactaccactcggttcctgcagaccgaagccgtgaccctgcaggacgtgagaggccgggactaccagaacgccatgcgggtgtggtccaacatccctggactgaaaagcaagcacgcacctctgacccctaaagaagaggagtacctgcaggcccaggtgcggagcagaagcaagctggacgcccctaaggtggatctgctggtgaagaattgcctcctgcccctgagagagtacttcaagtatttcagccagaatagtctgcccctgggaggcagcggcggcggcgccctggtgacatttgaggacgtcgccgtgcggttcacccaggaggaatgggctctgctggatccttctcagaaaatcctgtaccgggacgtgatgagagagacataccggaatctgacctccgtgggcatcaactgggaatgttgggaccttgaagcctgcttcagaagcctgggaagaaacctgagagtgcaggtggtgaagagaaagtgcgagctgaccaacagcggcccctgcgccgagggcggcccaagcagcggcgcccctcctcccagcggcggcagcccagccggctccccaacctctaccgaggagggcacctctgagtccgccacccccgagagcggccctggcacctccaccgagcccagcgagggcagcgcacccggcagccctgccggcagccccacctccacagaggagggaaccagcaccgagcccagcgaaggcagcgccccaggcaccagcaccgagcctagtgagcaggagattaaacggatcaacaagatcagaagaagacttgtgaaagacagcaacaccaagaaggccggcaagacaggccccatgaaaaccctgctggttagagtgatgacacccgatctgagagagcggctggaaaacctgagaaagaagcctgaaaatatcccccagcccatcagcaatacatctagagccaacctgaataagctgctgaccgattacaccgaaatgaagaaggcgatcctgcatgtgtactgggaagagttccagaaggaccctgtgggcctgatgagccgggtggcccagcctgccagcaagaagatcgatcagaacaagctgaaacctgagatggacgagaagggcaacctgaccaccgccggctttgcctgctctcagtgtggccagcccctgttcgtgtacaagctggagcaggtgtctgagaagggcaaggcttacaccaactacttcggacggtgcaatgtggccgagcacgaaaagctgatcctgctggcccagctgaagcccgagaaggatagcgacgaagccgtgacatatagcctgggaaagtttgggcagagggccctggatttctacagcattcatgtgaccaaggagtccacccaccccgtgaagcccctggcccagatcgccggaaacagatacgcctccggacctgtgggaaaggccctgagcgacgcatgtatgggcacaatcgcctccttcctgtctaagtaccaggacatcatcatcgaacaccagaaggtggtgaagggcaaccagaagagactggagagcctgcgggagctggccggcaaggaaaacctggaataccctagcgtgaccctgccacctcagcctcacaccaaggagggcgttgatgcctacaacgaagtgatcgcccgggtgcgaatgtgggtgaacctgaacctgtggcagaagctgaagctaagcagagatgatgccaagcctctgctgagactgaagggattcccttcctttcctctggtcgagagacaggccaacgaagtggactggtgggacatggtgtgtaacgtgaagaagctgatcaacgagaaaaaggaggatggcaaggtgttttggcagaatctggctggctacaagagacaggaagccctgagaccatacctgagcagcgaggaagatcggaagaagggaaagaaattcgctcggtaccagctgggcgacctgctgctgcacctggaaaagaagcacggcgaggactggggaaaggtgtacgacgaggcctgggagcggattgacaagaaagtggaaggcctgagcaagcacatcaagctggaagaggaacggagaagcgaggacgcccagagcaaggccgccctgaccgactggctgcgggctaaggccagcttcgtgatcgagggcctgaaggaggccgacaaggacgagttctgcagatgcgagctgaagctgcagaagtggtacggggacctgcggggaaagcccttcgccatcgaagccgagaacagcatcctggacatcagcggcttcagcaagcagtacaactgtgccttcatctggcagaaggacggcgtgaagaagctgaacctgtacctgatcatcaactacttcaagggcggcaagctgcggttcaagaagatcaaacctgaagccttcgaagccaacagattctacaccgtgatcaacaaaaagagcggcgagatcgtgcccatggaggtgaacttcaacttcgacgaccccaacctgatcatcctgcctctggcctttggcaagagacagggcagagaattcatctggaacgacctgctgtccctggaaaccggcagcctgaagctggccaacggaagagtgatcgagaagacactgtacaacagaagaacccggcaggatgagcctgccctgttcgtggccctgaccttcgagcggcgggaggtcctggactcctccaatatcaaaccaatgaacctgatcggcgtggcaagaggcgaaaacatccccgccgtgatcgccctgaccgaccccgagggctgcccactgagccggtttaaggatagcctgggaaacccaacccacatcctgagaatcggcgagagctataaggagaagcagcggaccatccaggccaagaaggaggtggagcagcggagagccggcggctacagccggaagtacgccagcaaagccaagaatctggcagacgatatggtgagaaacaccgctagagatctgctgtactacgccgtgacccaggatgccatgctgatcttcgccaacctgagccggggcttcggccggcagggcaagcggaccttcatggccgagagacagtacacacggatggaggactggctgaccgccaagctggcctacgagggcctgagcaagacctacctgtccaagacactggcccagtacacctccaagacatgcagcaactgtgggtttaccatcaccagcgccgactacgacagggtgctggagaagctgaagaagacagcaacaggctggatgaccacaattaacggcaaggagctgaaggtggagggccagattacctactacaacagatacaagagacagaacgtagtcaaggacctgtccgtcgagctggatagactgagcgaagaatctgtgaacaacgacatctcctcctggacaaagggcagaagcggagaagctctgagcctcctgaagaaaagattctcccatagacccgtgcaggagaagttcgtgtgcctgaactgcggcttcgagacacacgcagccgagcaagccgccctgaacatcgccagatcctggctgttcctgcggagccaggagtacaagaaataccagacaaacaagacaaccggcaacaccgataagagagccttcgtcgagacctggcagtccttttaccggaagaagcttaaggaggtgtggaaacctgccgtgcggtctggcggatctggcggaggctccgcccaggaggtggtgaccttccaggacgtggccgtggacttcaccagggaggagtggaggctgctgagccccccccagaaggagctgtacaaggaggtgatgctggagaacgccaggaacctgctgagcgtgggcctgcccgccccccccgacgacgtggtgagctacctggagcagagggagggccccagcatgctggaccaggaggacctgaggacctgcggccccgagggcgagatcaggggcggcccaagcagcggcgcccctcctcccagcggcggcagcccagccggctccccaacctctaccgaggagggcacctctgagtccgccacccccgagagcggccctggcacctccaccgagcccagcgagggcagcgcacccggcagccctgccggcagccccacctccacagaggagggaaccagcaccgagcccagcgaaggcagcgccccaggcaccagcaccgagcctagtgagcaggagattaaacggatcaacaagatcagaagaagacttgtgaaagacagcaacaccaagaaggccggcaagacaggccccatgaaaaccctgctggttagagtgatgacacccgatctgagagagcggctggaaaacctgagaaagaagcctgaaaatatcccccagcccatcagcaatacatctagagccaacctgaataagctgctgaccgattacaccgaaatgaagaaggcgatcctgcatgtgtactgggaagagttccagaaggaccctgtgggcctgatgagccgggtggcccagcctgccagcaagaagatcgatcagaacaagctgaaacctgagatggacgagaagggcaacctgaccaccgccggctttgcctgctctcagtgtggccagcccctgttcgtgtacaagctggagcaggtgtctgagaagggcaaggcttacaccaactacttcggacggtgcaatgtggccgagcacgaaaagctgatcctgctggcccagctgaagcccgagaaggatagcgacgaagccgtgacatatagcctgggaaagtttgggcagagggccctggatttctacagcattcatgtgaccaaggagtccacccaccccgtgaagcccctggcccagatcgccggaaacagatacgcctccggacctgtgggaaaggccctgagcgacgcatgtatgggcacaatcgcctccttcctgtctaagtaccaggacatcatcatcgaacaccagaaggtggtgaagggcaaccagaagagactggagagcctgcgggagctggccggcaaggaaaacctggaataccctagcgtgaccctgccacctcagcctcacaccaaggagggcgttgatgcctacaacgaagtgatcgcccgggtgcgaatgtgggtgaacctgaacctgtggcagaagctgaagctaagcagagatgatgccaagcctctgctgagactgaagggattcccttcctttcctctggtcgagagacaggccaacgaagtggactggtgggacatggtgtgtaacgtgaagaagctgatcaacgagaaaaaggaggatggcaaggtgttttggcagaatctggctggctacaagagacaggaagccctgagaccatacctgagcagcgaggaagatcggaagaagggaaagaaattcgctcggtaccagctgggcgacctgctgctgcacctggaaaagaagcacggcgaggactggggaaaggtgtacgacgaggcctgggagcggattgacaagaaagtggaaggcctgagcaagcacatcaagctggaagaggaacggagaagcgaggacgcccagagcaaggccgccctgaccgactggctgcgggctaaggccagcttcgtgatcgagggcctgaaggaggccgacaaggacgagttctgcagatgcgagctgaagctgcagaagtggtacggggacctgcggggaaagcccttcgccatcgaagccgagaacagcatcctggacatcagcggcttcagcaagcagtacaactgtgccttcatctggcagaaggacggcgtgaagaagctgaacctgtacctgatcatcaactacttcaagggcggcaagctgcggttcaagaagatcaaacctgaagccttcgaagccaacagattctacaccgtgatcaacaaaaagagcggcgagatcgtgcccatggaggtgaacttcaacttcgacgaccccaacctgatcatcctgcctctggcctttggcaagagacagggcagagaattcatctggaacgacctgctgtccctggaaaccggcagcctgaagctggccaacggaagagtgatcgagaagacactgtacaacagaagaacccggcaggatgagcctgccctgttcgtggccctgaccttcgagcggcgggaggtcctggactcctccaatatcaaaccaatgaacctgatcggcgtggcaagaggcgaaaacatccccgccgtgatcgccctgaccgaccccgagggctgcccactgagccggtttaaggatagcctgggaaacccaacccacatcctgagaatcggcgagagctataaggagaagcagcggaccatccaggccaagaaggaggtggagcagcggagagccggcggctacagccggaagtacgccagcaaagccaagaatctggcagacgatatggtgagaaacaccgctagagatctgctgtactacgccgtgacccaggatgccatgctgatcttcgccaacctgagccggggcttcggccggcagggcaagcggaccttcatggccgagagacagtacacacggatggaggactggctgaccgccaagctggcctacgagggcctgagcaagacctacctgtccaagacactggcccagtacacctccaagacatgcagcaactgtgggtttaccatcaccagcgccgactacgacagggtgctggagaagctgaagaagacagcaacaggctggatgaccacaattaacggcaaggagctgaaggtggagggccagattacctactacaacagatacaagagacagaacgtagtcaaggacctgtccgtcgagctggatagactgagcgaagaatctgtgaacaacgacatctcctcctggacaaagggcagaagcggagaagctctgagcctcctgaagaaaagattctcccatagacccgtgcaggagaagttcgtgtgcctgaactgcggcttcgagacacacgcagccgagcaagccgccctgaacatcgccagatcctggctgttcctgcggagccaggagtacaagaaataccagacaaacaagacaaccggcaacaccgataagagagccttcgtcgagacctggcagtccttttaccggaagaagcttaaggaggtgtggaaacctgccgtgcggtctggcggatctggcggaggctcctgcccaggaggtggtgaccttccaggacgtggccgtggacttcaccagggaggagtggaggctgctgagccccccccagaaggagctgtacaaggaggtgatgctggagaacgccaggaacctgctgagcgtgggcctgcccgccccccccgacgacgtggtgagctacctggagcagagggagggccccagcatgctggaccaggaggacctgaggacctgcggccccgagggcgagatcaggggatctggctccggcagcggccccaagaaaaagagaaaagtctaagctgccttctgcggggcttgccttctggccatgcccttcttctctcccttgcacctgtacctcttggtctttgaataaagcctgagtaggaaggctagcaaaaaaaaaaaaaaaaaaaaaaaaaaaaaaaaaaaaaaaaaaaaaaaaaaaaaaaaaaaaaaaaaaaaaaaaaaaaaaaa

SEQ ID NO: 16149 - RNA, 9485 nt, synthetic construct
  source 1..9485: mol_type = other RNA
aggaaataagagagaaaagaagagtaagaagaaatataagagccaccatggcccctaagaagaagcgtaaagtgagccggatggaacgcctcgtctacgaggtgcggcagaagtgcagaaacatcgaggacatctgcatctcctgcggatctctgaacgtgaccctggagcacccactgttcatcggcggcatgtgccagaactgtaaaaactgttttctggagtgtgcctatcaatacgacgatgacggctaccagagctactgcaccatctgttgcggcggaagagaggtgctgatgtgtggaaataacaactgctgccggtgcttctgcgtggaatgcgtggacctgctggtgggccccggcgccgcccaggccgctattaaggaagatccttggaactgctacatgtgcggccacaagggcacatacggcctgctgagacggagagaggactggcctagcagactgcagatgttcttcgccaataaccacgaccaggagttcgacccccctaaggtgtaccctcccgtccccgccgagaagagaaagcccatccgggtcctgagcctgttcgatggcatcgccaccggtctgctggtgctgaaggacctgggcatccaggtggataggtacattgcctccgaggtgtgcgaggactccatcaccgtgggaatggtgcgtcatcagggcaagatcatgtacgtgggcgacgtgcggagcgtgacacagaagcatatccaggagtggggccctttcgacctggtgatcggcggcagcccttgcaatgacctgagcatcgtgaacccagcccggaagggcctgtacgagggaaccggcagactgttcttcgagttttacagactgctgcacgacgcccggcctaaggaaggcgacgaccggcccttcttttggctgttcgagaatgtggtggccatgggagtcagcgacaagcgggatattagccggttcctggagagcaaccccgtgatgatcgatgccaaggaagtgagcgccgcccaccgggccagatacttctggggcaatctgcctggcatgaacagacccctggccagcaccgtgaacgacaagctggagctgcaggagtgcctggagcacggccggatcgccaagttcagcaaggtgagaaccatcaccacccgaagcaacagcatcaaacaaggcaaggaccagcactttcctgtgttcatgaacgagaaggaggacatcctgtggtgtaccgagatggagagagtgttcgggttcccagtccactacacagatgtcagcaacatgtctagactggccagacagagactgctgggaagaagctggtccgtccctgtgatcagacacctgttcgcccctctgaaggagtacttcgcctgcgtgagcagcggcaacagcaacgccaacagccggggccccagcttctctagcggcctggtgccactgtccctgagagggagccacatgggccccatggagatctacaaaaccgtgagcgcctggaagcggcagcctgtgcgcgtgctgagcctgtttcggaatatcgataaagtcctgaaaagcctgggattcctggagagcggctctggctccggcggtggcaccctgaagtacgtggaggatgtgacaaacgtggtcagacgggatgtggagaagtggggccccttcgatctggtgtacggcagcacccaacccctgggcagctcttgtgaccggtgccctggctggtacatgtttcagttccaccggatcctgcagtacgccctgccgagacaggagtcccagcggccattcttttggattttcatggacaacttgctgctgaccgaggatgaccaggaaactaccactcggttcctgcagaccgaagccgtgaccctgcaggacgtgagaggccgggactaccagaacgccatgcgggtgtggtccaacatccctggactgaaaagcaagcacgcacctctgacccctaaagaagaggagtacctgcaggcccaggtgcggagcagaagcaagctggacgcccctaaggtggatctgctggtgaagaattgcctcctgcccctgagagagtacttcaagtatttcagccagaatagtctgcccctgggaggcagcggcggcggcgccctggtgacatttgaggacgtcgccgtgcggttcacccaggaggaatgggctctgctggatccttctcagaaaatcctgtaccgggacgtgatgagagagacataccggaatctgacctccgtgggcatcaactgggaatgttgggaccttgaagcctgcttcagaagcctgggaagaaacctgagagtgcaggtggtgaagagaaagtgcgagctgaccaacagcggcccctgcgccgagggcggcccaagcagcggcgcccctcctcccagcggcggcagcccagccggctccccaacctctaccgaggagggcacctctgagtccgccacccccgagagcggccctggcacctccaccgagcccagcgagggcagcgcacccggcagccctgccggcagccccacctccacagaggagggaaccagcaccgagcccagcgaaggcagcgccccaggcaccagcaccgagcctagtgagcaggagattaaacggatcaacaagatcagaagaagacttgtgaaagacagcaacaccaagaaggccggcaagacaggccccatgaaaaccctgctggttagagtgatgacacccgatctgagagagcggctggaaaacctgagaaagaagcctgaaaatatcccccagcccatcagcaatacatctagagccaacctgaataagctgctgaccgattacaccgaaatgaagaaggcgatcctgcatgtgtactgggaagagttccagaaggaccctgtgggcctgatgagccgggtggcccagcctgccagcaagaagatcgatcagaacaagctgaaacctgagatggacgagaagggcaacctgaccaccgccggctttgcctgctctcagtgtggccagcccctgttcgtgtacaagctggagcaggtgtctgagaagggcaaggcttacaccaactacttcggacggtgcaatgtggccgagcacgaaaagctgatcctgctggcccagctgaagcccgagaaggatagcgacgaagccgtgacatatagcctgggaaagtttgggcagagggccctggatttctacagcattcatgtgaccaaggagtccacccaccccgtgaagcccctggcccagatcgccggaaacagatacgcctccggacctgtgggaaaggccctgagcgacgcatgtatgggcacaatcgcctccttcctgtctaagtaccaggacatcatcatcgaacaccagaaggtggtgaagggcaaccagaagagactggagagcctgcgggagctggccggcaaggaaaacctggaataccctagcgtgaccctgccacctcagcctcacaccaaggagggcgttgatgcctacaacgaagtgatcgcccgggtgcgaatgtgggtgaacctgaacctgtggcagaagctgaagctaagcagagatgatgccaagcctctgctgagactgaagggattcccttcctttcctctggtcgagagacaggccaacgaagtggactggtgggacatggtgtgtaacgtgaagaagctgatcaacgagaaaaaggaggatggcaaggtgttttggcagaatctggctggctacaagagacaggaagccctgagaccatacctgagcagcgaggaagatcggaagaagggaaagaaattcgctcggtaccagctgggcgacctgctgctgcacctggaaaagaagcacggcgaggactggggaaaggtgtacgacgaggcctgggagcggattgacaagaaagtggaaggcctgagcaagcacatcaagctggaagaggaacggagaagcgaggacgcccagagcaaggccgccctgaccgactggctgcgggctaaggccagcttcgtgatcgagggcctgaaggaggccgacaaggacgagttctgcagatgcgagctgaagctgcagaagtggtacggggacctgcggggaaagcccttcgccatcgaagccgagaacagcatcctggacatcagcggcttcagcaagcagtacaactgtgccttcatctggcagaaggacggcgtgaagaagctgaacctgtacctgatcatcaactacttcaagggcggcaagctgcggttcaagaagatcaaacctgaagccttcgaagccaacagattctacaccgtgatcaacaaaaagagcggcgagatcgtgcccatggaggtgaacttcaacttcgacgaccccaacctgatcatcctgcctctggcctttggcaagagacagggcagagaattcatctggaacgacctgctgtccctggaaaccggcagcctgaagctggccaacggaagagtgatcgagaagacactgtacaacagaagaacccggcaggatgagcctgccctgttcgtggccctgaccttcgagcggcgggaggtcctggactcctccaatatcaaaccaatgaacctgatcggcgtggcaagaggcgaaaacatccccgccgtgatcgccctgaccgaccccgagggctgcccactgagccggtttaaggatagcctgggaaacccaacccacatcctgagaatcggcgagagctataaggagaagcagcggaccatccaggccaagaaggaggtggagcagcggagagccggcggctacagccggaagtacgccagcaaagccaagaatctggcagacgatatggtgagaaacaccgctagagatctgctgtactacgccgtgacccaggatgccatgctgatcttcgccaacctgagccggggcttcggccggcagggcaagcggaccttcatggccgagagacagtacacacggatggaggactggctgaccgccaagctggcctacgagggcctgagcaagacctacctgtccaagacactggcccagtacacctccaagacatgcagcaactgtgggtttaccatcaccagcgccgactacgacagggtgctggagaagctgaagaagacagcaacaggctggatgaccacaattaacggcaaggagctgaaggtggagggccagattacctactacaacagatacaagagacagaacgtagtcaaggacctgtccgtcgagctggatagactgagcgaagaatctgtgaacaacgacatctcctcctggacaaagggcagaagcggagaagctctgagcctcctgaagaaaagattctcccatagacccgtgcaggagaagttcgtgtgcctgaactgcggcttcgagacacacgcagccgagcaagccgccctgaacatcgccagatcctggctgttcctgcggagccaggagtacaagaaataccagacaaacaagacaaccggcaacaccgataagagagccttcgtcgagacctggcagtccttttaccggaagaagcttaaggaggtgtggaaacctgccgtgcggtctggcggatctggcggaggctccttccaggaggccgtgaccttcaaggacgtggccgtggtgttcagcgaggaggagctgggcctgctgggccccgcccagaggaagctgtacagggacgtgatgctggagaacttcaggaacctggtgagcgtgggccacagcagcagcaagcccgacgtgatcagccagctggagagggaggagaagctgtgcaccaaggagttccacacccagggcggcggcaggaaccagaaggagatggagggcggcccaagcagcggcgcccctcctcccagcggcggcagcccagccggctccccaacctctaccgaggagggcacctctgagtccgccacccccgagagcggccctggcacctccaccgagcccagcgagggcagcgcacccggcagccctgccggcagccccacctccacagaggagggaaccagcaccgagcccagcgaaggcagcgccccaggcaccagcaccgagcctagtgagcaggagattaaacggatcaacaagatcagaagaagacttgtgaaagacagcaacaccaagaaggccggcaagacaggccccatgaaaaccctgctggttagagtgatgacacccgatctgagagagcggctggaaaacctgagaaagaagcctgaaaatatcccccagcccatcagcaatacatctagagccaacctgaataagctgctgaccgattacaccgaaatgaagaaggcgatcctgcatgtgtactgggaagagttccagaaggaccctgtgggcctgatgagccgggtggcccagcctgccagcaagaagatcgatcagaacaagctgaaacctgagatggacgagaagggcaacctgaccaccgccggctttgcctgctctcagtgtggccagcccctgttcgtgtacaagctggagcaggtgtctgagaagggcaaggcttacaccaactacttcggacggtgcaatgtggccgagcacgaaaagctgatcctgctggcccagctgaagcccgagaaggatagcgacgaagccgtgacatatagcctgggaaagtttgggcagagggccctggatttctacagcattcatgtgaccaaggagtccacccaccccgtgaagcccctggcccagatcgccggaaacagatacgcctccggacctgtgggaaaggccctgagcgacgcatgtatgggcacaatcgcctccttcctgtctaagtaccaggacatcatcatcgaacaccagaaggtggtgaagggcaaccagaagagactggagagcctgcgggagctggccggcaaggaaaacctggaataccctagcgtgaccctgccacctcagcctcacaccaaggagggcgttgatgcctacaacgaagtgatcgcccgggtgcgaatgtgggtgaacctgaacctgtggcagaagctgaagctaagcagagatgatgccaagcctctgctgagactgaagggattcccttcctttcctctggtcgagagacaggccaacgaagtggactggtgggacatggtgtgtaacgtgaagaagctgatcaacgagaaaaaggaggatggcaaggtgttttggcagaatctggctggctacaagagacaggaagccctgagaccatacctgagcagcgaggaagatcggaagaagggaaagaaattcgctcggtaccagctgggcgacctgctgctgcacctggaaaagaagcacggcgaggactggggaaaggtgtacgacgaggcctgggagcggattgacaagaaagtggaaggcctgagcaagcacatcaagctggaagaggaacggagaagcgaggacgcccagagcaaggccgccctgaccgactggctgcgggctaaggccagcttcgtgatcgagggcctgaaggaggccgacaaggacgagttctgcagatgcgagctgaagctgcagaagtggtacggggacctgcggggaaagcccttcgccatcgaagccgagaacagcatcctggacatcagcggcttcagcaagcagtacaactgtgccttcatctggcagaaggacggcgtgaagaagctgaacctgtacctgatcatcaactacttcaagggcggcaagctgcggttcaagaagatcaaacctgaagccttcgaagccaacagattctacaccgtgatcaacaaaaagagcggcgagatcgtgcccatggaggtgaacttcaacttcgacgaccccaacctgatcatcctgcctctggcctttggcaagagacagggcagagaattcatctggaacgacctgctgtccctggaaaccggcagcctgaagctggccaacggaagagtgatcgagaagacactgtacaacagaagaacccggcaggatgagcctgccctgttcgtggccctgaccttcgagcggcgggaggtcctggactcctccaatatcaaaccaatgaacctgatcggcgtggcaagaggcgaaaacatccccgccgtgatcgccctgaccgaccccgagggctgcccactgagccggtttaaggatagcctgggaaacccaacccacatcctgagaatcggcgagagctataaggagaagcagcggaccatccaggccaagaaggaggtggagcagcggagagccggcggctacagccggaagtacgccagcaaagccaagaatctggcagacgatatggtgagaaacaccgctagagatctgctgtactacgccgtgacccaggatgccatgctgatcttcgccaacctgagccggggcttcggccggcagggcaagcggaccttcatggccgagagacagtacacacggatggaggactggctgaccgccaagctggcctacgagggcctgagcaagacctacctgtccaagacactggcccagtacacctccaagacatgcagcaactgtgggtttaccatcaccagcgccgactacgacagggtgctggagaagctgaagaagacagcaacaggctggatgaccacaattaacggcaaggagctgaaggtggagggccagattacctactacaacagatacaagagacagaacgtagtcaaggacctgtccgtcgagctggatagactgagcgaagaatctgtgaacaacgacatctcctcctggacaaagggcagaagcggagaagctctgagcctcctgaagaaaagattctcccatagacccgtgcaggagaagttcgtgtgcctgaactgcggcttcgagacacacgcagccgagcaagccgccctgaacatcgccagatcctggctgttcctgcggagccaggagtacaagaaataccagacaaacaagacaaccggcaacaccgataagagagccttcgtcgagacctggcagtccttttaccggaagaagcttaaggaggtgtggaaacctgccgtgcggtctggcggatctggcggaggctcctttccaggaggccgtgaccttcaaggacgtggccgtggtgttcagcgaggaggagctgggcctgctgggccccgcccagaggaagctgtacagggacgtgatgctggagaacttcaggaacctggtgagcgtgggccacagcagcagcaagcccgacgtgatcagccagctggagagggaggagaagctgtgcaccaaggagttccacacccagggcggcggcaggaaccagaaggagatggagggatctggctccggcagcggccccaagaaaaagagaaaagtctaagctgccttctgcggggcttgccttctggccatgcccttcttctctcccttgcacctgtacctcttggtctttgaataaagcctgagtaggaaggctagcaaaaaaaaaaaaaaaaaaaaaaaaaaaaaaaaaaaaaaaaaaaaaaaaaaaaaaaaaaaaaaaaaaaaaaaaaaaaaaaa

SEQ ID NO: 16150 - RNA, 9485 nt, synthetic construct
  source 1..9485: mol_type = other RNA
aggaaataagagagaaaagaagagtaagaagaaatataagagccaccatggcccctaagaagaagcgtaaagtgagccggatggaacgcctcgtctacgaggtgcggcagaagtgcagaaacatcgaggacatctgcatctcctgcggatctctgaacgtgaccctggagcacccactgttcatcggcggcatgtgccagaactgtaaaaactgttttctggagtgtgcctatcaatacgacgatgacggctaccagagctactgcaccatctgttgcggcggaagagaggtgctgatgtgtggaaataacaactgctgccggtgcttctgcgtggaatgcgtggacctgctggtgggccccggcgccgcccaggccgctattaaggaagatccttggaactgctacatgtgcggccacaagggcacatacggcctgctgagacggagagaggactggcctagcagactgcagatgttcttcgccaataaccacgaccaggagttcgacccccctaaggtgtaccctcccgtccccgccgagaagagaaagcccatccgggtcctgagcctgttcgatggcatcgccaccggtctgctggtgctgaaggacctgggcatccaggtggataggtacattgcctccgaggtgtgcgaggactccatcaccgtgggaatggtgcgtcatcagggcaagatcatgtacgtgggcgacgtgcggagcgtgacacagaagcatatccaggagtggggccctttcgacctggtgatcggcggcagcccttgcaatgacctgagcatcgtgaacccagcccggaagggcctgtacgagggaaccggcagactgttcttcgagttttacagactgctgcacgacgcccggcctaaggaaggcgacgaccggcccttcttttggctgttcgagaatgtggtggccatgggagtcagcgacaagcgggatattagccggttcctggagagcaaccccgtgatgatcgatgccaaggaagtgagcgccgcccaccgggccagatacttctggggcaatctgcctggcatgaacagacccctggccagcaccgtgaacgacaagctggagctgcaggagtgcctggagcacggccggatcgccaagttcagcaaggtgagaaccatcaccacccgaagcaacagcatcaaacaaggcaaggaccagcactttcctgtgttcatgaacgagaaggaggacatcctgtggtgtaccgagatggagagagtgttcgggttcccagtccactacacagatgtcagcaacatgtctagactggccagacagagactgctgggaagaagctggtccgtccctgtgatcagacacctgttcgcccctctgaaggagtacttcgcctgcgtgagcagcggcaacagcaacgccaacagccggggccccagcttctctagcggcctggtgccactgtccctgagagggagccacatgggccccatggagatctacaaaaccgtgagcgcctggaagcggcagcctgtgcgcgtgctgagcctgtttcggaatatcgataaagtcctgaaaagcctgggattcctggagagcggctctggctccggcggtggcaccctgaagtacgtggaggatgtgacaaacgtggtcagacgggatgtggagaagtggggccccttcgatctggtgtacggcagcacccaacccctgggcagctcttgtgaccggtgccctggctggtacatgtttcagttccaccggatcctgcagtacgccctgccgagacaggagtcccagcggccattcttttggattttcatggacaacttgctgctgaccgaggatgaccaggaaactaccactcggttcctgcagaccgaagccgtgaccctgcaggacgtgagaggccgggactaccagaacgccatgcgggtgtggtccaacatccctggactgaaaagcaagcacgcacctctgacccctaaagaagaggagtacctgcaggcccaggtgcggagcagaagcaagctggacgcccctaaggtggatctgctggtgaagaattgcctcctgcccctgagagagtacttcaagtatttcagccagaatagtctgcccctgggaggcagcggcggcggcgccctggtgacatttgaggacgtcgccgtgcggttcacccaggaggaatgggctctgctggatccttctcagaaaatcctgtaccgggacgtgatgagagagacataccggaatctgacctccgtgggcatcaactgggaatgttgggaccttgaagcctgcttcagaagcctgggaagaaacctgagagtgcaggtggtgaagagaaagtgcgagctgaccaacagcggcccctgcgccgagggcggcccaagcagcggcgcccctcctcccagcggcggcagcccagccggctccccaacctctaccgaggagggcacctctgagtccgccacccccgagagcggccctggcacctccaccgagcccagcgagggcagcgcacccggcagccctgccggcagccccacctccacagaggagggaaccagcaccgagcccagcgaaggcagcgccccaggcaccagcaccgagcctagtgagcaggagattaaacggatcaacaagatcagaagaagacttgtgaaagacagcaacaccaagaaggccggcaagacaggccccatgaaaaccctgctggttagagtgatgacacccgatctgagagagcggctggaaaacctgagaaagaagcctgaaaatatcccccagcccatcagcaatacatctagagccaacctgaataagctgctgaccgattacaccgaaatgaagaaggcgatcctgcatgtgtactgggaagagttccagaaggaccctgtgggcctgatgagccgggtggcccagcctgccagcaagaagatcgatcagaacaagctgaaacctgagatggacgagaagggcaacctgaccaccgccggctttgcctgctctcagtgtggccagcccctgttcgtgtacaagctggagcaggtgtctgagaagggcaaggcttacaccaactacttcggacggtgcaatgtggccgagcacgaaaagctgatcctgctggcccagctgaagcccgagaaggatagcgacgaagccgtgacatatagcctgggaaagtttgggcagagggccctggatttctacagcattcatgtgaccaaggagtccacccaccccgtgaagcccctggcccagatcgccggaaacagatacgcctccggacctgtgggaaaggccctgagcgacgcatgtatgggcacaatcgcctccttcctgtctaagtaccaggacatcatcatcgaacaccagaaggtggtgaagggcaaccagaagagactggagagcctgcgggagctggccggcaaggaaaacctggaataccctagcgtgaccctgccacctcagcctcacaccaaggagggcgttgatgcctacaacgaagtgatcgcccgggtgcgaatgtgggtgaacctgaacctgtggcagaagctgaagctaagcagagatgatgccaagcctctgctgagactgaagggattcccttcctttcctctggtcgagagacaggccaacgaagtggactggtgggacatggtgtgtaacgtgaagaagctgatcaacgagaaaaaggaggatggcaaggtgttttggcagaatctggctggctacaagagacaggaagccctgagaccatacctgagcagcgaggaagatcggaagaagggaaagaaattcgctcggtaccagctgggcgacctgctgctgcacctggaaaagaagcacggcgaggactggggaaaggtgtacgacgaggcctgggagcggattgacaagaaagtggaaggcctgagcaagcacatcaagctggaagaggaacggagaagcgaggacgcccagagcaaggccgccctgaccgactggctgcgggctaaggccagcttcgtgatcgagggcctgaaggaggccgacaaggacgagttctgcagatgcgagctgaagctgcagaagtggtacggggacctgcggggaaagcccttcgccatcgaagccgagaacagcatcctggacatcagcggcttcagcaagcagtacaactgtgccttcatctggcagaaggacggcgtgaagaagctgaacctgtacctgatcatcaactacttcaagggcggcaagctgcggttcaagaagatcaaacctgaagccttcgaagccaacagattctacaccgtgatcaacaaaaagagcggcgagatcgtgcccatggaggtgaacttcaacttcgacgaccccaacctgatcatcctgcctctggcctttggcaagagacagggcagagaattcatctggaacgacctgctgtccctggaaaccggcagcctgaagctggccaacggaagagtgatcgagaagacactgtacaacagaagaacccggcaggatgagcctgccctgttcgtggccctgaccttcgagcggcgggaggtcctggactcctccaatatcaaaccaatgaacctgatcggcgtggcaagaggcgaaaacatccccgccgtgatcgccctgaccgaccccgagggctgcccactgagccggtttaaggatagcctgggaaacccaacccacatcctgagaatcggcgagagctataaggagaagcagcggaccatccaggccaagaaggaggtggagcagcggagagccggcggctacagccggaagtacgccagcaaagccaagaatctggcagacgatatggtgagaaacaccgctagagatctgctgtactacgccgtgacccaggatgccatgctgatcttcgccaacctgagccggggcttcggccggcagggcaagcggaccttcatggccgagagacagtacacacggatggaggactggctgaccgccaagctggcctacgagggcctgagcaagacctacctgtccaagacactggcccagtacacctccaagacatgcagcaactgtgggtttaccatcaccagcgccgactacgacagggtgctggagaagctgaagaagacagcaacaggctggatgaccacaattaacggcaaggagctgaaggtggagggccagattacctactacaacagatacaagagacagaacgtagtcaaggacctgtccgtcgagctggatagactgagcgaagaatctgtgaacaacgacatctcctcctggacaaagggcagaagcggagaagctctgagcctcctgaagaaaagattctcccatagacccgtgcaggagaagttcgtgtgcctgaactgcggcttcgagacacacgcagccgagcaagccgccctgaacatcgccagatcctggctgttcctgcggagccaggagtacaagaaataccagacaaacaagacaaccggcaacaccgataagagagccttcgtcgagacctggcagtccttttaccggaagaagcttaaggaggtgtggaaacctgccgtgcggtctggcggatctggcggaggctccatgatcaagttccagatggtgaccttcaaggacgtggccgtggtgttcaccgaggaggagctgggcctgctggacagcgtgcagaggaagctgtacagggacgtgatgctggagaacttcaggaacctgctgctggtggcccaccagcccttcaagcccgacctgatcagccagctggagagggaggagaagctgctgatggtggagaccgagacccccggcgacggctgcagcggcaggaagggcggcccaagcagcggcgcccctcctcccagcggcggcagcccagccggctccccaacctctaccgaggagggcacctctgagtccgccacccccgagagcggccctggcacctccaccgagcccagcgagggcagcgcacccggcagccctgccggcagccccacctccacagaggagggaaccagcaccgagcccagcgaaggcagcgccccaggcaccagcaccgagcctagtgagcaggagattaaacggatcaacaagatcagaagaagacttgtgaaagacagcaacaccaagaaggccggcaagacaggccccatgaaaaccctgctggttagagtgatgacacccgatctgagagagcggctggaaaacctgagaaagaagcctgaaaatatcccccagcccatcagcaatacatctagagccaacctgaataagctgctgaccgattacaccgaaatgaagaaggcgatcctgcatgtgtactgggaagagttccagaaggaccctgtgggcctgatgagccgggtggcccagcctgccagcaagaagatcgatcagaacaagctgaaacctgagatggacgagaagggcaacctgaccaccgccggctttgcctgctctcagtgtggccagcccctgttcgtgtacaagctggagcaggtgtctgagaagggcaaggcttacaccaactacttcggacggtgcaatgtggccgagcacgaaaagctgatcctgctggcccagctgaagcccgagaaggatagcgacgaagccgtgacatatagcctgggaaagtttgggcagagggccctggatttctacagcattcatgtgaccaaggagtccacccaccccgtgaagcccctggcccagatcgccggaaacagatacgcctccggacctgtgggaaaggccctgagcgacgcatgtatgggcacaatcgcctccttcctgtctaagtaccaggacatcatcatcgaacaccagaaggtggtgaagggcaaccagaagagactggagagcctgcgggagctggccggcaaggaaaacctggaataccctagcgtgaccctgccacctcagcctcacaccaaggagggcgttgatgcctacaacgaagtgatcgcccgggtgcgaatgtgggtgaacctgaacctgtggcagaagctgaagctaagcagagatgatgccaagcctctgctgagactgaagggattcccttcctttcctctggtcgagagacaggccaacgaagtggactggtgggacatggtgtgtaacgtgaagaagctgatcaacgagaaaaaggaggatggcaaggtgttttggcagaatctggctggctacaagagacaggaagccctgagaccatacctgagcagcgaggaagatcggaagaagggaaagaaattcgctcggtaccagctgggcgacctgctgctgcacctggaaaagaagcacggcgaggactggggaaaggtgtacgacgaggcctgggagcggattgacaagaaagtggaaggcctgagcaagcacatcaagctggaagaggaacggagaagcgaggacgcccagagcaaggccgccctgaccgactggctgcgggctaaggccagcttcgtgatcgagggcctgaaggaggccgacaaggacgagttctgcagatgcgagctgaagctgcagaagtggtacggggacctgcggggaaagcccttcgccatcgaagccgagaacagcatcctggacatcagcggcttcagcaagcagtacaactgtgccttcatctggcagaaggacggcgtgaagaagctgaacctgtacctgatcatcaactacttcaagggcggcaagctgcggttcaagaagatcaaacctgaagccttcgaagccaacagattctacaccgtgatcaacaaaaagagcggcgagatcgtgcccatggaggtgaacttcaacttcgacgaccccaacctgatcatcctgcctctggcctttggcaagagacagggcagagaattcatctggaacgacctgctgtccctggaaaccggcagcctgaagctggccaacggaagagtgatcgagaagacactgtacaacagaagaacccggcaggatgagcctgccctgttcgtggccctgaccttcgagcggcgggaggtcctggactcctccaatatcaaaccaatgaacctgatcggcgtggcaagaggcgaaaacatccccgccgtgatcgccctgaccgaccccgagggctgcccactgagccggtttaaggatagcctgggaaacccaacccacatcctgagaatcggcgagagctataaggagaagcagcggaccatccaggccaagaaggaggtggagcagcggagagccggcggctacagccggaagtacgccagcaaagccaagaatctggcagacgatatggtgagaaacaccgctagagatctgctgtactacgccgtgacccaggatgccatgctgatcttcgccaacctgagccggggcttcggccggcagggcaagcggaccttcatggccgagagacagtacacacggatggaggactggctgaccgccaagctggcctacgagggcctgagcaagacctacctgtccaagacactggcccagtacacctccaagacatgcagcaactgtgggtttaccatcaccagcgccgactacgacagggtgctggagaagctgaagaagacagcaacaggctggatgaccacaattaacggcaaggagctgaaggtggagggccagattacctactacaacagatacaagagacagaacgtagtcaaggacctgtccgtcgagctggatagactgagcgaagaatctgtgaacaacgacatctcctcctggacaaagggcagaagcggagaagctctgagcctcctgaagaaaagattctcccatagacccgtgcaggagaagttcgtgtgcctgaactgcggcttcgagacacacgcagccgagcaagccgccctgaacatcgccagatcctggctgttcctgcggagccaggagtacaagaaataccagacaaacaagacaaccggcaacaccgataagagagccttcgtcgagacctggcagtccttttaccggaagaagcttaaggaggtgtggaaacctgccgtgcggtctggcggatctggcggaggctcctatgatcaagttccagatggtgaccttcaaggacgtggccgtggtgttcaccgaggaggagctgggcctgctggacagcgtgcagaggaagctgtacagggacgtgatgctggagaacttcaggaacctgctgctggtggcccaccagcccttcaagcccgacctgatcagccagctggagagggaggagaagctgctgatggtggagaccgagacccccggcgacggctgcagcggcaggaagggatctggctccggcagcggccccaagaaaaagagaaaagtctaagctgccttctgcggggcttgccttctggccatgcccttcttctctcccttgcacctgtacctcttggtctttgaataaagcctgagtaggaaggctagcaaaaaaaaaaaaaaaaaaaaaaaaaaaaaaaaaaaaaaaaaaaaaaaaaaaaaaaaaaaaaaaaaaaaaaaaaaaaaaaa

SEQ ID NO: 16151 - RNA, 9485 nt, synthetic construct
  source 1..9485: mol_type = other RNA
aggaaataagagagaaaagaagagtaagaagaaatataagagccaccatggcccctaagaagaagcgtaaagtgagccggatggaacgcctcgtctacgaggtgcggcagaagtgcagaaacatcgaggacatctgcatctcctgcggatctctgaacgtgaccctggagcacccactgttcatcggcggcatgtgccagaactgtaaaaactgttttctggagtgtgcctatcaatacgacgatgacggctaccagagctactgcaccatctgttgcggcggaagagaggtgctgatgtgtggaaataacaactgctgccggtgcttctgcgtggaatgcgtggacctgctggtgggccccggcgccgcccaggccgctattaaggaagatccttggaactgctacatgtgcggccacaagggcacatacggcctgctgagacggagagaggactggcctagcagactgcagatgttcttcgccaataaccacgaccaggagttcgacccccctaaggtgtaccctcccgtccccgccgagaagagaaagcccatccgggtcctgagcctgttcgatggcatcgccaccggtctgctggtgctgaaggacctgggcatccaggtggataggtacattgcctccgaggtgtgcgaggactccatcaccgtgggaatggtgcgtcatcagggcaagatcatgtacgtgggcgacgtgcggagcgtgacacagaagcatatccaggagtggggccctttcgacctggtgatcggcggcagcccttgcaatgacctgagcatcgtgaacccagcccggaagggcctgtacgagggaaccggcagactgttcttcgagttttacagactgctgcacgacgcccggcctaaggaaggcgacgaccggcccttcttttggctgttcgagaatgtggtggccatgggagtcagcgacaagcgggatattagccggttcctggagagcaaccccgtgatgatcgatgccaaggaagtgagcgccgcccaccgggccagatacttctggggcaatctgcctggcatgaacagacccctggccagcaccgtgaacgacaagctggagctgcaggagtgcctggagcacggccggatcgccaagttcagcaaggtgagaaccatcaccacccgaagcaacagcatcaaacaaggcaaggaccagcactttcctgtgttcatgaacgagaaggaggacatcctgtggtgtaccgagatggagagagtgttcgggttcccagtccactacacagatgtcagcaacatgtctagactggccagacagagactgctgggaagaagctggtccgtccctgtgatcagacacctgttcgcccctctgaaggagtacttcgcctgcgtgagcagcggcaacagcaacgccaacagccggggccccagcttctctagcggcctggtgccactgtccctgagagggagccacatgggccccatggagatctacaaaaccgtgagcgcctggaagcggcagcctgtgcgcgtgctgagcctgtttcggaatatcgataaagtcctgaaaagcctgggattcctggagagcggctctggctccggcggtggcaccctgaagtacgtggaggatgtgacaaacgtggtcagacgggatgtggagaagtggggccccttcgatctggtgtacggcagcacccaacccctgggcagctcttgtgaccggtgccctggctggtacatgtttcagttccaccggatcctgcagtacgccctgccgagacaggagtcccagcggccattcttttggattttcatggacaacttgctgctgaccgaggatgaccaggaaactaccactcggttcctgcagaccgaagccgtgaccctgcaggacgtgagaggccgggactaccagaacgccatgcgggtgtggtccaacatccctggactgaaaagcaagcacgcacctctgacccctaaagaagaggagtacctgcaggcccaggtgcggagcagaagcaagctggacgcccctaaggtggatctgctggtgaagaattgcctcctgcccctgagagagtacttcaagtatttcagccagaatagtctgcccctgggaggcagcggcggcggcgccctggtgacatttgaggacgtcgccgtgcggttcacccaggaggaatgggctctgctggatccttctcagaaaatcctgtaccgggacgtgatgagagagacataccggaatctgacctccgtgggcatcaactgggaatgttgggaccttgaagcctgcttcagaagcctgggaagaaacctgagagtgcaggtggtgaagagaaagtgcgagctgaccaacagcggcccctgcgccgagggcggcccaagcagcggcgcccctcctcccagcggcggcagcccagccggctccccaacctctaccgaggagggcacctctgagtccgccacccccgagagcggccctggcacctccaccgagcccagcgagggcagcgcacccggcagccctgccggcagccccacctccacagaggagggaaccagcaccgagcccagcgaaggcagcgccccaggcaccagcaccgagcctagtgagcaggagattaaacggatcaacaagatcagaagaagacttgtgaaagacagcaacaccaagaaggccggcaagacaggccccatgaaaaccctgctggttagagtgatgacacccgatctgagagagcggctggaaaacctgagaaagaagcctgaaaatatcccccagcccatcagcaatacatctagagccaacctgaataagctgctgaccgattacaccgaaatgaagaaggcgatcctgcatgtgtactgggaagagttccagaaggaccctgtgggcctgatgagccgggtggcccagcctgccagcaagaagatcgatcagaacaagctgaaacctgagatggacgagaagggcaacctgaccaccgccggctttgcctgctctcagtgtggccagcccctgttcgtgtacaagctggagcaggtgtctgagaagggcaaggcttacaccaactacttcggacggtgcaatgtggccgagcacgaaaagctgatcctgctggcccagctgaagcccgagaaggatagcgacgaagccgtgacatatagcctgggaaagtttgggcagagggccctggatttctacagcattcatgtgaccaaggagtccacccaccccgtgaagcccctggcccagatcgccggaaacagatacgcctccggacctgtgggaaaggccctgagcgacgcatgtatgggcacaatcgcctccttcctgtctaagtaccaggacatcatcatcgaacaccagaaggtggtgaagggcaaccagaagagactggagagcctgcgggagctggccggcaaggaaaacctggaataccctagcgtgaccctgccacctcagcctcacaccaaggagggcgttgatgcctacaacgaagtgatcgcccgggtgcgaatgtgggtgaacctgaacctgtggcagaagctgaagctaagcagagatgatgccaagcctctgctgagactgaagggattcccttcctttcctctggtcgagagacaggccaacgaagtggactggtgggacatggtgtgtaacgtgaagaagctgatcaacgagaaaaaggaggatggcaaggtgttttggcagaatctggctggctacaagagacaggaagccctgagaccatacctgagcagcgaggaagatcggaagaagggaaagaaattcgctcggtaccagctgggcgacctgctgctgcacctggaaaagaagcacggcgaggactggggaaaggtgtacgacgaggcctgggagcggattgacaagaaagtggaaggcctgagcaagcacatcaagctggaagaggaacggagaagcgaggacgcccagagcaaggccgccctgaccgactggctgcgggctaaggccagcttcgtgatcgagggcctgaaggaggccgacaaggacgagttctgcagatgcgagctgaagctgcagaagtggtacggggacctgcggggaaagcccttcgccatcgaagccgagaacagcatcctggacatcagcggcttcagcaagcagtacaactgtgccttcatctggcagaaggacggcgtgaagaagctgaacctgtacctgatcatcaactacttcaagggcggcaagctgcggttcaagaagatcaaacctgaagccttcgaagccaacagattctacaccgtgatcaacaaaaagagcggcgagatcgtgcccatggaggtgaacttcaacttcgacgaccccaacctgatcatcctgcctctggcctttggcaagagacagggcagagaattcatctggaacgacctgctgtccctggaaaccggcagcctgaagctggccaacggaagagtgatcgagaagacactgtacaacagaagaacccggcaggatgagcctgccctgttcgtggccctgaccttcgagcggcgggaggtcctggactcctccaatatcaaaccaatgaacctgatcggcgtggcaagaggcgaaaacatccccgccgtgatcgccctgaccgaccccgagggctgcccactgagccggtttaaggatagcctgggaaacccaacccacatcctgagaatcggcgagagctataaggagaagcagcggaccatccaggccaagaaggaggtggagcagcggagagccggcggctacagccggaagtacgccagcaaagccaagaatctggcagacgatatggtgagaaacaccgctagagatctgctgtactacgccgtgacccaggatgccatgctgatcttcgccaacctgagccggggcttcggccggcagggcaagcggaccttcatggccgagagacagtacacacggatggaggactggctgaccgccaagctggcctacgagggcctgagcaagacctacctgtccaagacactggcccagtacacctccaagacatgcagcaactgtgggtttaccatcaccagcgccgactacgacagggtgctggagaagctgaagaagacagcaacaggctggatgaccacaattaacggcaaggagctgaaggtggagggccagattacctactacaacagatacaagagacagaacgtagtcaaggacctgtccgtcgagctggatagactgagcgaagaatctgtgaacaacgacatctcctcctggacaaagggcagaagcggagaagctctgagcctcctgaagaaaagattctcccatagacccgtgcaggagaagttcgtgtgcctgaactgcggcttcgagacacacgcagccgagcaagccgccctgaacatcgccagatcctggctgttcctgcggagccaggagtacaagaaataccagacaaacaagacaaccggcaacaccgataagagagccttcgtcgagacctggcagtccttttaccggaagaagcttaaggaggtgtggaaacctgccgtgcggtctggcggatctggcggaggctccagccagggcctgctgaccttcaaggacatcagcgtggacttcacccaggaggagtggggccagctggcccccgcccacaggaacctgtacagggaggtgatgctggagaactacggcaacctggtgagcgtggccggctaccagctgagcaagcccagcgtgatcagccagctggagaagggccaggagccctggatgaccgagaaggagggccccggcgacagcagcagcgacctgaagaacggcggcccaagcagcggcgcccctcctcccagcggcggcagcccagccggctccccaacctctaccgaggagggcacctctgagtccgccacccccgagagcggccctggcacctccaccgagcccagcgagggcagcgcacccggcagccctgccggcagccccacctccacagaggagggaaccagcaccgagcccagcgaaggcagcgccccaggcaccagcaccgagcctagtgagcaggagattaaacggatcaacaagatcagaagaagacttgtgaaagacagcaacaccaagaaggccggcaagacaggccccatgaaaaccctgctggttagagtgatgacacccgatctgagagagcggctggaaaacctgagaaagaagcctgaaaatatcccccagcccatcagcaatacatctagagccaacctgaataagctgctgaccgattacaccgaaatgaagaaggcgatcctgcatgtgtactgggaagagttccagaaggaccctgtgggcctgatgagccgggtggcccagcctgccagcaagaagatcgatcagaacaagctgaaacctgagatggacgagaagggcaacctgaccaccgccggctttgcctgctctcagtgtggccagcccctgttcgtgtacaagctggagcaggtgtctgagaagggcaaggcttacaccaactacttcggacggtgcaatgtggccgagcacgaaaagctgatcctgctggcccagctgaagcccgagaaggatagcgacgaagccgtgacatatagcctgggaaagtttgggcagagggccctggatttctacagcattcatgtgaccaaggagtccacccaccccgtgaagcccctggcccagatcgccggaaacagatacgcctccggacctgtgggaaaggccctgagcgacgcatgtatgggcacaatcgcctccttcctgtctaagtaccaggacatcatcatcgaacaccagaaggtggtgaagggcaaccagaagagactggagagcctgcgggagctggccggcaaggaaaacctggaataccctagcgtgaccctgccacctcagcctcacaccaaggagggcgttgatgcctacaacgaagtgatcgcccgggtgcgaatgtgggtgaacctgaacctgtggcagaagctgaagctaagcagagatgatgccaagcctctgctgagactgaagggattcccttcctttcctctggtcgagagacaggccaacgaagtggactggtgggacatggtgtgtaacgtgaagaagctgatcaacgagaaaaaggaggatggcaaggtgttttggcagaatctggctggctacaagagacaggaagccctgagaccatacctgagcagcgaggaagatcggaagaagggaaagaaattcgctcggtaccagctgggcgacctgctgctgcacctggaaaagaagcacggcgaggactggggaaaggtgtacgacgaggcctgggagcggattgacaagaaagtggaaggcctgagcaagcacatcaagctggaagaggaacggagaagcgaggacgcccagagcaaggccgccctgaccgactggctgcgggctaaggccagcttcgtgatcgagggcctgaaggaggccgacaaggacgagttctgcagatgcgagctgaagctgcagaagtggtacggggacctgcggggaaagcccttcgccatcgaagccgagaacagcatcctggacatcagcggcttcagcaagcagtacaactgtgccttcatctggcagaaggacggcgtgaagaagctgaacctgtacctgatcatcaactacttcaagggcggcaagctgcggttcaagaagatcaaacctgaagccttcgaagccaacagattctacaccgtgatcaacaaaaagagcggcgagatcgtgcccatggaggtgaacttcaacttcgacgaccccaacctgatcatcctgcctctggcctttggcaagagacagggcagagaattcatctggaacgacctgctgtccctggaaaccggcagcctgaagctggccaacggaagagtgatcgagaagacactgtacaacagaagaacccggcaggatgagcctgccctgttcgtggccctgaccttcgagcggcgggaggtcctggactcctccaatatcaaaccaatgaacctgatcggcgtggcaagaggcgaaaacatccccgccgtgatcgccctgaccgaccccgagggctgcccactgagccggtttaaggatagcctgggaaacccaacccacatcctgagaatcggcgagagctataaggagaagcagcggaccatccaggccaagaaggaggtggagcagcggagagccggcggctacagccggaagtacgccagcaaagccaagaatctggcagacgatatggtgagaaacaccgctagagatctgctgtactacgccgtgacccaggatgccatgctgatcttcgccaacctgagccggggcttcggccggcagggcaagcggaccttcatggccgagagacagtacacacggatggaggactggctgaccgccaagctggcctacgagggcctgagcaagacctacctgtccaagacactggcccagtacacctccaagacatgcagcaactgtgggtttaccatcaccagcgccgactacgacagggtgctggagaagctgaagaagacagcaacaggctggatgaccacaattaacggcaaggagctgaaggtggagggccagattacctactacaacagatacaagagacagaacgtagtcaaggacctgtccgtcgagctggatagactgagcgaagaatctgtgaacaacgacatctcctcctggacaaagggcagaagcggagaagctctgagcctcctgaagaaaagattctcccatagacccgtgcaggagaagttcgtgtgcctgaactgcggcttcgagacacacgcagccgagcaagccgccctgaacatcgccagatcctggctgttcctgcggagccaggagtacaagaaataccagacaaacaagacaaccggcaacaccgataagagagccttcgtcgagacctggcagtccttttaccggaagaagcttaaggaggtgtggaaacctgccgtgcggtctggcggatctggcggaggctcctagccagggcctgctgaccttcaaggacatcagcgtggacttcacccaggaggagtggggccagctggcccccgcccacaggaacctgtacagggaggtgatgctggagaactacggcaacctggtgagcgtggccggctaccagctgagcaagcccagcgtgatcagccagctggagaagggccaggagccctggatgaccgagaaggagggccccggcgacagcagcagcgacctgaagaacggatctggctccggcagcggccccaagaaaaagagaaaagtctaagctgccttctgcggggcttgccttctggccatgcccttcttctctcccttgcacctgtacctcttggtctttgaataaagcctgagtaggaaggctagcaaaaaaaaaaaaaaaaaaaaaaaaaaaaaaaaaaaaaaaaaaaaaaaaaaaaaaaaaaaaaaaaaaaaaaaaaaaaaaaa

SEQ ID NO: 16152 - RNA, 9485 nt, synthetic construct
  source 1..9485: mol_type = other RNA
aggaaataagagagaaaagaagagtaagaagaaatataagagccaccatggcccctaagaagaagcgtaaagtgagccggatggaacgcctcgtctacgaggtgcggcagaagtgcagaaacatcgaggacatctgcatctcctgcggatctctgaacgtgaccctggagcacccactgttcatcggcggcatgtgccagaactgtaaaaactgttttctggagtgtgcctatcaatacgacgatgacggctaccagagctactgcaccatctgttgcggcggaagagaggtgctgatgtgtggaaataacaactgctgccggtgcttctgcgtggaatgcgtggacctgctggtgggccccggcgccgcccaggccgctattaaggaagatccttggaactgctacatgtgcggccacaagggcacatacggcctgctgagacggagagaggactggcctagcagactgcagatgttcttcgccaataaccacgaccaggagttcgacccccctaaggtgtaccctcccgtccccgccgagaagagaaagcccatccgggtcctgagcctgttcgatggcatcgccaccggtctgctggtgctgaaggacctgggcatccaggtggataggtacattgcctccgaggtgtgcgaggactccatcaccgtgggaatggtgcgtcatcagggcaagatcatgtacgtgggcgacgtgcggagcgtgacacagaagcatatccaggagtggggccctttcgacctggtgatcggcggcagcccttgcaatgacctgagcatcgtgaacccagcccggaagggcctgtacgagggaaccggcagactgttcttcgagttttacagactgctgcacgacgcccggcctaaggaaggcgacgaccggcccttcttttggctgttcgagaatgtggtggccatgggagtcagcgacaagcgggatattagccggttcctggagagcaaccccgtgatgatcgatgccaaggaagtgagcgccgcccaccgggccagatacttctggggcaatctgcctggcatgaacagacccctggccagcaccgtgaacgacaagctggagctgcaggagtgcctggagcacggccggatcgccaagttcagcaaggtgagaaccatcaccacccgaagcaacagcatcaaacaaggcaaggaccagcactttcctgtgttcatgaacgagaaggaggacatcctgtggtgtaccgagatggagagagtgttcgggttcccagtccactacacagatgtcagcaacatgtctagactggccagacagagactgctgggaagaagctggtccgtccctgtgatcagacacctgttcgcccctctgaaggagtacttcgcctgcgtgagcagcggcaacagcaacgccaacagccggggccccagcttctctagcggcctggtgccactgtccctgagagggagccacatgggccccatggagatctacaaaaccgtgagcgcctggaagcggcagcctgtgcgcgtgctgagcctgtttcggaatatcgataaagtcctgaaaagcctgggattcctggagagcggctctggctccggcggtggcaccctgaagtacgtggaggatgtgacaaacgtggtcagacgggatgtggagaagtggggccccttcgatctggtgtacggcagcacccaacccctgggcagctcttgtgaccggtgccctggctggtacatgtttcagttccaccggatcctgcagtacgccctgccgagacaggagtcccagcggccattcttttggattttcatggacaacttgctgctgaccgaggatgaccaggaaactaccactcggttcctgcagaccgaagccgtgaccctgcaggacgtgagaggccgggactaccagaacgccatgcgggtgtggtccaacatccctggactgaaaagcaagcacgcacctctgacccctaaagaagaggagtacctgcaggcccaggtgcggagcagaagcaagctggacgcccctaaggtggatctgctggtgaagaattgcctcctgcccctgagagagtacttcaagtatttcagccagaatagtctgcccctgggaggcagcggcggcggcgccctggtgacatttgaggacgtcgccgtgcggttcacccaggaggaatgggctctgctggatccttctcagaaaatcctgtaccgggacgtgatgagagagacataccggaatctgacctccgtgggcatcaactgggaatgttgggaccttgaagcctgcttcagaagcctgggaagaaacctgagagtgcaggtggtgaagagaaagtgcgagctgaccaacagcggcccctgcgccgagggcggcccaagcagcggcgcccctcctcccagcggcggcagcccagccggctccccaacctctaccgaggagggcacctctgagtccgccacccccgagagcggccctggcacctccaccgagcccagcgagggcagcgcacccggcagccctgccggcagccccacctccacagaggagggaaccagcaccgagcccagcgaaggcagcgccccaggcaccagcaccgagcctagtgagcaggagattaaacggatcaacaagatcagaagaagacttgtgaaagacagcaacaccaagaaggccggcaagacaggccccatgaaaaccctgctggttagagtgatgacacccgatctgagagagcggctggaaaacctgagaaagaagcctgaaaatatcccccagcccatcagcaatacatctagagccaacctgaataagctgctgaccgattacaccgaaatgaagaaggcgatcctgcatgtgtactgggaagagttccagaaggaccctgtgggcctgatgagccgggtggcccagcctgccagcaagaagatcgatcagaacaagctgaaacctgagatggacgagaagggcaacctgaccaccgccggctttgcctgctctcagtgtggccagcccctgttcgtgtacaagctggagcaggtgtctgagaagggcaaggcttacaccaactacttcggacggtgcaatgtggccgagcacgaaaagctgatcctgctggcccagctgaagcccgagaaggatagcgacgaagccgtgacatatagcctgggaaagtttgggcagagggccctggatttctacagcattcatgtgaccaaggagtccacccaccccgtgaagcccctggcccagatcgccggaaacagatacgcctccggacctgtgggaaaggccctgagcgacgcatgtatgggcacaatcgcctccttcctgtctaagtaccaggacatcatcatcgaacaccagaaggtggtgaagggcaaccagaagagactggagagcctgcgggagctggccggcaaggaaaacctggaataccctagcgtgaccctgccacctcagcctcacaccaaggagggcgttgatgcctacaacgaagtgatcgcccgggtgcgaatgtgggtgaacctgaacctgtggcagaagctgaagctaagcagagatgatgccaagcctctgctgagactgaagggattcccttcctttcctctggtcgagagacaggccaacgaagtggactggtgggacatggtgtgtaacgtgaagaagctgatcaacgagaaaaaggaggatggcaaggtgttttggcagaatctggctggctacaagagacaggaagccctgagaccatacctgagcagcgaggaagatcggaagaagggaaagaaattcgctcggtaccagctgggcgacctgctgctgcacctggaaaagaagcacggcgaggactggggaaaggtgtacgacgaggcctgggagcggattgacaagaaagtggaaggcctgagcaagcacatcaagctggaagaggaacggagaagcgaggacgcccagagcaaggccgccctgaccgactggctgcgggctaaggccagcttcgtgatcgagggcctgaaggaggccgacaaggacgagttctgcagatgcgagctgaagctgcagaagtggtacggggacctgcggggaaagcccttcgccatcgaagccgagaacagcatcctggacatcagcggcttcagcaagcagtacaactgtgccttcatctggcagaaggacggcgtgaagaagctgaacctgtacctgatcatcaactacttcaagggcggcaagctgcggttcaagaagatcaaacctgaagccttcgaagccaacagattctacaccgtgatcaacaaaaagagcggcgagatcgtgcccatggaggtgaacttcaacttcgacgaccccaacctgatcatcctgcctctggcctttggcaagagacagggcagagaattcatctggaacgacctgctgtccctggaaaccggcagcctgaagctggccaacggaagagtgatcgagaagacactgtacaacagaagaacccggcaggatgagcctgccctgttcgtggccctgaccttcgagcggcgggaggtcctggactcctccaatatcaaaccaatgaacctgatcggcgtggcaagaggcgaaaacatccccgccgtgatcgccctgaccgaccccgagggctgcccactgagccggtttaaggatagcctgggaaacccaacccacatcctgagaatcggcgagagctataaggagaagcagcggaccatccaggccaagaaggaggtggagcagcggagagccggcggctacagccggaagtacgccagcaaagccaagaatctggcagacgatatggtgagaaacaccgctagagatctgctgtactacgccgtgacccaggatgccatgctgatcttcgccaacctgagccggggcttcggccggcagggcaagcggaccttcatggccgagagacagtacacacggatggaggactggctgaccgccaagctggcctacgagggcctgagcaagacctacctgtccaagacactggcccagtacacctccaagacatgcagcaactgtgggtttaccatcaccagcgccgactacgacagggtgctggagaagctgaagaagacagcaacaggctggatgaccacaattaacggcaaggagctgaaggtggagggccagattacctactacaacagatacaagagacagaacgtagtcaaggacctgtccgtcgagctggatagactgagcgaagaatctgtgaacaacgacatctcctcctggacaaagggcagaagcggagaagctctgagcctcctgaagaaaagattctcccatagacccgtgcaggagaagttcgtgtgcctgaactgcggcttcgagacacacgcagccgagcaagccgccctgaacatcgccagatcctggctgttcctgcggagccaggagtacaagaaataccagacaaacaagacaaccggcaacaccgataagagagccttcgtcgagacctggcagtccttttaccggaagaagcttaaggaggtgtggaaacctgccgtgcggtctggcggatctggcggaggctccatgctgttccaggagctggtgaccttcaaggacgtggccgtggacttcacccaggaggagtggaagtgcctggcccccagccagaaggagctgtacagggaggtgatgctggagaactacaggaacctggtgagcctgggcagggccgtgagcaagcccgagctgatccaccagctggagaggggcgagaccccctggaggcccaagggcgacggctggaggaacagcctgaggcccggcgagggcggcccaagcagcggcgcccctcctcccagcggcggcagcccagccggctccccaacctctaccgaggagggcacctctgagtccgccacccccgagagcggccctggcacctccaccgagcccagcgagggcagcgcacccggcagccctgccggcagccccacctccacagaggagggaaccagcaccgagcccagcgaaggcagcgccccaggcaccagcaccgagcctagtgagcaggagattaaacggatcaacaagatcagaagaagacttgtgaaagacagcaacaccaagaaggccggcaagacaggccccatgaaaaccctgctggttagagtgatgacacccgatctgagagagcggctggaaaacctgagaaagaagcctgaaaatatcccccagcccatcagcaatacatctagagccaacctgaataagctgctgaccgattacaccgaaatgaagaaggcgatcctgcatgtgtactgggaagagttccagaaggaccctgtgggcctgatgagccgggtggcccagcctgccagcaagaagatcgatcagaacaagctgaaacctgagatggacgagaagggcaacctgaccaccgccggctttgcctgctctcagtgtggccagcccctgttcgtgtacaagctggagcaggtgtctgagaagggcaaggcttacaccaactacttcggacggtgcaatgtggccgagcacgaaaagctgatcctgctggcccagctgaagcccgagaaggatagcgacgaagccgtgacatatagcctgggaaagtttgggcagagggccctggatttctacagcattcatgtgaccaaggagtccacccaccccgtgaagcccctggcccagatcgccggaaacagatacgcctccggacctgtgggaaaggccctgagcgacgcatgtatgggcacaatcgcctccttcctgtctaagtaccaggacatcatcatcgaacaccagaaggtggtgaagggcaaccagaagagactggagagcctgcgggagctggccggcaaggaaaacctggaataccctagcgtgaccctgccacctcagcctcacaccaaggagggcgttgatgcctacaacgaagtgatcgcccgggtgcgaatgtgggtgaacctgaacctgtggcagaagctgaagctaagcagagatgatgccaagcctctgctgagactgaagggattcccttcctttcctctggtcgagagacaggccaacgaagtggactggtgggacatggtgtgtaacgtgaagaagctgatcaacgagaaaaaggaggatggcaaggtgttttggcagaatctggctggctacaagagacaggaagccctgagaccatacctgagcagcgaggaagatcggaagaagggaaagaaattcgctcggtaccagctgggcgacctgctgctgcacctggaaaagaagcacggcgaggactggggaaaggtgtacgacgaggcctgggagcggattgacaagaaagtggaaggcctgagcaagcacatcaagctggaagaggaacggagaagcgaggacgcccagagcaaggccgccctgaccgactggctgcgggctaaggccagcttcgtgatcgagggcctgaaggaggccgacaaggacgagttctgcagatgcgagctgaagctgcagaagtggtacggggacctgcggggaaagcccttcgccatcgaagccgagaacagcatcctggacatcagcggcttcagcaagcagtacaactgtgccttcatctggcagaaggacggcgtgaagaagctgaacctgtacctgatcatcaactacttcaagggcggcaagctgcggttcaagaagatcaaacctgaagccttcgaagccaacagattctacaccgtgatcaacaaaaagagcggcgagatcgtgcccatggaggtgaacttcaacttcgacgaccccaacctgatcatcctgcctctggcctttggcaagagacagggcagagaattcatctggaacgacctgctgtccctggaaaccggcagcctgaagctggccaacggaagagtgatcgagaagacactgtacaacagaagaacccggcaggatgagcctgccctgttcgtggccctgaccttcgagcggcgggaggtcctggactcctccaatatcaaaccaatgaacctgatcggcgtggcaagaggcgaaaacatccccgccgtgatcgccctgaccgaccccgagggctgcccactgagccggtttaaggatagcctgggaaacccaacccacatcctgagaatcggcgagagctataaggagaagcagcggaccatccaggccaagaaggaggtggagcagcggagagccggcggctacagccggaagtacgccagcaaagccaagaatctggcagacgatatggtgagaaacaccgctagagatctgctgtactacgccgtgacccaggatgccatgctgatcttcgccaacctgagccggggcttcggccggcagggcaagcggaccttcatggccgagagacagtacacacggatggaggactggctgaccgccaagctggcctacgagggcctgagcaagacctacctgtccaagacactggcccagtacacctccaagacatgcagcaactgtgggtttaccatcaccagcgccgactacgacagggtgctggagaagctgaagaagacagcaacaggctggatgaccacaattaacggcaaggagctgaaggtggagggccagattacctactacaacagatacaagagacagaacgtagtcaaggacctgtccgtcgagctggatagactgagcgaagaatctgtgaacaacgacatctcctcctggacaaagggcagaagcggagaagctctgagcctcctgaagaaaagattctcccatagacccgtgcaggagaagttcgtgtgcctgaactgcggcttcgagacacacgcagccgagcaagccgccctgaacatcgccagatcctggctgttcctgcggagccaggagtacaagaaataccagacaaacaagacaaccggcaacaccgataagagagccttcgtcgagacctggcagtccttttaccggaagaagcttaaggaggtgtggaaacctgccgtgcggtctggcggatctggcggaggctcctatgctgttccaggagctggtgaccttcaaggacgtggccgtggacttcacccaggaggagtggaagtgcctggcccccagccagaaggagctgtacagggaggtgatgctggagaactacaggaacctggtgagcctgggcagggccgtgagcaagcccgagctgatccaccagctggagaggggcgagaccccctggaggcccaagggcgacggctggaggaacagcctgaggcccggcgagggatctggctccggcagcggccccaagaaaaagagaaaagtctaagctgccttctgcggggcttgccttctggccatgcccttcttctctcccttgcacctgtacctcttggtctttgaataaagcctgagtaggaaggctagcaaaaaaaaaaaaaaaaaaaaaaaaaaaaaaaaaaaaaaaaaaaaaaaaaaaaaaaaaaaaaaaaaaaaaaaaaaaaaaaa

SEQ ID NO: 16153 - RNA, 9485 nt, synthetic construct
  source 1..9485: mol_type = other RNA
aggaaataagagagaaaagaagagtaagaagaaatataagagccaccatggcccctaagaagaagcgtaaagtgagccggatggaacgcctcgtctacgaggtgcggcagaagtgcagaaacatcgaggacatctgcatctcctgcggatctctgaacgtgaccctggagcacccactgttcatcggcggcatgtgccagaactgtaaaaactgttttctggagtgtgcctatcaatacgacgatgacggctaccagagctactgcaccatctgttgcggcggaagagaggtgctgatgtgtggaaataacaactgctgccggtgcttctgcgtggaatgcgtggacctgctggtgggccccggcgccgcccaggccgctattaaggaagatccttggaactgctacatgtgcggccacaagggcacatacggcctgctgagacggagagaggactggcctagcagactgcagatgttcttcgccaataaccacgaccaggagttcgacccccctaaggtgtaccctcccgtccccgccgagaagagaaagcccatccgggtcctgagcctgttcgatggcatcgccaccggtctgctggtgctgaaggacctgggcatccaggtggataggtacattgcctccgaggtgtgcgaggactccatcaccgtgggaatggtgcgtcatcagggcaagatcatgtacgtgggcgacgtgcggagcgtgacacagaagcatatccaggagtggggccctttcgacctggtgatcggcggcagcccttgcaatgacctgagcatcgtgaacccagcccggaagggcctgtacgagggaaccggcagactgttcttcgagttttacagactgctgcacgacgcccggcctaaggaaggcgacgaccggcccttcttttggctgttcgagaatgtggtggccatgggagtcagcgacaagcgggatattagccggttcctggagagcaaccccgtgatgatcgatgccaaggaagtgagcgccgcccaccgggccagatacttctggggcaatctgcctggcatgaacagacccctggccagcaccgtgaacgacaagctggagctgcaggagtgcctggagcacggccggatcgccaagttcagcaaggtgagaaccatcaccacccgaagcaacagcatcaaacaaggcaaggaccagcactttcctgtgttcatgaacgagaaggaggacatcctgtggtgtaccgagatggagagagtgttcgggttcccagtccactacacagatgtcagcaacatgtctagactggccagacagagactgctgggaagaagctggtccgtccctgtgatcagacacctgttcgcccctctgaaggagtacttcgcctgcgtgagcagcggcaacagcaacgccaacagccggggccccagcttctctagcggcctggtgccactgtccctgagagggagccacatgggccccatggagatctacaaaaccgtgagcgcctggaagcggcagcctgtgcgcgtgctgagcctgtttcggaatatcgataaagtcctgaaaagcctgggattcctggagagcggctctggctccggcggtggcaccctgaagtacgtggaggatgtgacaaacgtggtcagacgggatgtggagaagtggggccccttcgatctggtgtacggcagcacccaacccctgggcagctcttgtgaccggtgccctggctggtacatgtttcagttccaccggatcctgcagtacgccctgccgagacaggagtcccagcggccattcttttggattttcatggacaacttgctgctgaccgaggatgaccaggaaactaccactcggttcctgcagaccgaagccgtgaccctgcaggacgtgagaggccgggactaccagaacgccatgcgggtgtggtccaacatccctggactgaaaagcaagcacgcacctctgacccctaaagaagaggagtacctgcaggcccaggtgcggagcagaagcaagctggacgcccctaaggtggatctgctggtgaagaattgcctcctgcccctgagagagtacttcaagtatttcagccagaatagtctgcccctgggaggcagcggcggcggcgccctggtgacatttgaggacgtcgccgtgcggttcacccaggaggaatgggctctgctggatccttctcagaaaatcctgtaccgggacgtgatgagagagacataccggaatctgacctccgtgggcatcaactgggaatgttgggaccttgaagcctgcttcagaagcctgggaagaaacctgagagtgcaggtggtgaagagaaagtgcgagctgaccaacagcggcccctgcgccgagggcggcccaagcagcggcgcccctcctcccagcggcggcagcccagccggctccccaacctctaccgaggagggcacctctgagtccgccacccccgagagcggccctggcacctccaccgagcccagcgagggcagcgcacccggcagccctgccggcagccccacctccacagaggagggaaccagcaccgagcccagcgaaggcagcgccccaggcaccagcaccgagcctagtgagcaggagattaaacggatcaacaagatcagaagaagacttgtgaaagacagcaacaccaagaaggccggcaagacaggccccatgaaaaccctgctggttagagtgatgacacccgatctgagagagcggctggaaaacctgagaaagaagcctgaaaatatcccccagcccatcagcaatacatctagagccaacctgaataagctgctgaccgattacaccgaaatgaagaaggcgatcctgcatgtgtactgggaagagttccagaaggaccctgtgggcctgatgagccgggtggcccagcctgccagcaagaagatcgatcagaacaagctgaaacctgagatggacgagaagggcaacctgaccaccgccggctttgcctgctctcagtgtggccagcccctgttcgtgtacaagctggagcaggtgtctgagaagggcaaggcttacaccaactacttcggacggtgcaatgtggccgagcacgaaaagctgatcctgctggcccagctgaagcccgagaaggatagcgacgaagccgtgacatatagcctgggaaagtttgggcagagggccctggatttctacagcattcatgtgaccaaggagtccacccaccccgtgaagcccctggcccagatcgccggaaacagatacgcctccggacctgtgggaaaggccctgagcgacgcatgtatgggcacaatcgcctccttcctgtctaagtaccaggacatcatcatcgaacaccagaaggtggtgaagggcaaccagaagagactggagagcctgcgggagctggccggcaaggaaaacctggaataccctagcgtgaccctgccacctcagcctcacaccaaggagggcgttgatgcctacaacgaagtgatcgcccgggtgcgaatgtgggtgaacctgaacctgtggcagaagctgaagctaagcagagatgatgccaagcctctgctgagactgaagggattcccttcctttcctctggtcgagagacaggccaacgaagtggactggtgggacatggtgtgtaacgtgaagaagctgatcaacgagaaaaaggaggatggcaaggtgttttggcagaatctggctggctacaagagacaggaagccctgagaccatacctgagcagcgaggaagatcggaagaagggaaagaaattcgctcggtaccagctgggcgacctgctgctgcacctggaaaagaagcacggcgaggactggggaaaggtgtacgacgaggcctgggagcggattgacaagaaagtggaaggcctgagcaagcacatcaagctggaagaggaacggagaagcgaggacgcccagagcaaggccgccctgaccgactggctgcgggctaaggccagcttcgtgatcgagggcctgaaggaggccgacaaggacgagttctgcagatgcgagctgaagctgcagaagtggtacggggacctgcggggaaagcccttcgccatcgaagccgagaacagcatcctggacatcagcggcttcagcaagcagtacaactgtgccttcatctggcagaaggacggcgtgaagaagctgaacctgtacctgatcatcaactacttcaagggcggcaagctgcggttcaagaagatcaaacctgaagccttcgaagccaacagattctacaccgtgatcaacaaaaagagcggcgagatcgtgcccatggaggtgaacttcaacttcgacgaccccaacctgatcatcctgcctctggcctttggcaagagacagggcagagaattcatctggaacgacctgctgtccctggaaaccggcagcctgaagctggccaacggaagagtgatcgagaagacactgtacaacagaagaacccggcaggatgagcctgccctgttcgtggccctgaccttcgagcggcgggaggtcctggactcctccaatatcaaaccaatgaacctgatcggcgtggcaagaggcgaaaacatccccgccgtgatcgccctgaccgaccccgagggctgcccactgagccggtttaaggatagcctgggaaacccaacccacatcctgagaatcggcgagagctataaggagaagcagcggaccatccaggccaagaaggaggtggagcagcggagagccggcggctacagccggaagtacgccagcaaagccaagaatctggcagacgatatggtgagaaacaccgctagagatctgctgtactacgccgtgacccaggatgccatgctgatcttcgccaacctgagccggggcttcggccggcagggcaagcggaccttcatggccgagagacagtacacacggatggaggactggctgaccgccaagctggcctacgagggcctgagcaagacctacctgtccaagacactggcccagtacacctccaagacatgcagcaactgtgggtttaccatcaccagcgccgactacgacagggtgctggagaagctgaagaagacagcaacaggctggatgaccacaattaacggcaaggagctgaaggtggagggccagattacctactacaacagatacaagagacagaacgtagtcaaggacctgtccgtcgagctggatagactgagcgaagaatctgtgaacaacgacatctcctcctggacaaagggcagaagcggagaagctctgagcctcctgaagaaaagattctcccatagacccgtgcaggagaagttcgtgtgcctgaactgcggcttcgagacacacgcagccgagcaagccgccctgaacatcgccagatcctggctgttcctgcggagccaggagtacaagaaataccagacaaacaagacaaccggcaacaccgataagagagccttcgtcgagacctggcagtccttttaccggaagaagcttaaggaggtgtggaaacctgccgtgcggtctggcggatctggcggaggctccatggagcccagggacgccttcgaggacgtggccgtgtacttcaccagggaggagtgggccctgctggacgacggcgacaagggcctgtacagggaccagatgctgaggaactaccaggccctggtgagcctgggctacaggggccccacccccgacctgatctgctgcatccagaggggcaaggtggagctgtgggtgagggacggcgaggaccacggcgagatcagcggcagcgaggacctgggcggcccaagcagcggcgcccctcctcccagcggcggcagcccagccggctccccaacctctaccgaggagggcacctctgagtccgccacccccgagagcggccctggcacctccaccgagcccagcgagggcagcgcacccggcagccctgccggcagccccacctccacagaggagggaaccagcaccgagcccagcgaaggcagcgccccaggcaccagcaccgagcctagtgagcaggagattaaacggatcaacaagatcagaagaagacttgtgaaagacagcaacaccaagaaggccggcaagacaggccccatgaaaaccctgctggttagagtgatgacacccgatctgagagagcggctggaaaacctgagaaagaagcctgaaaatatcccccagcccatcagcaatacatctagagccaacctgaataagctgctgaccgattacaccgaaatgaagaaggcgatcctgcatgtgtactgggaagagttccagaaggaccctgtgggcctgatgagccgggtggcccagcctgccagcaagaagatcgatcagaacaagctgaaacctgagatggacgagaagggcaacctgaccaccgccggctttgcctgctctcagtgtggccagcccctgttcgtgtacaagctggagcaggtgtctgagaagggcaaggcttacaccaactacttcggacggtgcaatgtggccgagcacgaaaagctgatcctgctggcccagctgaagcccgagaaggatagcgacgaagccgtgacatatagcctgggaaagtttgggcagagggccctggatttctacagcattcatgtgaccaaggagtccacccaccccgtgaagcccctggcccagatcgccggaaacagatacgcctccggacctgtgggaaaggccctgagcgacgcatgtatgggcacaatcgcctccttcctgtctaagtaccaggacatcatcatcgaacaccagaaggtggtgaagggcaaccagaagagactggagagcctgcgggagctggccggcaaggaaaacctggaataccctagcgtgaccctgccacctcagcctcacaccaaggagggcgttgatgcctacaacgaagtgatcgcccgggtgcgaatgtgggtgaacctgaacctgtggcagaagctgaagctaagcagagatgatgccaagcctctgctgagactgaagggattcccttcctttcctctggtcgagagacaggccaacgaagtggactggtgggacatggtgtgtaacgtgaagaagctgatcaacgagaaaaaggaggatggcaaggtgttttggcagaatctggctggctacaagagacaggaagccctgagaccatacctgagcagcgaggaagatcggaagaagggaaagaaattcgctcggtaccagctgggcgacctgctgctgcacctggaaaagaagcacggcgaggactggggaaaggtgtacgacgaggcctgggagcggattgacaagaaagtggaaggcctgagcaagcacatcaagctggaagaggaacggagaagcgaggacgcccagagcaaggccgccctgaccgactggctgcgggctaaggccagcttcgtgatcgagggcctgaaggaggccgacaaggacgagttctgcagatgcgagctgaagctgcagaagtggtacggggacctgcggggaaagcccttcgccatcgaagccgagaacagcatcctggacatcagcggcttcagcaagcagtacaactgtgccttcatctggcagaaggacggcgtgaagaagctgaacctgtacctgatcatcaactacttcaagggcggcaagctgcggttcaagaagatcaaacctgaagccttcgaagccaacagattctacaccgtgatcaacaaaaagagcggcgagatcgtgcccatggaggtgaacttcaacttcgacgaccccaacctgatcatcctgcctctggcctttggcaagagacagggcagagaattcatctggaacgacctgctgtccctggaaaccggcagcctgaagctggccaacggaagagtgatcgagaagacactgtacaacagaagaacccggcaggatgagcctgccctgttcgtggccctgaccttcgagcggcgggaggtcctggactcctccaatatcaaaccaatgaacctgatcggcgtggcaagaggcgaaaacatccccgccgtgatcgccctgaccgaccccgagggctgcccactgagccggtttaaggatagcctgggaaacccaacccacatcctgagaatcggcgagagctataaggagaagcagcggaccatccaggccaagaaggaggtggagcagcggagagccggcggctacagccggaagtacgccagcaaagccaagaatctggcagacgatatggtgagaaacaccgctagagatctgctgtactacgccgtgacccaggatgccatgctgatcttcgccaacctgagccggggcttcggccggcagggcaagcggaccttcatggccgagagacagtacacacggatggaggactggctgaccgccaagctggcctacgagggcctgagcaagacctacctgtccaagacactggcccagtacacctccaagacatgcagcaactgtgggtttaccatcaccagcgccgactacgacagggtgctggagaagctgaagaagacagcaacaggctggatgaccacaattaacggcaaggagctgaaggtggagggccagattacctactacaacagatacaagagacagaacgtagtcaaggacctgtccgtcgagctggatagactgagcgaagaatctgtgaacaacgacatctcctcctggacaaagggcagaagcggagaagctctgagcctcctgaagaaaagattctcccatagacccgtgcaggagaagttcgtgtgcctgaactgcggcttcgagacacacgcagccgagcaagccgccctgaacatcgccagatcctggctgttcctgcggagccaggagtacaagaaataccagacaaacaagacaaccggcaacaccgataagagagccttcgtcgagacctggcagtccttttaccggaagaagcttaaggaggtgtggaaacctgccgtgcggtctggcggatctggcggaggctcctatggagcccagggacgccttcgaggacgtggccgtgtacttcaccagggaggagtgggccctgctggacgacggcgacaagggcctgtacagggaccagatgctgaggaactaccaggccctggtgagcctgggctacaggggccccacccccgacctgatctgctgcatccagaggggcaaggtggagctgtgggtgagggacggcgaggaccacggcgagatcagcggcagcgaggacctgggatctggctccggcagcggccccaagaaaaagagaaaagtctaagctgccttctgcggggcttgccttctggccatgcccttcttctctcccttgcacctgtacctcttggtctttgaataaagcctgagtaggaaggctagcaaaaaaaaaaaaaaaaaaaaaaaaaaaaaaaaaaaaaaaaaaaaaaaaaaaaaaaaaaaaaaaaaaaaaaaaaaaaaaaa

SEQ ID NO: 16154 - RNA, 9485 nt, synthetic construct
  source 1..9485: mol_type = other RNA
aggaaataagagagaaaagaagagtaagaagaaatataagagccaccatggcccctaagaagaagcgtaaagtgagccggatggaacgcctcgtctacgaggtgcggcagaagtgcagaaacatcgaggacatctgcatctcctgcggatctctgaacgtgaccctggagcacccactgttcatcggcggcatgtgccagaactgtaaaaactgttttctggagtgtgcctatcaatacgacgatgacggctaccagagctactgcaccatctgttgcggcggaagagaggtgctgatgtgtggaaataacaactgctgccggtgcttctgcgtggaatgcgtggacctgctggtgggccccggcgccgcccaggccgctattaaggaagatccttggaactgctacatgtgcggccacaagggcacatacggcctgctgagacggagagaggactggcctagcagactgcagatgttcttcgccaataaccacgaccaggagttcgacccccctaaggtgtaccctcccgtccccgccgagaagagaaagcccatccgggtcctgagcctgttcgatggcatcgccaccggtctgctggtgctgaaggacctgggcatccaggtggataggtacattgcctccgaggtgtgcgaggactccatcaccgtgggaatggtgcgtcatcagggcaagatcatgtacgtgggcgacgtgcggagcgtgacacagaagcatatccaggagtggggccctttcgacctggtgatcggcggcagcccttgcaatgacctgagcatcgtgaacccagcccggaagggcctgtacgagggaaccggcagactgttcttcgagttttacagactgctgcacgacgcccggcctaaggaaggcgacgaccggcccttcttttggctgttcgagaatgtggtggccatgggagtcagcgacaagcgggatattagccggttcctggagagcaaccccgtgatgatcgatgccaaggaagtgagcgccgcccaccgggccagatacttctggggcaatctgcctggcatgaacagacccctggccagcaccgtgaacgacaagctggagctgcaggagtgcctggagcacggccggatcgccaagttcagcaaggtgagaaccatcaccacccgaagcaacagcatcaaacaaggcaaggaccagcactttcctgtgttcatgaacgagaaggaggacatcctgtggtgtaccgagatggagagagtgttcgggttcccagtccactacacagatgtcagcaacatgtctagactggccagacagagactgctgggaagaagctggtccgtccctgtgatcagacacctgttcgcccctctgaaggagtacttcgcctgcgtgagcagcggcaacagcaacgccaacagccggggccccagcttctctagcggcctggtgccactgtccctgagagggagccacatgggccccatggagatctacaaaaccgtgagcgcctggaagcggcagcctgtgcgcgtgctgagcctgtttcggaatatcgataaagtcctgaaaagcctgggattcctggagagcggctctggctccggcggtggcaccctgaagtacgtggaggatgtgacaaacgtggtcagacgggatgtggagaagtggggccccttcgatctggtgtacggcagcacccaacccctgggcagctcttgtgaccggtgccctggctggtacatgtttcagttccaccggatcctgcagtacgccctgccgagacaggagtcccagcggccattcttttggattttcatggacaacttgctgctgaccgaggatgaccaggaaactaccactcggttcctgcagaccgaagccgtgaccctgcaggacgtgagaggccgggactaccagaacgccatgcgggtgtggtccaacatccctggactgaaaagcaagcacgcacctctgacccctaaagaagaggagtacctgcaggcccaggtgcggagcagaagcaagctggacgcccctaaggtggatctgctggtgaagaattgcctcctgcccctgagagagtacttcaagtatttcagccagaatagtctgcccctgggaggcagcggcggcggcgccctggtgacatttgaggacgtcgccgtgcggttcacccaggaggaatgggctctgctggatccttctcagaaaatcctgtaccgggacgtgatgagagagacataccggaatctgacctccgtgggcatcaactgggaatgttgggaccttgaagcctgcttcagaagcctgggaagaaacctgagagtgcaggtggtgaagagaaagtgcgagctgaccaacagcggcccctgcgccgagggcggcccaagcagcggcgcccctcctcccagcggcggcagcccagccggctccccaacctctaccgaggagggcacctctgagtccgccacccccgagagcggccctggcacctccaccgagcccagcgagggcagcgcacccggcagccctgccggcagccccacctccacagaggagggaaccagcaccgagcccagcgaaggcagcgccccaggcaccagcaccgagcctagtgagcaggagattaaacggatcaacaagatcagaagaagacttgtgaaagacagcaacaccaagaaggccggcaagacaggccccatgaaaaccctgctggttagagtgatgacacccgatctgagagagcggctggaaaacctgagaaagaagcctgaaaatatcccccagcccatcagcaatacatctagagccaacctgaataagctgctgaccgattacaccgaaatgaagaaggcgatcctgcatgtgtactgggaagagttccagaaggaccctgtgggcctgatgagccgggtggcccagcctgccagcaagaagatcgatcagaacaagctgaaacctgagatggacgagaagggcaacctgaccaccgccggctttgcctgctctcagtgtggccagcccctgttcgtgtacaagctggagcaggtgtctgagaagggcaaggcttacaccaactacttcggacggtgcaatgtggccgagcacgaaaagctgatcctgctggcccagctgaagcccgagaaggatagcgacgaagccgtgacatatagcctgggaaagtttgggcagagggccctggatttctacagcattcatgtgaccaaggagtccacccaccccgtgaagcccctggcccagatcgccggaaacagatacgcctccggacctgtgggaaaggccctgagcgacgcatgtatgggcacaatcgcctccttcctgtctaagtaccaggacatcatcatcgaacaccagaaggtggtgaagggcaaccagaagagactggagagcctgcgggagctggccggcaaggaaaacctggaataccctagcgtgaccctgccacctcagcctcacaccaaggagggcgttgatgcctacaacgaagtgatcgcccgggtgcgaatgtgggtgaacctgaacctgtggcagaagctgaagctaagcagagatgatgccaagcctctgctgagactgaagggattcccttcctttcctctggtcgagagacaggccaacgaagtggactggtgggacatggtgtgtaacgtgaagaagctgatcaacgagaaaaaggaggatggcaaggtgttttggcagaatctggctggctacaagagacaggaagccctgagaccatacctgagcagcgaggaagatcggaagaagggaaagaaattcgctcggtaccagctgggcgacctgctgctgcacctggaaaagaagcacggcgaggactggggaaaggtgtacgacgaggcctgggagcggattgacaagaaagtggaaggcctgagcaagcacatcaagctggaagaggaacggagaagcgaggacgcccagagcaaggccgccctgaccgactggctgcgggctaaggccagcttcgtgatcgagggcctgaaggaggccgacaaggacgagttctgcagatgcgagctgaagctgcagaagtggtacggggacctgcggggaaagcccttcgccatcgaagccgagaacagcatcctggacatcagcggcttcagcaagcagtacaactgtgccttcatctggcagaaggacggcgtgaagaagctgaacctgtacctgatcatcaactacttcaagggcggcaagctgcggttcaagaagatcaaacctgaagccttcgaagccaacagattctacaccgtgatcaacaaaaagagcggcgagatcgtgcccatggaggtgaacttcaacttcgacgaccccaacctgatcatcctgcctctggcctttggcaagagacagggcagagaattcatctggaacgacctgctgtccctggaaaccggcagcctgaagctggccaacggaagagtgatcgagaagacactgtacaacagaagaacccggcaggatgagcctgccctgttcgtggccctgaccttcgagcggcgggaggtcctggactcctccaatatcaaaccaatgaacctgatcggcgtggcaagaggcgaaaacatccccgccgtgatcgccctgaccgaccccgagggctgcccactgagccggtttaaggatagcctgggaaacccaacccacatcctgagaatcggcgagagctataaggagaagcagcggaccatccaggccaagaaggaggtggagcagcggagagccggcggctacagccggaagtacgccagcaaagccaagaatctggcagacgatatggtgagaaacaccgctagagatctgctgtactacgccgtgacccaggatgccatgctgatcttcgccaacctgagccggggcttcggccggcagggcaagcggaccttcatggccgagagacagtacacacggatggaggactggctgaccgccaagctggcctacgagggcctgagcaagacctacctgtccaagacactggcccagtacacctccaagacatgcagcaactgtgggtttaccatcaccagcgccgactacgacagggtgctggagaagctgaagaagacagcaacaggctggatgaccacaattaacggcaaggagctgaaggtggagggccagattacctactacaacagatacaagagacagaacgtagtcaaggacctgtccgtcgagctggatagactgagcgaagaatctgtgaacaacgacatctcctcctggacaaagggcagaagcggagaagctctgagcctcctgaagaaaagattctcccatagacccgtgcaggagaagttcgtgtgcctgaactgcggcttcgagacacacgcagccgagcaagccgccctgaacatcgccagatcctggctgttcctgcggagccaggagtacaagaaataccagacaaacaagacaaccggcaacaccgataagagagccttcgtcgagacctggcagtccttttaccggaagaagcttaaggaggtgtggaaacctgccgtgcggtctggcggatctggcggaggctccgcccaggcccccctgagcttcgaggacgtggccgtgagcttcagcagggaggagtggaggctgctggtgcccgcccagaaggacctgtacagggacgtgatgctggagaactacaggaacctggtgagcgtgggctaccaggccagcgagcccgacagcctgttcaggctggagcacggcggccccctgtgggtggtggagggcgccgcccccaggcccccctgccccggcgagtacgtggccggcggcccaagcagcggcgcccctcctcccagcggcggcagcccagccggctccccaacctctaccgaggagggcacctctgagtccgccacccccgagagcggccctggcacctccaccgagcccagcgagggcagcgcacccggcagccctgccggcagccccacctccacagaggagggaaccagcaccgagcccagcgaaggcagcgccccaggcaccagcaccgagcctagtgagcaggagattaaacggatcaacaagatcagaagaagacttgtgaaagacagcaacaccaagaaggccggcaagacaggccccatgaaaaccctgctggttagagtgatgacacccgatctgagagagcggctggaaaacctgagaaagaagcctgaaaatatcccccagcccatcagcaatacatctagagccaacctgaataagctgctgaccgattacaccgaaatgaagaaggcgatcctgcatgtgtactgggaagagttccagaaggaccctgtgggcctgatgagccgggtggcccagcctgccagcaagaagatcgatcagaacaagctgaaacctgagatggacgagaagggcaacctgaccaccgccggctttgcctgctctcagtgtggccagcccctgttcgtgtacaagctggagcaggtgtctgagaagggcaaggcttacaccaactacttcggacggtgcaatgtggccgagcacgaaaagctgatcctgctggcccagctgaagcccgagaaggatagcgacgaagccgtgacatatagcctgggaaagtttgggcagagggccctggatttctacagcattcatgtgaccaaggagtccacccaccccgtgaagcccctggcccagatcgccggaaacagatacgcctccggacctgtgggaaaggccctgagcgacgcatgtatgggcacaatcgcctccttcctgtctaagtaccaggacatcatcatcgaacaccagaaggtggtgaagggcaaccagaagagactggagagcctgcgggagctggccggcaaggaaaacctggaataccctagcgtgaccctgccacctcagcctcacaccaaggagggcgttgatgcctacaacgaagtgatcgcccgggtgcgaatgtgggtgaacctgaacctgtggcagaagctgaagctaagcagagatgatgccaagcctctgctgagactgaagggattcccttcctttcctctggtcgagagacaggccaacgaagtggactggtgggacatggtgtgtaacgtgaagaagctgatcaacgagaaaaaggaggatggcaaggtgttttggcagaatctggctggctacaagagacaggaagccctgagaccatacctgagcagcgaggaagatcggaagaagggaaagaaattcgctcggtaccagctgggcgacctgctgctgcacctggaaaagaagcacggcgaggactggggaaaggtgtacgacgaggcctgggagcggattgacaagaaagtggaaggcctgagcaagcacatcaagctggaagaggaacggagaagcgaggacgcccagagcaaggccgccctgaccgactggctgcgggctaaggccagcttcgtgatcgagggcctgaaggaggccgacaaggacgagttctgcagatgcgagctgaagctgcagaagtggtacggggacctgcggggaaagcccttcgccatcgaagccgagaacagcatcctggacatcagcggcttcagcaagcagtacaactgtgccttcatctggcagaaggacggcgtgaagaagctgaacctgtacctgatcatcaactacttcaagggcggcaagctgcggttcaagaagatcaaacctgaagccttcgaagccaacagattctacaccgtgatcaacaaaaagagcggcgagatcgtgcccatggaggtgaacttcaacttcgacgaccccaacctgatcatcctgcctctggcctttggcaagagacagggcagagaattcatctggaacgacctgctgtccctggaaaccggcagcctgaagctggccaacggaagagtgatcgagaagacactgtacaacagaagaacccggcaggatgagcctgccctgttcgtggccctgaccttcgagcggcgggaggtcctggactcctccaatatcaaaccaatgaacctgatcggcgtggcaagaggcgaaaacatccccgccgtgatcgccctgaccgaccccgagggctgcccactgagccggtttaaggatagcctgggaaacccaacccacatcctgagaatcggcgagagctataaggagaagcagcggaccatccaggccaagaaggaggtggagcagcggagagccggcggctacagccggaagtacgccagcaaagccaagaatctggcagacgatatggtgagaaacaccgctagagatctgctgtactacgccgtgacccaggatgccatgctgatcttcgccaacctgagccggggcttcggccggcagggcaagcggaccttcatggccgagagacagtacacacggatggaggactggctgaccgccaagctggcctacgagggcctgagcaagacctacctgtccaagacactggcccagtacacctccaagacatgcagcaactgtgggtttaccatcaccagcgccgactacgacagggtgctggagaagctgaagaagacagcaacaggctggatgaccacaattaacggcaaggagctgaaggtggagggccagattacctactacaacagatacaagagacagaacgtagtcaaggacctgtccgtcgagctggatagactgagcgaagaatctgtgaacaacgacatctcctcctggacaaagggcagaagcggagaagctctgagcctcctgaagaaaagattctcccatagacccgtgcaggagaagttcgtgtgcctgaactgcggcttcgagacacacgcagccgagcaagccgccctgaacatcgccagatcctggctgttcctgcggagccaggagtacaagaaataccagacaaacaagacaaccggcaacaccgataagagagccttcgtcgagacctggcagtccttttaccggaagaagcttaaggaggtgtggaaacctgccgtgcggtctggcggatctggcggaggctcctgcccaggcccccctgagcttcgaggacgtggccgtgagcttcagcagggaggagtggaggctgctggtgcccgcccagaaggacctgtacagggacgtgatgctggagaactacaggaacctggtgagcgtgggctaccaggccagcgagcccgacagcctgttcaggctggagcacggcggccccctgtgggtggtggagggcgccgcccccaggcccccctgccccggcgagtacgtggccggatctggctccggcagcggccccaagaaaaagagaaaagtctaagctgccttctgcggggcttgccttctggccatgcccttcttctctcccttgcacctgtacctcttggtctttgaataaagcctgagtaggaaggctagcaaaaaaaaaaaaaaaaaaaaaaaaaaaaaaaaaaaaaaaaaaaaaaaaaaaaaaaaaaaaaaaaaaaaaaaaaaaaaaaa

SEQ ID NO: 16155 - RNA, 9485 nt, synthetic construct
  source 1..9485: mol_type = other RNA
aggaaataagagagaaaagaagagtaagaagaaatataagagccaccatggcccctaagaagaagcgtaaagtgagccggatggaacgcctcgtctacgaggtgcggcagaagtgcagaaacatcgaggacatctgcatctcctgcggatctctgaacgtgaccctggagcacccactgttcatcggcggcatgtgccagaactgtaaaaactgttttctggagtgtgcctatcaatacgacgatgacggctaccagagctactgcaccatctgttgcggcggaagagaggtgctgatgtgtggaaataacaactgctgccggtgcttctgcgtggaatgcgtggacctgctggtgggccccggcgccgcccaggccgctattaaggaagatccttggaactgctacatgtgcggccacaagggcacatacggcctgctgagacggagagaggactggcctagcagactgcagatgttcttcgccaataaccacgaccaggagttcgacccccctaaggtgtaccctcccgtccccgccgagaagagaaagcccatccgggtcctgagcctgttcgatggcatcgccaccggtctgctggtgctgaaggacctgggcatccaggtggataggtacattgcctccgaggtgtgcgaggactccatcaccgtgggaatggtgcgtcatcagggcaagatcatgtacgtgggcgacgtgcggagcgtgacacagaagcatatccaggagtggggccctttcgacctggtgatcggcggcagcccttgcaatgacctgagcatcgtgaacccagcccggaagggcctgtacgagggaaccggcagactgttcttcgagttttacagactgctgcacgacgcccggcctaaggaaggcgacgaccggcccttcttttggctgttcgagaatgtggtggccatgggagtcagcgacaagcgggatattagccggttcctggagagcaaccccgtgatgatcgatgccaaggaagtgagcgccgcccaccgggccagatacttctggggcaatctgcctggcatgaacagacccctggccagcaccgtgaacgacaagctggagctgcaggagtgcctggagcacggccggatcgccaagttcagcaaggtgagaaccatcaccacccgaagcaacagcatcaaacaaggcaaggaccagcactttcctgtgttcatgaacgagaaggaggacatcctgtggtgtaccgagatggagagagtgttcgggttcccagtccactacacagatgtcagcaacatgtctagactggccagacagagactgctgggaagaagctggtccgtccctgtgatcagacacctgttcgcccctctgaaggagtacttcgcctgcgtgagcagcggcaacagcaacgccaacagccggggccccagcttctctagcggcctggtgccactgtccctgagagggagccacatgggccccatggagatctacaaaaccgtgagcgcctggaagcggcagcctgtgcgcgtgctgagcctgtttcggaatatcgataaagtcctgaaaagcctgggattcctggagagcggctctggctccggcggtggcaccctgaagtacgtggaggatgtgacaaacgtggtcagacgggatgtggagaagtggggccccttcgatctggtgtacggcagcacccaacccctgggcagctcttgtgaccggtgccctggctggtacatgtttcagttccaccggatcctgcagtacgccctgccgagacaggagtcccagcggccattcttttggattttcatggacaacttgctgctgaccgaggatgaccaggaaactaccactcggttcctgcagaccgaagccgtgaccctgcaggacgtgagaggccgggactaccagaacgccatgcgggtgtggtccaacatccctggactgaaaagcaagcacgcacctctgacccctaaagaagaggagtacctgcaggcccaggtgcggagcagaagcaagctggacgcccctaaggtggatctgctggtgaagaattgcctcctgcccctgagagagtacttcaagtatttcagccagaatagtctgcccctgggaggcagcggcggcggcgccctggtgacatttgaggacgtcgccgtgcggttcacccaggaggaatgggctctgctggatccttctcagaaaatcctgtaccgggacgtgatgagagagacataccggaatctgacctccgtgggcatcaactgggaatgttgggaccttgaagcctgcttcagaagcctgggaagaaacctgagagtgcaggtggtgaagagaaagtgcgagctgaccaacagcggcccctgcgccgagggcggcccaagcagcggcgcccctcctcccagcggcggcagcccagccggctccccaacctctaccgaggagggcacctctgagtccgccacccccgagagcggccctggcacctccaccgagcccagcgagggcagcgcacccggcagccctgccggcagccccacctccacagaggagggaaccagcaccgagcccagcgaaggcagcgccccaggcaccagcaccgagcctagtgagcaggagattaaacggatcaacaagatcagaagaagacttgtgaaagacagcaacaccaagaaggccggcaagacaggccccatgaaaaccctgctggttagagtgatgacacccgatctgagagagcggctggaaaacctgagaaagaagcctgaaaatatcccccagcccatcagcaatacatctagagccaacctgaataagctgctgaccgattacaccgaaatgaagaaggcgatcctgcatgtgtactgggaagagttccagaaggaccctgtgggcctgatgagccgggtggcccagcctgccagcaagaagatcgatcagaacaagctgaaacctgagatggacgagaagggcaacctgaccaccgccggctttgcctgctctcagtgtggccagcccctgttcgtgtacaagctggagcaggtgtctgagaagggcaaggcttacaccaactacttcggacggtgcaatgtggccgagcacgaaaagctgatcctgctggcccagctgaagcccgagaaggatagcgacgaagccgtgacatatagcctgggaaagtttgggcagagggccctggatttctacagcattcatgtgaccaaggagtccacccaccccgtgaagcccctggcccagatcgccggaaacagatacgcctccggacctgtgggaaaggccctgagcgacgcatgtatgggcacaatcgcctccttcctgtctaagtaccaggacatcatcatcgaacaccagaaggtggtgaagggcaaccagaagagactggagagcctgcgggagctggccggcaaggaaaacctggaataccctagcgtgaccctgccacctcagcctcacaccaaggagggcgttgatgcctacaacgaagtgatcgcccgggtgcgaatgtgggtgaacctgaacctgtggcagaagctgaagctaagcagagatgatgccaagcctctgctgagactgaagggattcccttcctttcctctggtcgagagacaggccaacgaagtggactggtgggacatggtgtgtaacgtgaagaagctgatcaacgagaaaaaggaggatggcaaggtgttttggcagaatctggctggctacaagagacaggaagccctgagaccatacctgagcagcgaggaagatcggaagaagggaaagaaattcgctcggtaccagctgggcgacctgctgctgcacctggaaaagaagcacggcgaggactggggaaaggtgtacgacgaggcctgggagcggattgacaagaaagtggaaggcctgagcaagcacatcaagctggaagaggaacggagaagcgaggacgcccagagcaaggccgccctgaccgactggctgcgggctaaggccagcttcgtgatcgagggcctgaaggaggccgacaaggacgagttctgcagatgcgagctgaagctgcagaagtggtacggggacctgcggggaaagcccttcgccatcgaagccgagaacagcatcctggacatcagcggcttcagcaagcagtacaactgtgccttcatctggcagaaggacggcgtgaagaagctgaacctgtacctgatcatcaactacttcaagggcggcaagctgcggttcaagaagatcaaacctgaagccttcgaagccaacagattctacaccgtgatcaacaaaaagagcggcgagatcgtgcccatggaggtgaacttcaacttcgacgaccccaacctgatcatcctgcctctggcctttggcaagagacagggcagagaattcatctggaacgacctgctgtccctggaaaccggcagcctgaagctggccaacggaagagtgatcgagaagacactgtacaacagaagaacccggcaggatgagcctgccctgttcgtggccctgaccttcgagcggcgggaggtcctggactcctccaatatcaaaccaatgaacctgatcggcgtggcaagaggcgaaaacatccccgccgtgatcgccctgaccgaccccgagggctgcccactgagccggtttaaggatagcctgggaaacccaacccacatcctgagaatcggcgagagctataaggagaagcagcggaccatccaggccaagaaggaggtggagcagcggagagccggcggctacagccggaagtacgccagcaaagccaagaatctggcagacgatatggtgagaaacaccgctagagatctgctgtactacgccgtgacccaggatgccatgctgatcttcgccaacctgagccggggcttcggccggcagggcaagcggaccttcatggccgagagacagtacacacggatggaggactggctgaccgccaagctggcctacgagggcctgagcaagacctacctgtccaagacactggcccagtacacctccaagacatgcagcaactgtgggtttaccatcaccagcgccgactacgacagggtgctggagaagctgaagaagacagcaacaggctggatgaccacaattaacggcaaggagctgaaggtggagggccagattacctactacaacagatacaagagacagaacgtagtcaaggacctgtccgtcgagctggatagactgagcgaagaatctgtgaacaacgacatctcctcctggacaaagggcagaagcggagaagctctgagcctcctgaagaaaagattctcccatagacccgtgcaggagaagttcgtgtgcctgaactgcggcttcgagacacacgcagccgagcaagccgccctgaacatcgccagatcctggctgttcctgcggagccaggagtacaagaaataccagacaaacaagacaaccggcaacaccgataagagagccttcgtcgagacctggcagtccttttaccggaagaagcttaaggaggtgtggaaacctgccgtgcggtctggcggatctggcggaggctcccaccagggcagcgtgaccttcggcgacgtggccgtggacttcagccaggacgagtggggccacctggaccccgcccagaaggagctgtacagggaggtgatgctggagaactacggcaacctggtgtgcctgggcctggccgtgagcaggccccacgtgatcgagcagctggagaggggcgaggccccctggctgcccaggggcgccgtgcccaggagctgcgacctggactggatgaccaggggcggcccaagcagcggcgcccctcctcccagcggcggcagcccagccggctccccaacctctaccgaggagggcacctctgagtccgccacccccgagagcggccctggcacctccaccgagcccagcgagggcagcgcacccggcagccctgccggcagccccacctccacagaggagggaaccagcaccgagcccagcgaaggcagcgccccaggcaccagcaccgagcctagtgagcaggagattaaacggatcaacaagatcagaagaagacttgtgaaagacagcaacaccaagaaggccggcaagacaggccccatgaaaaccctgctggttagagtgatgacacccgatctgagagagcggctggaaaacctgagaaagaagcctgaaaatatcccccagcccatcagcaatacatctagagccaacctgaataagctgctgaccgattacaccgaaatgaagaaggcgatcctgcatgtgtactgggaagagttccagaaggaccctgtgggcctgatgagccgggtggcccagcctgccagcaagaagatcgatcagaacaagctgaaacctgagatggacgagaagggcaacctgaccaccgccggctttgcctgctctcagtgtggccagcccctgttcgtgtacaagctggagcaggtgtctgagaagggcaaggcttacaccaactacttcggacggtgcaatgtggccgagcacgaaaagctgatcctgctggcccagctgaagcccgagaaggatagcgacgaagccgtgacatatagcctgggaaagtttgggcagagggccctggatttctacagcattcatgtgaccaaggagtccacccaccccgtgaagcccctggcccagatcgccggaaacagatacgcctccggacctgtgggaaaggccctgagcgacgcatgtatgggcacaatcgcctccttcctgtctaagtaccaggacatcatcatcgaacaccagaaggtggtgaagggcaaccagaagagactggagagcctgcgggagctggccggcaaggaaaacctggaataccctagcgtgaccctgccacctcagcctcacaccaaggagggcgttgatgcctacaacgaagtgatcgcccgggtgcgaatgtgggtgaacctgaacctgtggcagaagctgaagctaagcagagatgatgccaagcctctgctgagactgaagggattcccttcctttcctctggtcgagagacaggccaacgaagtggactggtgggacatggtgtgtaacgtgaagaagctgatcaacgagaaaaaggaggatggcaaggtgttttggcagaatctggctggctacaagagacaggaagccctgagaccatacctgagcagcgaggaagatcggaagaagggaaagaaattcgctcggtaccagctgggcgacctgctgctgcacctggaaaagaagcacggcgaggactggggaaaggtgtacgacgaggcctgggagcggattgacaagaaagtggaaggcctgagcaagcacatcaagctggaagaggaacggagaagcgaggacgcccagagcaaggccgccctgaccgactggctgcgggctaaggccagcttcgtgatcgagggcctgaaggaggccgacaaggacgagttctgcagatgcgagctgaagctgcagaagtggtacggggacctgcggggaaagcccttcgccatcgaagccgagaacagcatcctggacatcagcggcttcagcaagcagtacaactgtgccttcatctggcagaaggacggcgtgaagaagctgaacctgtacctgatcatcaactacttcaagggcggcaagctgcggttcaagaagatcaaacctgaagccttcgaagccaacagattctacaccgtgatcaacaaaaagagcggcgagatcgtgcccatggaggtgaacttcaacttcgacgaccccaacctgatcatcctgcctctggcctttggcaagagacagggcagagaattcatctggaacgacctgctgtccctggaaaccggcagcctgaagctggccaacggaagagtgatcgagaagacactgtacaacagaagaacccggcaggatgagcctgccctgttcgtggccctgaccttcgagcggcgggaggtcctggactcctccaatatcaaaccaatgaacctgatcggcgtggcaagaggcgaaaacatccccgccgtgatcgccctgaccgaccccgagggctgcccactgagccggtttaaggatagcctgggaaacccaacccacatcctgagaatcggcgagagctataaggagaagcagcggaccatccaggccaagaaggaggtggagcagcggagagccggcggctacagccggaagtacgccagcaaagccaagaatctggcagacgatatggtgagaaacaccgctagagatctgctgtactacgccgtgacccaggatgccatgctgatcttcgccaacctgagccggggcttcggccggcagggcaagcggaccttcatggccgagagacagtacacacggatggaggactggctgaccgccaagctggcctacgagggcctgagcaagacctacctgtccaagacactggcccagtacacctccaagacatgcagcaactgtgggtttaccatcaccagcgccgactacgacagggtgctggagaagctgaagaagacagcaacaggctggatgaccacaattaacggcaaggagctgaaggtggagggccagattacctactacaacagatacaagagacagaacgtagtcaaggacctgtccgtcgagctggatagactgagcgaagaatctgtgaacaacgacatctcctcctggacaaagggcagaagcggagaagctctgagcctcctgaagaaaagattctcccatagacccgtgcaggagaagttcgtgtgcctgaactgcggcttcgagacacacgcagccgagcaagccgccctgaacatcgccagatcctggctgttcctgcggagccaggagtacaagaaataccagacaaacaagacaaccggcaacaccgataagagagccttcgtcgagacctggcagtccttttaccggaagaagcttaaggaggtgtggaaacctgccgtgcggtctggcggatctggcggaggctcctcaccagggcagcgtgaccttcggcgacgtggccgtggacttcagccaggacgagtggggccacctggaccccgcccagaaggagctgtacagggaggtgatgctggagaactacggcaacctggtgtgcctgggcctggccgtgagcaggccccacgtgatcgagcagctggagaggggcgaggccccctggctgcccaggggcgccgtgcccaggagctgcgacctggactggatgaccaggggatctggctccggcagcggccccaagaaaaagagaaaagtctaagctgccttctgcggggcttgccttctggccatgcccttcttctctcccttgcacctgtacctcttggtctttgaataaagcctgagtaggaaggctagcaaaaaaaaaaaaaaaaaaaaaaaaaaaaaaaaaaaaaaaaaaaaaaaaaaaaaaaaaaaaaaaaaaaaaaaaaaaaaaaa

SEQ ID NO: 16156 - RNA, 9485 nt, synthetic construct
  source 1..9485: mol_type = other RNA
aggaaataagagagaaaagaagagtaagaagaaatataagagccaccatggcccctaagaagaagcgtaaagtgagccggatggaacgcctcgtctacgaggtgcggcagaagtgcagaaacatcgaggacatctgcatctcctgcggatctctgaacgtgaccctggagcacccactgttcatcggcggcatgtgccagaactgtaaaaactgttttctggagtgtgcctatcaatacgacgatgacggctaccagagctactgcaccatctgttgcggcggaagagaggtgctgatgtgtggaaataacaactgctgccggtgcttctgcgtggaatgcgtggacctgctggtgggccccggcgccgcccaggccgctattaaggaagatccttggaactgctacatgtgcggccacaagggcacatacggcctgctgagacggagagaggactggcctagcagactgcagatgttcttcgccaataaccacgaccaggagttcgacccccctaaggtgtaccctcccgtccccgccgagaagagaaagcccatccgggtcctgagcctgttcgatggcatcgccaccggtctgctggtgctgaaggacctgggcatccaggtggataggtacattgcctccgaggtgtgcgaggactccatcaccgtgggaatggtgcgtcatcagggcaagatcatgtacgtgggcgacgtgcggagcgtgacacagaagcatatccaggagtggggccctttcgacctggtgatcggcggcagcccttgcaatgacctgagcatcgtgaacccagcccggaagggcctgtacgagggaaccggcagactgttcttcgagttttacagactgctgcacgacgcccggcctaaggaaggcgacgaccggcccttcttttggctgttcgagaatgtggtggccatgggagtcagcgacaagcgggatattagccggttcctggagagcaaccccgtgatgatcgatgccaaggaagtgagcgccgcccaccgggccagatacttctggggcaatctgcctggcatgaacagacccctggccagcaccgtgaacgacaagctggagctgcaggagtgcctggagcacggccggatcgccaagttcagcaaggtgagaaccatcaccacccgaagcaacagcatcaaacaaggcaaggaccagcactttcctgtgttcatgaacgagaaggaggacatcctgtggtgtaccgagatggagagagtgttcgggttcccagtccactacacagatgtcagcaacatgtctagactggccagacagagactgctgggaagaagctggtccgtccctgtgatcagacacctgttcgcccctctgaaggagtacttcgcctgcgtgagcagcggcaacagcaacgccaacagccggggccccagcttctctagcggcctggtgccactgtccctgagagggagccacatgggccccatggagatctacaaaaccgtgagcgcctggaagcggcagcctgtgcgcgtgctgagcctgtttcggaatatcgataaagtcctgaaaagcctgggattcctggagagcggctctggctccggcggtggcaccctgaagtacgtggaggatgtgacaaacgtggtcagacgggatgtggagaagtggggccccttcgatctggtgtacggcagcacccaacccctgggcagctcttgtgaccggtgccctggctggtacatgtttcagttccaccggatcctgcagtacgccctgccgagacaggagtcccagcggccattcttttggattttcatggacaacttgctgctgaccgaggatgaccaggaaactaccactcggttcctgcagaccgaagccgtgaccctgcaggacgtgagaggccgggactaccagaacgccatgcgggtgtggtccaacatccctggactgaaaagcaagcacgcacctctgacccctaaagaagaggagtacctgcaggcccaggtgcggagcagaagcaagctggacgcccctaaggtggatctgctggtgaagaattgcctcctgcccctgagagagtacttcaagtatttcagccagaatagtctgcccctgggaggcagcggcggcggcgccctggtgacatttgaggacgtcgccgtgcggttcacccaggaggaatgggctctgctggatccttctcagaaaatcctgtaccgggacgtgatgagagagacataccggaatctgacctccgtgggcatcaactgggaatgttgggaccttgaagcctgcttcagaagcctgggaagaaacctgagagtgcaggtggtgaagagaaagtgcgagctgaccaacagcggcccctgcgccgagggcggcccaagcagcggcgcccctcctcccagcggcggcagcccagccggctccccaacctctaccgaggagggcacctctgagtccgccacccccgagagcggccctggcacctccaccgagcccagcgagggcagcgcacccggcagccctgccggcagccccacctccacagaggagggaaccagcaccgagcccagcgaaggcagcgccccaggcaccagcaccgagcctagtgagcaggagattaaacggatcaacaagatcagaagaagacttgtgaaagacagcaacaccaagaaggccggcaagacaggccccatgaaaaccctgctggttagagtgatgacacccgatctgagagagcggctggaaaacctgagaaagaagcctgaaaatatcccccagcccatcagcaatacatctagagccaacctgaataagctgctgaccgattacaccgaaatgaagaaggcgatcctgcatgtgtactgggaagagttccagaaggaccctgtgggcctgatgagccgggtggcccagcctgccagcaagaagatcgatcagaacaagctgaaacctgagatggacgagaagggcaacctgaccaccgccggctttgcctgctctcagtgtggccagcccctgttcgtgtacaagctggagcaggtgtctgagaagggcaaggcttacaccaactacttcggacggtgcaatgtggccgagcacgaaaagctgatcctgctggcccagctgaagcccgagaaggatagcgacgaagccgtgacatatagcctgggaaagtttgggcagagggccctggatttctacagcattcatgtgaccaaggagtccacccaccccgtgaagcccctggcccagatcgccggaaacagatacgcctccggacctgtgggaaaggccctgagcgacgcatgtatgggcacaatcgcctccttcctgtctaagtaccaggacatcatcatcgaacaccagaaggtggtgaagggcaaccagaagagactggagagcctgcgggagctggccggcaaggaaaacctggaataccctagcgtgaccctgccacctcagcctcacaccaaggagggcgttgatgcctacaacgaagtgatcgcccgggtgcgaatgtgggtgaacctgaacctgtggcagaagctgaagctaagcagagatgatgccaagcctctgctgagactgaagggattcccttcctttcctctggtcgagagacaggccaacgaagtggactggtgggacatggtgtgtaacgtgaagaagctgatcaacgagaaaaaggaggatggcaaggtgttttggcagaatctggctggctacaagagacaggaagccctgagaccatacctgagcagcgaggaagatcggaagaagggaaagaaattcgctcggtaccagctgggcgacctgctgctgcacctggaaaagaagcacggcgaggactggggaaaggtgtacgacgaggcctgggagcggattgacaagaaagtggaaggcctgagcaagcacatcaagctggaagaggaacggagaagcgaggacgcccagagcaaggccgccctgaccgactggctgcgggctaaggccagcttcgtgatcgagggcctgaaggaggccgacaaggacgagttctgcagatgcgagctgaagctgcagaagtggtacggggacctgcggggaaagcccttcgccatcgaagccgagaacagcatcctggacatcagcggcttcagcaagcagtacaactgtgccttcatctggcagaaggacggcgtgaagaagctgaacctgtacctgatcatcaactacttcaagggcggcaagctgcggttcaagaagatcaaacctgaagccttcgaagccaacagattctacaccgtgatcaacaaaaagagcggcgagatcgtgcccatggaggtgaacttcaacttcgacgaccccaacctgatcatcctgcctctggcctttggcaagagacagggcagagaattcatctggaacgacctgctgtccctggaaaccggcagcctgaagctggccaacggaagagtgatcgagaagacactgtacaacagaagaacccggcaggatgagcctgccctgttcgtggccctgaccttcgagcggcgggaggtcctggactcctccaatatcaaaccaatgaacctgatcggcgtggcaagaggcgaaaacatccccgccgtgatcgccctgaccgaccccgagggctgcccactgagccggtttaaggatagcctgggaaacccaacccacatcctgagaatcggcgagagctataaggagaagcagcggaccatccaggccaagaaggaggtggagcagcggagagccggcggctacagccggaagtacgccagcaaagccaagaatctggcagacgatatggtgagaaacaccgctagagatctgctgtactacgccgtgacccaggatgccatgctgatcttcgccaacctgagccggggcttcggccggcagggcaagcggaccttcatggccgagagacagtacacacggatggaggactggctgaccgccaagctggcctacgagggcctgagcaagacctacctgtccaagacactggcccagtacacctccaagacatgcagcaactgtgggtttaccatcaccagcgccgactacgacagggtgctggagaagctgaagaagacagcaacaggctggatgaccacaattaacggcaaggagctgaaggtggagggccagattacctactacaacagatacaagagacagaacgtagtcaaggacctgtccgtcgagctggatagactgagcgaagaatctgtgaacaacgacatctcctcctggacaaagggcagaagcggagaagctctgagcctcctgaagaaaagattctcccatagacccgtgcaggagaagttcgtgtgcctgaactgcggcttcgagacacacgcagccgagcaagccgccctgaacatcgccagatcctggctgttcctgcggagccaggagtacaagaaataccagacaaacaagacaaccggcaacaccgataagagagccttcgtcgagacctggcagtccttttaccggaagaagcttaaggaggtgtggaaacctgccgtgcggtctggcggatctggcggaggctccagccaggtgaccgtgaccttcgaggacgtggccgtgctgttcagcagggacgagtggaggaagctgggccccagccagaagaacctgtaccaggacgtgatgctggagaactacagcaacctggtgagcctgggcctgcccttcagcaagcccaaggtgatcagcctgctgcagcagggcgaggacccctggaaggtggagaaggagagccccggcagcttcagccccggctggaagagcagcggcggcccaagcagcggcgcccctcctcccagcggcggcagcccagccggctccccaacctctaccgaggagggcacctctgagtccgccacccccgagagcggccctggcacctccaccgagcccagcgagggcagcgcacccggcagccctgccggcagccccacctccacagaggagggaaccagcaccgagcccagcgaaggcagcgccccaggcaccagcaccgagcctagtgagcaggagattaaacggatcaacaagatcagaagaagacttgtgaaagacagcaacaccaagaaggccggcaagacaggccccatgaaaaccctgctggttagagtgatgacacccgatctgagagagcggctggaaaacctgagaaagaagcctgaaaatatcccccagcccatcagcaatacatctagagccaacctgaataagctgctgaccgattacaccgaaatgaagaaggcgatcctgcatgtgtactgggaagagttccagaaggaccctgtgggcctgatgagccgggtggcccagcctgccagcaagaagatcgatcagaacaagctgaaacctgagatggacgagaagggcaacctgaccaccgccggctttgcctgctctcagtgtggccagcccctgttcgtgtacaagctggagcaggtgtctgagaagggcaaggcttacaccaactacttcggacggtgcaatgtggccgagcacgaaaagctgatcctgctggcccagctgaagcccgagaaggatagcgacgaagccgtgacatatagcctgggaaagtttgggcagagggccctggatttctacagcattcatgtgaccaaggagtccacccaccccgtgaagcccctggcccagatcgccggaaacagatacgcctccggacctgtgggaaaggccctgagcgacgcatgtatgggcacaatcgcctccttcctgtctaagtaccaggacatcatcatcgaacaccagaaggtggtgaagggcaaccagaagagactggagagcctgcgggagctggccggcaaggaaaacctggaataccctagcgtgaccctgccacctcagcctcacaccaaggagggcgttgatgcctacaacgaagtgatcgcccgggtgcgaatgtgggtgaacctgaacctgtggcagaagctgaagctaagcagagatgatgccaagcctctgctgagactgaagggattcccttcctttcctctggtcgagagacaggccaacgaagtggactggtgggacatggtgtgtaacgtgaagaagctgatcaacgagaaaaaggaggatggcaaggtgttttggcagaatctggctggctacaagagacaggaagccctgagaccatacctgagcagcgaggaagatcggaagaagggaaagaaattcgctcggtaccagctgggcgacctgctgctgcacctggaaaagaagcacggcgaggactggggaaaggtgtacgacgaggcctgggagcggattgacaagaaagtggaaggcctgagcaagcacatcaagctggaagaggaacggagaagcgaggacgcccagagcaaggccgccctgaccgactggctgcgggctaaggccagcttcgtgatcgagggcctgaaggaggccgacaaggacgagttctgcagatgcgagctgaagctgcagaagtggtacggggacctgcggggaaagcccttcgccatcgaagccgagaacagcatcctggacatcagcggcttcagcaagcagtacaactgtgccttcatctggcagaaggacggcgtgaagaagctgaacctgtacctgatcatcaactacttcaagggcggcaagctgcggttcaagaagatcaaacctgaagccttcgaagccaacagattctacaccgtgatcaacaaaaagagcggcgagatcgtgcccatggaggtgaacttcaacttcgacgaccccaacctgatcatcctgcctctggcctttggcaagagacagggcagagaattcatctggaacgacctgctgtccctggaaaccggcagcctgaagctggccaacggaagagtgatcgagaagacactgtacaacagaagaacccggcaggatgagcctgccctgttcgtggccctgaccttcgagcggcgggaggtcctggactcctccaatatcaaaccaatgaacctgatcggcgtggcaagaggcgaaaacatccccgccgtgatcgccctgaccgaccccgagggctgcccactgagccggtttaaggatagcctgggaaacccaacccacatcctgagaatcggcgagagctataaggagaagcagcggaccatccaggccaagaaggaggtggagcagcggagagccggcggctacagccggaagtacgccagcaaagccaagaatctggcagacgatatggtgagaaacaccgctagagatctgctgtactacgccgtgacccaggatgccatgctgatcttcgccaacctgagccggggcttcggccggcagggcaagcggaccttcatggccgagagacagtacacacggatggaggactggctgaccgccaagctggcctacgagggcctgagcaagacctacctgtccaagacactggcccagtacacctccaagacatgcagcaactgtgggtttaccatcaccagcgccgactacgacagggtgctggagaagctgaagaagacagcaacaggctggatgaccacaattaacggcaaggagctgaaggtggagggccagattacctactacaacagatacaagagacagaacgtagtcaaggacctgtccgtcgagctggatagactgagcgaagaatctgtgaacaacgacatctcctcctggacaaagggcagaagcggagaagctctgagcctcctgaagaaaagattctcccatagacccgtgcaggagaagttcgtgtgcctgaactgcggcttcgagacacacgcagccgagcaagccgccctgaacatcgccagatcctggctgttcctgcggagccaggagtacaagaaataccagacaaacaagacaaccggcaacaccgataagagagccttcgtcgagacctggcagtccttttaccggaagaagcttaaggaggtgtggaaacctgccgtgcggtctggcggatctggcggaggctcctagccaggtgaccgtgaccttcgaggacgtggccgtgctgttcagcagggacgagtggaggaagctgggccccagccagaagaacctgtaccaggacgtgatgctggagaactacagcaacctggtgagcctgggcctgcccttcagcaagcccaaggtgatcagcctgctgcagcagggcgaggacccctggaaggtggagaaggagagccccggcagcttcagccccggctggaagagcagcggatctggctccggcagcggccccaagaaaaagagaaaagtctaagctgccttctgcggggcttgccttctggccatgcccttcttctctcccttgcacctgtacctcttggtctttgaataaagcctgagtaggaaggctagcaaaaaaaaaaaaaaaaaaaaaaaaaaaaaaaaaaaaaaaaaaaaaaaaaaaaaaaaaaaaaaaaaaaaaaaaaaaaaaaa

SEQ ID NO: 16157 - RNA, 9485 nt, synthetic construct
  source 1..9485: mol_type = other RNA
aggaaataagagagaaaagaagagtaagaagaaatataagagccaccatggcccctaagaagaagcgtaaagtgagccggatggaacgcctcgtctacgaggtgcggcagaagtgcagaaacatcgaggacatctgcatctcctgcggatctctgaacgtgaccctggagcacccactgttcatcggcggcatgtgccagaactgtaaaaactgttttctggagtgtgcctatcaatacgacgatgacggctaccagagctactgcaccatctgttgcggcggaagagaggtgctgatgtgtggaaataacaactgctgccggtgcttctgcgtggaatgcgtggacctgctggtgggccccggcgccgcccaggccgctattaaggaagatccttggaactgctacatgtgcggccacaagggcacatacggcctgctgagacggagagaggactggcctagcagactgcagatgttcttcgccaataaccacgaccaggagttcgacccccctaaggtgtaccctcccgtccccgccgagaagagaaagcccatccgggtcctgagcctgttcgatggcatcgccaccggtctgctggtgctgaaggacctgggcatccaggtggataggtacattgcctccgaggtgtgcgaggactccatcaccgtgggaatggtgcgtcatcagggcaagatcatgtacgtgggcgacgtgcggagcgtgacacagaagcatatccaggagtggggccctttcgacctggtgatcggcggcagcccttgcaatgacctgagcatcgtgaacccagcccggaagggcctgtacgagggaaccggcagactgttcttcgagttttacagactgctgcacgacgcccggcctaaggaaggcgacgaccggcccttcttttggctgttcgagaatgtggtggccatgggagtcagcgacaagcgggatattagccggttcctggagagcaaccccgtgatgatcgatgccaaggaagtgagcgccgcccaccgggccagatacttctggggcaatctgcctggcatgaacagacccctggccagcaccgtgaacgacaagctggagctgcaggagtgcctggagcacggccggatcgccaagttcagcaaggtgagaaccatcaccacccgaagcaacagcatcaaacaaggcaaggaccagcactttcctgtgttcatgaacgagaaggaggacatcctgtggtgtaccgagatggagagagtgttcgggttcccagtccactacacagatgtcagcaacatgtctagactggccagacagagactgctgggaagaagctggtccgtccctgtgatcagacacctgttcgcccctctgaaggagtacttcgcctgcgtgagcagcggcaacagcaacgccaacagccggggccccagcttctctagcggcctggtgccactgtccctgagagggagccacatgggccccatggagatctacaaaaccgtgagcgcctggaagcggcagcctgtgcgcgtgctgagcctgtttcggaatatcgataaagtcctgaaaagcctgggattcctggagagcggctctggctccggcggtggcaccctgaagtacgtggaggatgtgacaaacgtggtcagacgggatgtggagaagtggggccccttcgatctggtgtacggcagcacccaacccctgggcagctcttgtgaccggtgccctggctggtacatgtttcagttccaccggatcctgcagtacgccctgccgagacaggagtcccagcggccattcttttggattttcatggacaacttgctgctgaccgaggatgaccaggaaactaccactcggttcctgcagaccgaagccgtgaccctgcaggacgtgagaggccgggactaccagaacgccatgcgggtgtggtccaacatccctggactgaaaagcaagcacgcacctctgacccctaaagaagaggagtacctgcaggcccaggtgcggagcagaagcaagctggacgcccctaaggtggatctgctggtgaagaattgcctcctgcccctgagagagtacttcaagtatttcagccagaatagtctgcccctgggaggcagcggcggcggcgccctggtgacatttgaggacgtcgccgtgcggttcacccaggaggaatgggctctgctggatccttctcagaaaatcctgtaccgggacgtgatgagagagacataccggaatctgacctccgtgggcatcaactgggaatgttgggaccttgaagcctgcttcagaagcctgggaagaaacctgagagtgcaggtggtgaagagaaagtgcgagctgaccaacagcggcccctgcgccgagggcggcccaagcagcggcgcccctcctcccagcggcggcagcccagccggctccccaacctctaccgaggagggcacctctgagtccgccacccccgagagcggccctggcacctccaccgagcccagcgagggcagcgcacccggcagccctgccggcagccccacctccacagaggagggaaccagcaccgagcccagcgaaggcagcgccccaggcaccagcaccgagcctagtgagcaggagattaaacggatcaacaagatcagaagaagacttgtgaaagacagcaacaccaagaaggccggcaagacaggccccatgaaaaccctgctggttagagtgatgacacccgatctgagagagcggctggaaaacctgagaaagaagcctgaaaatatcccccagcccatcagcaatacatctagagccaacctgaataagctgctgaccgattacaccgaaatgaagaaggcgatcctgcatgtgtactgggaagagttccagaaggaccctgtgggcctgatgagccgggtggcccagcctgccagcaagaagatcgatcagaacaagctgaaacctgagatggacgagaagggcaacctgaccaccgccggctttgcctgctctcagtgtggccagcccctgttcgtgtacaagctggagcaggtgtctgagaagggcaaggcttacaccaactacttcggacggtgcaatgtggccgagcacgaaaagctgatcctgctggcccagctgaagcccgagaaggatagcgacgaagccgtgacatatagcctgggaaagtttgggcagagggccctggatttctacagcattcatgtgaccaaggagtccacccaccccgtgaagcccctggcccagatcgccggaaacagatacgcctccggacctgtgggaaaggccctgagcgacgcatgtatgggcacaatcgcctccttcctgtctaagtaccaggacatcatcatcgaacaccagaaggtggtgaagggcaaccagaagagactggagagcctgcgggagctggccggcaaggaaaacctggaataccctagcgtgaccctgccacctcagcctcacaccaaggagggcgttgatgcctacaacgaagtgatcgcccgggtgcgaatgtgggtgaacctgaacctgtggcagaagctgaagctaagcagagatgatgccaagcctctgctgagactgaagggattcccttcctttcctctggtcgagagacaggccaacgaagtggactggtgggacatggtgtgtaacgtgaagaagctgatcaacgagaaaaaggaggatggcaaggtgttttggcagaatctggctggctacaagagacaggaagccctgagaccatacctgagcagcgaggaagatcggaagaagggaaagaaattcgctcggtaccagctgggcgacctgctgctgcacctggaaaagaagcacggcgaggactggggaaaggtgtacgacgaggcctgggagcggattgacaagaaagtggaaggcctgagcaagcacatcaagctggaagaggaacggagaagcgaggacgcccagagcaaggccgccctgaccgactggctgcgggctaaggccagcttcgtgatcgagggcctgaaggaggccgacaaggacgagttctgcagatgcgagctgaagctgcagaagtggtacggggacctgcggggaaagcccttcgccatcgaagccgagaacagcatcctggacatcagcggcttcagcaagcagtacaactgtgccttcatctggcagaaggacggcgtgaagaagctgaacctgtacctgatcatcaactacttcaagggcggcaagctgcggttcaagaagatcaaacctgaagccttcgaagccaacagattctacaccgtgatcaacaaaaagagcggcgagatcgtgcccatggaggtgaacttcaacttcgacgaccccaacctgatcatcctgcctctggcctttggcaagagacagggcagagaattcatctggaacgacctgctgtccctggaaaccggcagcctgaagctggccaacggaagagtgatcgagaagacactgtacaacagaagaacccggcaggatgagcctgccctgttcgtggccctgaccttcgagcggcgggaggtcctggactcctccaatatcaaaccaatgaacctgatcggcgtggcaagaggcgaaaacatccccgccgtgatcgccctgaccgaccccgagggctgcccactgagccggtttaaggatagcctgggaaacccaacccacatcctgagaatcggcgagagctataaggagaagcagcggaccatccaggccaagaaggaggtggagcagcggagagccggcggctacagccggaagtacgccagcaaagccaagaatctggcagacgatatggtgagaaacaccgctagagatctgctgtactacgccgtgacccaggatgccatgctgatcttcgccaacctgagccggggcttcggccggcagggcaagcggaccttcatggccgagagacagtacacacggatggaggactggctgaccgccaagctggcctacgagggcctgagcaagacctacctgtccaagacactggcccagtacacctccaagacatgcagcaactgtgggtttaccatcaccagcgccgactacgacagggtgctggagaagctgaagaagacagcaacaggctggatgaccacaattaacggcaaggagctgaaggtggagggccagattacctactacaacagatacaagagacagaacgtagtcaaggacctgtccgtcgagctggatagactgagcgaagaatctgtgaacaacgacatctcctcctggacaaagggcagaagcggagaagctctgagcctcctgaagaaaagattctcccatagacccgtgcaggagaagttcgtgtgcctgaactgcggcttcgagacacacgcagccgagcaagccgccctgaacatcgccagatcctggctgttcctgcggagccaggagtacaagaaataccagacaaacaagacaaccggcaacaccgataagagagccttcgtcgagacctggcagtccttttaccggaagaagcttaaggaggtgtggaaacctgccgtgcggtctggcggatctggcggaggctcctgcaaggagagcgtgaccttcaaggacgtggccgtggagttcacctgggaggagtgggtgcacctgaacagcagccagaagaccctgtacagggacgtgatgctggagaactacaggaacctggtgagcctgggcttcgccgtgagcaagcccgacgtgatctaccagctggagaggaaggaggccagctggatccccggcgccgacatccccaggagcagctgccccgagagcaaggagttcggcggcccaagcagcggcgcccctcctcccagcggcggcagcccagccggctccccaacctctaccgaggagggcacctctgagtccgccacccccgagagcggccctggcacctccaccgagcccagcgagggcagcgcacccggcagccctgccggcagccccacctccacagaggagggaaccagcaccgagcccagcgaaggcagcgccccaggcaccagcaccgagcctagtgagcaggagattaaacggatcaacaagatcagaagaagacttgtgaaagacagcaacaccaagaaggccggcaagacaggccccatgaaaaccctgctggttagagtgatgacacccgatctgagagagcggctggaaaacctgagaaagaagcctgaaaatatcccccagcccatcagcaatacatctagagccaacctgaataagctgctgaccgattacaccgaaatgaagaaggcgatcctgcatgtgtactgggaagagttccagaaggaccctgtgggcctgatgagccgggtggcccagcctgccagcaagaagatcgatcagaacaagctgaaacctgagatggacgagaagggcaacctgaccaccgccggctttgcctgctctcagtgtggccagcccctgttcgtgtacaagctggagcaggtgtctgagaagggcaaggcttacaccaactacttcggacggtgcaatgtggccgagcacgaaaagctgatcctgctggcccagctgaagcccgagaaggatagcgacgaagccgtgacatatagcctgggaaagtttgggcagagggccctggatttctacagcattcatgtgaccaaggagtccacccaccccgtgaagcccctggcccagatcgccggaaacagatacgcctccggacctgtgggaaaggccctgagcgacgcatgtatgggcacaatcgcctccttcctgtctaagtaccaggacatcatcatcgaacaccagaaggtggtgaagggcaaccagaagagactggagagcctgcgggagctggccggcaaggaaaacctggaataccctagcgtgaccctgccacctcagcctcacaccaaggagggcgttgatgcctacaacgaagtgatcgcccgggtgcgaatgtgggtgaacctgaacctgtggcagaagctgaagctaagcagagatgatgccaagcctctgctgagactgaagggattcccttcctttcctctggtcgagagacaggccaacgaagtggactggtgggacatggtgtgtaacgtgaagaagctgatcaacgagaaaaaggaggatggcaaggtgttttggcagaatctggctggctacaagagacaggaagccctgagaccatacctgagcagcgaggaagatcggaagaagggaaagaaattcgctcggtaccagctgggcgacctgctgctgcacctggaaaagaagcacggcgaggactggggaaaggtgtacgacgaggcctgggagcggattgacaagaaagtggaaggcctgagcaagcacatcaagctggaagaggaacggagaagcgaggacgcccagagcaaggccgccctgaccgactggctgcgggctaaggccagcttcgtgatcgagggcctgaaggaggccgacaaggacgagttctgcagatgcgagctgaagctgcagaagtggtacggggacctgcggggaaagcccttcgccatcgaagccgagaacagcatcctggacatcagcggcttcagcaagcagtacaactgtgccttcatctggcagaaggacggcgtgaagaagctgaacctgtacctgatcatcaactacttcaagggcggcaagctgcggttcaagaagatcaaacctgaagccttcgaagccaacagattctacaccgtgatcaacaaaaagagcggcgagatcgtgcccatggaggtgaacttcaacttcgacgaccccaacctgatcatcctgcctctggcctttggcaagagacagggcagagaattcatctggaacgacctgctgtccctggaaaccggcagcctgaagctggccaacggaagagtgatcgagaagacactgtacaacagaagaacccggcaggatgagcctgccctgttcgtggccctgaccttcgagcggcgggaggtcctggactcctccaatatcaaaccaatgaacctgatcggcgtggcaagaggcgaaaacatccccgccgtgatcgccctgaccgaccccgagggctgcccactgagccggtttaaggatagcctgggaaacccaacccacatcctgagaatcggcgagagctataaggagaagcagcggaccatccaggccaagaaggaggtggagcagcggagagccggcggctacagccggaagtacgccagcaaagccaagaatctggcagacgatatggtgagaaacaccgctagagatctgctgtactacgccgtgacccaggatgccatgctgatcttcgccaacctgagccggggcttcggccggcagggcaagcggaccttcatggccgagagacagtacacacggatggaggactggctgaccgccaagctggcctacgagggcctgagcaagacctacctgtccaagacactggcccagtacacctccaagacatgcagcaactgtgggtttaccatcaccagcgccgactacgacagggtgctggagaagctgaagaagacagcaacaggctggatgaccacaattaacggcaaggagctgaaggtggagggccagattacctactacaacagatacaagagacagaacgtagtcaaggacctgtccgtcgagctggatagactgagcgaagaatctgtgaacaacgacatctcctcctggacaaagggcagaagcggagaagctctgagcctcctgaagaaaagattctcccatagacccgtgcaggagaagttcgtgtgcctgaactgcggcttcgagacacacgcagccgagcaagccgccctgaacatcgccagatcctggctgttcctgcggagccaggagtacaagaaataccagacaaacaagacaaccggcaacaccgataagagagccttcgtcgagacctggcagtccttttaccggaagaagcttaaggaggtgtggaaacctgccgtgcggtctggcggatctggcggaggctccttgcaaggagagcgtgaccttcaaggacgtggccgtggagttcacctgggaggagtgggtgcacctgaacagcagccagaagaccctgtacagggacgtgatgctggagaactacaggaacctggtgagcctgggcttcgccgtgagcaagcccgacgtgatctaccagctggagaggaaggaggccagctggatccccggcgccgacatccccaggagcagctgccccgagagcaaggagttcggatctggctccggcagcggccccaagaaaaagagaaaagtctaagctgccttctgcggggcttgccttctggccatgcccttcttctctcccttgcacctgtacctcttggtctttgaataaagcctgagtaggaaggctagcaaaaaaaaaaaaaaaaaaaaaaaaaaaaaaaaaaaaaaaaaaaaaaaaaaaaaaaaaaaaaaaaaaaaaaaaaaaaaaaa

SEQ ID NO: 16158 - RNA, 9485 nt, synthetic construct
  source 1..9485: mol_type = other RNA
aggaaataagagagaaaagaagagtaagaagaaatataagagccaccatggcccctaagaagaagcgtaaagtgagccggatggaacgcctcgtctacgaggtgcggcagaagtgcagaaacatcgaggacatctgcatctcctgcggatctctgaacgtgaccctggagcacccactgttcatcggcggcatgtgccagaactgtaaaaactgttttctggagtgtgcctatcaatacgacgatgacggctaccagagctactgcaccatctgttgcggcggaagagaggtgctgatgtgtggaaataacaactgctgccggtgcttctgcgtggaatgcgtggacctgctggtgggccccggcgccgcccaggccgctattaaggaagatccttggaactgctacatgtgcggccacaagggcacatacggcctgctgagacggagagaggactggcctagcagactgcagatgttcttcgccaataaccacgaccaggagttcgacccccctaaggtgtaccctcccgtccccgccgagaagagaaagcccatccgggtcctgagcctgttcgatggcatcgccaccggtctgctggtgctgaaggacctgggcatccaggtggataggtacattgcctccgaggtgtgcgaggactccatcaccgtgggaatggtgcgtcatcagggcaagatcatgtacgtgggcgacgtgcggagcgtgacacagaagcatatccaggagtggggccctttcgacctggtgatcggcggcagcccttgcaatgacctgagcatcgtgaacccagcccggaagggcctgtacgagggaaccggcagactgttcttcgagttttacagactgctgcacgacgcccggcctaaggaaggcgacgaccggcccttcttttggctgttcgagaatgtggtggccatgggagtcagcgacaagcgggatattagccggttcctggagagcaaccccgtgatgatcgatgccaaggaagtgagcgccgcccaccgggccagatacttctggggcaatctgcctggcatgaacagacccctggccagcaccgtgaacgacaagctggagctgcaggagtgcctggagcacggccggatcgccaagttcagcaaggtgagaaccatcaccacccgaagcaacagcatcaaacaaggcaaggaccagcactttcctgtgttcatgaacgagaaggaggacatcctgtggtgtaccgagatggagagagtgttcgggttcccagtccactacacagatgtcagcaacatgtctagactggccagacagagactgctgggaagaagctggtccgtccctgtgatcagacacctgttcgcccctctgaaggagtacttcgcctgcgtgagcagcggcaacagcaacgccaacagccggggccccagcttctctagcggcctggtgccactgtccctgagagggagccacatgggccccatggagatctacaaaaccgtgagcgcctggaagcggcagcctgtgcgcgtgctgagcctgtttcggaatatcgataaagtcctgaaaagcctgggattcctggagagcggctctggctccggcggtggcaccctgaagtacgtggaggatgtgacaaacgtggtcagacgggatgtggagaagtggggccccttcgatctggtgtacggcagcacccaacccctgggcagctcttgtgaccggtgccctggctggtacatgtttcagttccaccggatcctgcagtacgccctgccgagacaggagtcccagcggccattcttttggattttcatggacaacttgctgctgaccgaggatgaccaggaaactaccactcggttcctgcagaccgaagccgtgaccctgcaggacgtgagaggccgggactaccagaacgccatgcgggtgtggtccaacatccctggactgaaaagcaagcacgcacctctgacccctaaagaagaggagtacctgcaggcccaggtgcggagcagaagcaagctggacgcccctaaggtggatctgctggtgaagaattgcctcctgcccctgagagagtacttcaagtatttcagccagaatagtctgcccctgggaggcagcggcggcggcgccctggtgacatttgaggacgtcgccgtgcggttcacccaggaggaatgggctctgctggatccttctcagaaaatcctgtaccgggacgtgatgagagagacataccggaatctgacctccgtgggcatcaactgggaatgttgggaccttgaagcctgcttcagaagcctgggaagaaacctgagagtgcaggtggtgaagagaaagtgcgagctgaccaacagcggcccctgcgccgagggcggcccaagcagcggcgcccctcctcccagcggcggcagcccagccggctccccaacctctaccgaggagggcacctctgagtccgccacccccgagagcggccctggcacctccaccgagcccagcgagggcagcgcacccggcagccctgccggcagccccacctccacagaggagggaaccagcaccgagcccagcgaaggcagcgccccaggcaccagcaccgagcctagtgagcaggagattaaacggatcaacaagatcagaagaagacttgtgaaagacagcaacaccaagaaggccggcaagacaggccccatgaaaaccctgctggttagagtgatgacacccgatctgagagagcggctggaaaacctgagaaagaagcctgaaaatatcccccagcccatcagcaatacatctagagccaacctgaataagctgctgaccgattacaccgaaatgaagaaggcgatcctgcatgtgtactgggaagagttccagaaggaccctgtgggcctgatgagccgggtggcccagcctgccagcaagaagatcgatcagaacaagctgaaacctgagatggacgagaagggcaacctgaccaccgccggctttgcctgctctcagtgtggccagcccctgttcgtgtacaagctggagcaggtgtctgagaagggcaaggcttacaccaactacttcggacggtgcaatgtggccgagcacgaaaagctgatcctgctggcccagctgaagcccgagaaggatagcgacgaagccgtgacatatagcctgggaaagtttgggcagagggccctggatttctacagcattcatgtgaccaaggagtccacccaccccgtgaagcccctggcccagatcgccggaaacagatacgcctccggacctgtgggaaaggccctgagcgacgcatgtatgggcacaatcgcctccttcctgtctaagtaccaggacatcatcatcgaacaccagaaggtggtgaagggcaaccagaagagactggagagcctgcgggagctggccggcaaggaaaacctggaataccctagcgtgaccctgccacctcagcctcacaccaaggagggcgttgatgcctacaacgaagtgatcgcccgggtgcgaatgtgggtgaacctgaacctgtggcagaagctgaagctaagcagagatgatgccaagcctctgctgagactgaagggattcccttcctttcctctggtcgagagacaggccaacgaagtggactggtgggacatggtgtgtaacgtgaagaagctgatcaacgagaaaaaggaggatggcaaggtgttttggcagaatctggctggctacaagagacaggaagccctgagaccatacctgagcagcgaggaagatcggaagaagggaaagaaattcgctcggtaccagctgggcgacctgctgctgcacctggaaaagaagcacggcgaggactggggaaaggtgtacgacgaggcctgggagcggattgacaagaaagtggaaggcctgagcaagcacatcaagctggaagaggaacggagaagcgaggacgcccagagcaaggccgccctgaccgactggctgcgggctaaggccagcttcgtgatcgagggcctgaaggaggccgacaaggacgagttctgcagatgcgagctgaagctgcagaagtggtacggggacctgcggggaaagcccttcgccatcgaagccgagaacagcatcctggacatcagcggcttcagcaagcagtacaactgtgccttcatctggcagaaggacggcgtgaagaagctgaacctgtacctgatcatcaactacttcaagggcggcaagctgcggttcaagaagatcaaacctgaagccttcgaagccaacagattctacaccgtgatcaacaaaaagagcggcgagatcgtgcccatggaggtgaacttcaacttcgacgaccccaacctgatcatcctgcctctggcctttggcaagagacagggcagagaattcatctggaacgacctgctgtccctggaaaccggcagcctgaagctggccaacggaagagtgatcgagaagacactgtacaacagaagaacccggcaggatgagcctgccctgttcgtggccctgaccttcgagcggcgggaggtcctggactcctccaatatcaaaccaatgaacctgatcggcgtggcaagaggcgaaaacatccccgccgtgatcgccctgaccgaccccgagggctgcccactgagccggtttaaggatagcctgggaaacccaacccacatcctgagaatcggcgagagctataaggagaagcagcggaccatccaggccaagaaggaggtggagcagcggagagccggcggctacagccggaagtacgccagcaaagccaagaatctggcagacgatatggtgagaaacaccgctagagatctgctgtactacgccgtgacccaggatgccatgctgatcttcgccaacctgagccggggcttcggccggcagggcaagcggaccttcatggccgagagacagtacacacggatggaggactggctgaccgccaagctggcctacgagggcctgagcaagacctacctgtccaagacactggcccagtacacctccaagacatgcagcaactgtgggtttaccatcaccagcgccgactacgacagggtgctggagaagctgaagaagacagcaacaggctggatgaccacaattaacggcaaggagctgaaggtggagggccagattacctactacaacagatacaagagacagaacgtagtcaaggacctgtccgtcgagctggatagactgagcgaagaatctgtgaacaacgacatctcctcctggacaaagggcagaagcggagaagctctgagcctcctgaagaaaagattctcccatagacccgtgcaggagaagttcgtgtgcctgaactgcggcttcgagacacacgcagccgagcaagccgccctgaacatcgccagatcctggctgttcctgcggagccaggagtacaagaaataccagacaaacaagacaaccggcaacaccgataagagagccttcgtcgagacctggcagtccttttaccggaagaagcttaaggaggtgtggaaacctgccgtgcggtctggcggatctggcggaggctcccaccaggaggtggtgaccttcgaggacgtggccgtgtacttcaccaggaccgagtgggccggcctgagccccgcccagagggccctgtacaggagcgtgatgctggagatctacggcagcctgaccagcctgggctaccccgtgcccaagcccgccctgatcagcctgctggagaggggcgacctgcccgtgggcctggagacccaggacaacccccccgcccagggcaccagggacatctacggcggcccaagcagcggcgcccctcctcccagcggcggcagcccagccggctccccaacctctaccgaggagggcacctctgagtccgccacccccgagagcggccctggcacctccaccgagcccagcgagggcagcgcacccggcagccctgccggcagccccacctccacagaggagggaaccagcaccgagcccagcgaaggcagcgccccaggcaccagcaccgagcctagtgagcaggagattaaacggatcaacaagatcagaagaagacttgtgaaagacagcaacaccaagaaggccggcaagacaggccccatgaaaaccctgctggttagagtgatgacacccgatctgagagagcggctggaaaacctgagaaagaagcctgaaaatatcccccagcccatcagcaatacatctagagccaacctgaataagctgctgaccgattacaccgaaatgaagaaggcgatcctgcatgtgtactgggaagagttccagaaggaccctgtgggcctgatgagccgggtggcccagcctgccagcaagaagatcgatcagaacaagctgaaacctgagatggacgagaagggcaacctgaccaccgccggctttgcctgctctcagtgtggccagcccctgttcgtgtacaagctggagcaggtgtctgagaagggcaaggcttacaccaactacttcggacggtgcaatgtggccgagcacgaaaagctgatcctgctggcccagctgaagcccgagaaggatagcgacgaagccgtgacatatagcctgggaaagtttgggcagagggccctggatttctacagcattcatgtgaccaaggagtccacccaccccgtgaagcccctggcccagatcgccggaaacagatacgcctccggacctgtgggaaaggccctgagcgacgcatgtatgggcacaatcgcctccttcctgtctaagtaccaggacatcatcatcgaacaccagaaggtggtgaagggcaaccagaagagactggagagcctgcgggagctggccggcaaggaaaacctggaataccctagcgtgaccctgccacctcagcctcacaccaaggagggcgttgatgcctacaacgaagtgatcgcccgggtgcgaatgtgggtgaacctgaacctgtggcagaagctgaagctaagcagagatgatgccaagcctctgctgagactgaagggattcccttcctttcctctggtcgagagacaggccaacgaagtggactggtgggacatggtgtgtaacgtgaagaagctgatcaacgagaaaaaggaggatggcaaggtgttttggcagaatctggctggctacaagagacaggaagccctgagaccatacctgagcagcgaggaagatcggaagaagggaaagaaattcgctcggtaccagctgggcgacctgctgctgcacctggaaaagaagcacggcgaggactggggaaaggtgtacgacgaggcctgggagcggattgacaagaaagtggaaggcctgagcaagcacatcaagctggaagaggaacggagaagcgaggacgcccagagcaaggccgccctgaccgactggctgcgggctaaggccagcttcgtgatcgagggcctgaaggaggccgacaaggacgagttctgcagatgcgagctgaagctgcagaagtggtacggggacctgcggggaaagcccttcgccatcgaagccgagaacagcatcctggacatcagcggcttcagcaagcagtacaactgtgccttcatctggcagaaggacggcgtgaagaagctgaacctgtacctgatcatcaactacttcaagggcggcaagctgcggttcaagaagatcaaacctgaagccttcgaagccaacagattctacaccgtgatcaacaaaaagagcggcgagatcgtgcccatggaggtgaacttcaacttcgacgaccccaacctgatcatcctgcctctggcctttggcaagagacagggcagagaattcatctggaacgacctgctgtccctggaaaccggcagcctgaagctggccaacggaagagtgatcgagaagacactgtacaacagaagaacccggcaggatgagcctgccctgttcgtggccctgaccttcgagcggcgggaggtcctggactcctccaatatcaaaccaatgaacctgatcggcgtggcaagaggcgaaaacatccccgccgtgatcgccctgaccgaccccgagggctgcccactgagccggtttaaggatagcctgggaaacccaacccacatcctgagaatcggcgagagctataaggagaagcagcggaccatccaggccaagaaggaggtggagcagcggagagccggcggctacagccggaagtacgccagcaaagccaagaatctggcagacgatatggtgagaaacaccgctagagatctgctgtactacgccgtgacccaggatgccatgctgatcttcgccaacctgagccggggcttcggccggcagggcaagcggaccttcatggccgagagacagtacacacggatggaggactggctgaccgccaagctggcctacgagggcctgagcaagacctacctgtccaagacactggcccagtacacctccaagacatgcagcaactgtgggtttaccatcaccagcgccgactacgacagggtgctggagaagctgaagaagacagcaacaggctggatgaccacaattaacggcaaggagctgaaggtggagggccagattacctactacaacagatacaagagacagaacgtagtcaaggacctgtccgtcgagctggatagactgagcgaagaatctgtgaacaacgacatctcctcctggacaaagggcagaagcggagaagctctgagcctcctgaagaaaagattctcccatagacccgtgcaggagaagttcgtgtgcctgaactgcggcttcgagacacacgcagccgagcaagccgccctgaacatcgccagatcctggctgttcctgcggagccaggagtacaagaaataccagacaaacaagacaaccggcaacaccgataagagagccttcgtcgagacctggcagtccttttaccggaagaagcttaaggaggtgtggaaacctgccgtgcggtctggcggatctggcggaggctcctcaccaggaggtggtgaccttcgaggacgtggccgtgtacttcaccaggaccgagtgggccggcctgagccccgcccagagggccctgtacaggagcgtgatgctggagatctacggcagcctgaccagcctgggctaccccgtgcccaagcccgccctgatcagcctgctggagaggggcgacctgcccgtgggcctggagacccaggacaacccccccgcccagggcaccagggacatctacggatctggctccggcagcggccccaagaaaaagagaaaagtctaagctgccttctgcggggcttgccttctggccatgcccttcttctctcccttgcacctgtacctcttggtctttgaataaagcctgagtaggaaggctagcaaaaaaaaaaaaaaaaaaaaaaaaaaaaaaaaaaaaaaaaaaaaaaaaaaaaaaaaaaaaaaaaaaaaaaaaaaaaaaaa

SEQ ID NO: 16159 - RNA, 9485 nt, synthetic construct
  source 1..9485: mol_type = other RNA
aggaaataagagagaaaagaagagtaagaagaaatataagagccaccatggcccctaagaagaagcgtaaagtgagccggatggaacgcctcgtctacgaggtgcggcagaagtgcagaaacatcgaggacatctgcatctcctgcggatctctgaacgtgaccctggagcacccactgttcatcggcggcatgtgccagaactgtaaaaactgttttctggagtgtgcctatcaatacgacgatgacggctaccagagctactgcaccatctgttgcggcggaagagaggtgctgatgtgtggaaataacaactgctgccggtgcttctgcgtggaatgcgtggacctgctggtgggccccggcgccgcccaggccgctattaaggaagatccttggaactgctacatgtgcggccacaagggcacatacggcctgctgagacggagagaggactggcctagcagactgcagatgttcttcgccaataaccacgaccaggagttcgacccccctaaggtgtaccctcccgtccccgccgagaagagaaagcccatccgggtcctgagcctgttcgatggcatcgccaccggtctgctggtgctgaaggacctgggcatccaggtggataggtacattgcctccgaggtgtgcgaggactccatcaccgtgggaatggtgcgtcatcagggcaagatcatgtacgtgggcgacgtgcggagcgtgacacagaagcatatccaggagtggggccctttcgacctggtgatcggcggcagcccttgcaatgacctgagcatcgtgaacccagcccggaagggcctgtacgagggaaccggcagactgttcttcgagttttacagactgctgcacgacgcccggcctaaggaaggcgacgaccggcccttcttttggctgttcgagaatgtggtggccatgggagtcagcgacaagcgggatattagccggttcctggagagcaaccccgtgatgatcgatgccaaggaagtgagcgccgcccaccgggccagatacttctggggcaatctgcctggcatgaacagacccctggccagcaccgtgaacgacaagctggagctgcaggagtgcctggagcacggccggatcgccaagttcagcaaggtgagaaccatcaccacccgaagcaacagcatcaaacaaggcaaggaccagcactttcctgtgttcatgaacgagaaggaggacatcctgtggtgtaccgagatggagagagtgttcgggttcccagtccactacacagatgtcagcaacatgtctagactggccagacagagactgctgggaagaagctggtccgtccctgtgatcagacacctgttcgcccctctgaaggagtacttcgcctgcgtgagcagcggcaacagcaacgccaacagccggggccccagcttctctagcggcctggtgccactgtccctgagagggagccacatgggccccatggagatctacaaaaccgtgagcgcctggaagcggcagcctgtgcgcgtgctgagcctgtttcggaatatcgataaagtcctgaaaagcctgggattcctggagagcggctctggctccggcggtggcaccctgaagtacgtggaggatgtgacaaacgtggtcagacgggatgtggagaagtggggccccttcgatctggtgtacggcagcacccaacccctgggcagctcttgtgaccggtgccctggctggtacatgtttcagttccaccggatcctgcagtacgccctgccgagacaggagtcccagcggccattcttttggattttcatggacaacttgctgctgaccgaggatgaccaggaaactaccactcggttcctgcagaccgaagccgtgaccctgcaggacgtgagaggccgggactaccagaacgccatgcgggtgtggtccaacatccctggactgaaaagcaagcacgcacctctgacccctaaagaagaggagtacctgcaggcccaggtgcggagcagaagcaagctggacgcccctaaggtggatctgctggtgaagaattgcctcctgcccctgagagagtacttcaagtatttcagccagaatagtctgcccctgggaggcagcggcggcggcgccctggtgacatttgaggacgtcgccgtgcggttcacccaggaggaatgggctctgctggatccttctcagaaaatcctgtaccgggacgtgatgagagagacataccggaatctgacctccgtgggcatcaactgggaatgttgggaccttgaagcctgcttcagaagcctgggaagaaacctgagagtgcaggtggtgaagagaaagtgcgagctgaccaacagcggcccctgcgccgagggcggcccaagcagcggcgcccctcctcccagcggcggcagcccagccggctccccaacctctaccgaggagggcacctctgagtccgccacccccgagagcggccctggcacctccaccgagcccagcgagggcagcgcacccggcagccctgccggcagccccacctccacagaggagggaaccagcaccgagcccagcgaaggcagcgccccaggcaccagcaccgagcctagtgagcaggagattaaacggatcaacaagatcagaagaagacttgtgaaagacagcaacaccaagaaggccggcaagacaggccccatgaaaaccctgctggttagagtgatgacacccgatctgagagagcggctggaaaacctgagaaagaagcctgaaaatatcccccagcccatcagcaatacatctagagccaacctgaataagctgctgaccgattacaccgaaatgaagaaggcgatcctgcatgtgtactgggaagagttccagaaggaccctgtgggcctgatgagccgggtggcccagcctgccagcaagaagatcgatcagaacaagctgaaacctgagatggacgagaagggcaacctgaccaccgccggctttgcctgctctcagtgtggccagcccctgttcgtgtacaagctggagcaggtgtctgagaagggcaaggcttacaccaactacttcggacggtgcaatgtggccgagcacgaaaagctgatcctgctggcccagctgaagcccgagaaggatagcgacgaagccgtgacatatagcctgggaaagtttgggcagagggccctggatttctacagcattcatgtgaccaaggagtccacccaccccgtgaagcccctggcccagatcgccggaaacagatacgcctccggacctgtgggaaaggccctgagcgacgcatgtatgggcacaatcgcctccttcctgtctaagtaccaggacatcatcatcgaacaccagaaggtggtgaagggcaaccagaagagactggagagcctgcgggagctggccggcaaggaaaacctggaataccctagcgtgaccctgccacctcagcctcacaccaaggagggcgttgatgcctacaacgaagtgatcgcccgggtgcgaatgtgggtgaacctgaacctgtggcagaagctgaagctaagcagagatgatgccaagcctctgctgagactgaagggattcccttcctttcctctggtcgagagacaggccaacgaagtggactggtgggacatggtgtgtaacgtgaagaagctgatcaacgagaaaaaggaggatggcaaggtgttttggcagaatctggctggctacaagagacaggaagccctgagaccatacctgagcagcgaggaagatcggaagaagggaaagaaattcgctcggtaccagctgggcgacctgctgctgcacctggaaaagaagcacggcgaggactggggaaaggtgtacgacgaggcctgggagcggattgacaagaaagtggaaggcctgagcaagcacatcaagctggaagaggaacggagaagcgaggacgcccagagcaaggccgccctgaccgactggctgcgggctaaggccagcttcgtgatcgagggcctgaaggaggccgacaaggacgagttctgcagatgcgagctgaagctgcagaagtggtacggggacctgcggggaaagcccttcgccatcgaagccgagaacagcatcctggacatcagcggcttcagcaagcagtacaactgtgccttcatctggcagaaggacggcgtgaagaagctgaacctgtacctgatcatcaactacttcaagggcggcaagctgcggttcaagaagatcaaacctgaagccttcgaagccaacagattctacaccgtgatcaacaaaaagagcggcgagatcgtgcccatggaggtgaacttcaacttcgacgaccccaacctgatcatcctgcctctggcctttggcaagagacagggcagagaattcatctggaacgacctgctgtccctggaaaccggcagcctgaagctggccaacggaagagtgatcgagaagacactgtacaacagaagaacccggcaggatgagcctgccctgttcgtggccctgaccttcgagcggcgggaggtcctggactcctccaatatcaaaccaatgaacctgatcggcgtggcaagaggcgaaaacatccccgccgtgatcgccctgaccgaccccgagggctgcccactgagccggtttaaggatagcctgggaaacccaacccacatcctgagaatcggcgagagctataaggagaagcagcggaccatccaggccaagaaggaggtggagcagcggagagccggcggctacagccggaagtacgccagcaaagccaagaatctggcagacgatatggtgagaaacaccgctagagatctgctgtactacgccgtgacccaggatgccatgctgatcttcgccaacctgagccggggcttcggccggcagggcaagcggaccttcatggccgagagacagtacacacggatggaggactggctgaccgccaagctggcctacgagggcctgagcaagacctacctgtccaagacactggcccagtacacctccaagacatgcagcaactgtgggtttaccatcaccagcgccgactacgacagggtgctggagaagctgaagaagacagcaacaggctggatgaccacaattaacggcaaggagctgaaggtggagggccagattacctactacaacagatacaagagacagaacgtagtcaaggacctgtccgtcgagctggatagactgagcgaagaatctgtgaacaacgacatctcctcctggacaaagggcagaagcggagaagctctgagcctcctgaagaaaagattctcccatagacccgtgcaggagaagttcgtgtgcctgaactgcggcttcgagacacacgcagccgagcaagccgccctgaacatcgccagatcctggctgttcctgcggagccaggagtacaagaaataccagacaaacaagacaaccggcaacaccgataagagagccttcgtcgagacctggcagtccttttaccggaagaagcttaaggaggtgtggaaacctgccgtgcggtctggcggatctggcggaggctccccccaggagcccgtgaccttcgaggacgtggccgtgtacttcacccagaaccagtgggccagcctggaccccatgcagagggccctgtacagggaggtgatgctggagaactacaccaacatggccagcctggccttccccttccccaagcccgtgctggtgagccacctggagaggggcgaggccccctggggccccgacccctgggaggccgaggtgctgaggggcatctgccccggcggcggcggcccaagcagcggcgcccctcctcccagcggcggcagcccagccggctccccaacctctaccgaggagggcacctctgagtccgccacccccgagagcggccctggcacctccaccgagcccagcgagggcagcgcacccggcagccctgccggcagccccacctccacagaggagggaaccagcaccgagcccagcgaaggcagcgccccaggcaccagcaccgagcctagtgagcaggagattaaacggatcaacaagatcagaagaagacttgtgaaagacagcaacaccaagaaggccggcaagacaggccccatgaaaaccctgctggttagagtgatgacacccgatctgagagagcggctggaaaacctgagaaagaagcctgaaaatatcccccagcccatcagcaatacatctagagccaacctgaataagctgctgaccgattacaccgaaatgaagaaggcgatcctgcatgtgtactgggaagagttccagaaggaccctgtgggcctgatgagccgggtggcccagcctgccagcaagaagatcgatcagaacaagctgaaacctgagatggacgagaagggcaacctgaccaccgccggctttgcctgctctcagtgtggccagcccctgttcgtgtacaagctggagcaggtgtctgagaagggcaaggcttacaccaactacttcggacggtgcaatgtggccgagcacgaaaagctgatcctgctggcccagctgaagcccgagaaggatagcgacgaagccgtgacatatagcctgggaaagtttgggcagagggccctggatttctacagcattcatgtgaccaaggagtccacccaccccgtgaagcccctggcccagatcgccggaaacagatacgcctccggacctgtgggaaaggccctgagcgacgcatgtatgggcacaatcgcctccttcctgtctaagtaccaggacatcatcatcgaacaccagaaggtggtgaagggcaaccagaagagactggagagcctgcgggagctggccggcaaggaaaacctggaataccctagcgtgaccctgccacctcagcctcacaccaaggagggcgttgatgcctacaacgaagtgatcgcccgggtgcgaatgtgggtgaacctgaacctgtggcagaagctgaagctaagcagagatgatgccaagcctctgctgagactgaagggattcccttcctttcctctggtcgagagacaggccaacgaagtggactggtgggacatggtgtgtaacgtgaagaagctgatcaacgagaaaaaggaggatggcaaggtgttttggcagaatctggctggctacaagagacaggaagccctgagaccatacctgagcagcgaggaagatcggaagaagggaaagaaattcgctcggtaccagctgggcgacctgctgctgcacctggaaaagaagcacggcgaggactggggaaaggtgtacgacgaggcctgggagcggattgacaagaaagtggaaggcctgagcaagcacatcaagctggaagaggaacggagaagcgaggacgcccagagcaaggccgccctgaccgactggctgcgggctaaggccagcttcgtgatcgagggcctgaaggaggccgacaaggacgagttctgcagatgcgagctgaagctgcagaagtggtacggggacctgcggggaaagcccttcgccatcgaagccgagaacagcatcctggacatcagcggcttcagcaagcagtacaactgtgccttcatctggcagaaggacggcgtgaagaagctgaacctgtacctgatcatcaactacttcaagggcggcaagctgcggttcaagaagatcaaacctgaagccttcgaagccaacagattctacaccgtgatcaacaaaaagagcggcgagatcgtgcccatggaggtgaacttcaacttcgacgaccccaacctgatcatcctgcctctggcctttggcaagagacagggcagagaattcatctggaacgacctgctgtccctggaaaccggcagcctgaagctggccaacggaagagtgatcgagaagacactgtacaacagaagaacccggcaggatgagcctgccctgttcgtggccctgaccttcgagcggcgggaggtcctggactcctccaatatcaaaccaatgaacctgatcggcgtggcaagaggcgaaaacatccccgccgtgatcgccctgaccgaccccgagggctgcccactgagccggtttaaggatagcctgggaaacccaacccacatcctgagaatcggcgagagctataaggagaagcagcggaccatccaggccaagaaggaggtggagcagcggagagccggcggctacagccggaagtacgccagcaaagccaagaatctggcagacgatatggtgagaaacaccgctagagatctgctgtactacgccgtgacccaggatgccatgctgatcttcgccaacctgagccggggcttcggccggcagggcaagcggaccttcatggccgagagacagtacacacggatggaggactggctgaccgccaagctggcctacgagggcctgagcaagacctacctgtccaagacactggcccagtacacctccaagacatgcagcaactgtgggtttaccatcaccagcgccgactacgacagggtgctggagaagctgaagaagacagcaacaggctggatgaccacaattaacggcaaggagctgaaggtggagggccagattacctactacaacagatacaagagacagaacgtagtcaaggacctgtccgtcgagctggatagactgagcgaagaatctgtgaacaacgacatctcctcctggacaaagggcagaagcggagaagctctgagcctcctgaagaaaagattctcccatagacccgtgcaggagaagttcgtgtgcctgaactgcggcttcgagacacacgcagccgagcaagccgccctgaacatcgccagatcctggctgttcctgcggagccaggagtacaagaaataccagacaaacaagacaaccggcaacaccgataagagagccttcgtcgagacctggcagtccttttaccggaagaagcttaaggaggtgtggaaacctgccgtgcggtctggcggatctggcggaggctcctccccaggagcccgtgaccttcgaggacgtggccgtgtacttcacccagaaccagtgggccagcctggaccccatgcagagggccctgtacagggaggtgatgctggagaactacaccaacatggccagcctggccttccccttccccaagcccgtgctggtgagccacctggagaggggcgaggccccctggggccccgacccctgggaggccgaggtgctgaggggcatctgccccggcggcggatctggctccggcagcggccccaagaaaaagagaaaagtctaagctgccttctgcggggcttgccttctggccatgcccttcttctctcccttgcacctgtacctcttggtctttgaataaagcctgagtaggaaggctagcaaaaaaaaaaaaaaaaaaaaaaaaaaaaaaaaaaaaaaaaaaaaaaaaaaaaaaaaaaaaaaaaaaaaaaaaaaaaaaaa

SEQ ID NO: 16160 - RNA, 9485 nt, synthetic construct
  source 1..9485: mol_type = other RNA
aggaaataagagagaaaagaagagtaagaagaaatataagagccaccatggcccctaagaagaagcgtaaagtgagccggatggaacgcctcgtctacgaggtgcggcagaagtgcagaaacatcgaggacatctgcatctcctgcggatctctgaacgtgaccctggagcacccactgttcatcggcggcatgtgccagaactgtaaaaactgttttctggagtgtgcctatcaatacgacgatgacggctaccagagctactgcaccatctgttgcggcggaagagaggtgctgatgtgtggaaataacaactgctgccggtgcttctgcgtggaatgcgtggacctgctggtgggccccggcgccgcccaggccgctattaaggaagatccttggaactgctacatgtgcggccacaagggcacatacggcctgctgagacggagagaggactggcctagcagactgcagatgttcttcgccaataaccacgaccaggagttcgacccccctaaggtgtaccctcccgtccccgccgagaagagaaagcccatccgggtcctgagcctgttcgatggcatcgccaccggtctgctggtgctgaaggacctgggcatccaggtggataggtacattgcctccgaggtgtgcgaggactccatcaccgtgggaatggtgcgtcatcagggcaagatcatgtacgtgggcgacgtgcggagcgtgacacagaagcatatccaggagtggggccctttcgacctggtgatcggcggcagcccttgcaatgacctgagcatcgtgaacccagcccggaagggcctgtacgagggaaccggcagactgttcttcgagttttacagactgctgcacgacgcccggcctaaggaaggcgacgaccggcccttcttttggctgttcgagaatgtggtggccatgggagtcagcgacaagcgggatattagccggttcctggagagcaaccccgtgatgatcgatgccaaggaagtgagcgccgcccaccgggccagatacttctggggcaatctgcctggcatgaacagacccctggccagcaccgtgaacgacaagctggagctgcaggagtgcctggagcacggccggatcgccaagttcagcaaggtgagaaccatcaccacccgaagcaacagcatcaaacaaggcaaggaccagcactttcctgtgttcatgaacgagaaggaggacatcctgtggtgtaccgagatggagagagtgttcgggttcccagtccactacacagatgtcagcaacatgtctagactggccagacagagactgctgggaagaagctggtccgtccctgtgatcagacacctgttcgcccctctgaaggagtacttcgcctgcgtgagcagcggcaacagcaacgccaacagccggggccccagcttctctagcggcctggtgccactgtccctgagagggagccacatgggccccatggagatctacaaaaccgtgagcgcctggaagcggcagcctgtgcgcgtgctgagcctgtttcggaatatcgataaagtcctgaaaagcctgggattcctggagagcggctctggctccggcggtggcaccctgaagtacgtggaggatgtgacaaacgtggtcagacgggatgtggagaagtggggccccttcgatctggtgtacggcagcacccaacccctgggcagctcttgtgaccggtgccctggctggtacatgtttcagttccaccggatcctgcagtacgccctgccgagacaggagtcccagcggccattcttttggattttcatggacaacttgctgctgaccgaggatgaccaggaaactaccactcggttcctgcagaccgaagccgtgaccctgcaggacgtgagaggccgggactaccagaacgccatgcgggtgtggtccaacatccctggactgaaaagcaagcacgcacctctgacccctaaagaagaggagtacctgcaggcccaggtgcggagcagaagcaagctggacgcccctaaggtggatctgctggtgaagaattgcctcctgcccctgagagagtacttcaagtatttcagccagaatagtctgcccctgggaggcagcggcggcggcgccctggtgacatttgaggacgtcgccgtgcggttcacccaggaggaatgggctctgctggatccttctcagaaaatcctgtaccgggacgtgatgagagagacataccggaatctgacctccgtgggcatcaactgggaatgttgggaccttgaagcctgcttcagaagcctgggaagaaacctgagagtgcaggtggtgaagagaaagtgcgagctgaccaacagcggcccctgcgccgagggcggcccaagcagcggcgcccctcctcccagcggcggcagcccagccggctccccaacctctaccgaggagggcacctctgagtccgccacccccgagagcggccctggcacctccaccgagcccagcgagggcagcgcacccggcagccctgccggcagccccacctccacagaggagggaaccagcaccgagcccagcgaaggcagcgccccaggcaccagcaccgagcctagtgagcaggagattaaacggatcaacaagatcagaagaagacttgtgaaagacagcaacaccaagaaggccggcaagacaggccccatgaaaaccctgctggttagagtgatgacacccgatctgagagagcggctggaaaacctgagaaagaagcctgaaaatatcccccagcccatcagcaatacatctagagccaacctgaataagctgctgaccgattacaccgaaatgaagaaggcgatcctgcatgtgtactgggaagagttccagaaggaccctgtgggcctgatgagccgggtggcccagcctgccagcaagaagatcgatcagaacaagctgaaacctgagatggacgagaagggcaacctgaccaccgccggctttgcctgctctcagtgtggccagcccctgttcgtgtacaagctggagcaggtgtctgagaagggcaaggcttacaccaactacttcggacggtgcaatgtggccgagcacgaaaagctgatcctgctggcccagctgaagcccgagaaggatagcgacgaagccgtgacatatagcctgggaaagtttgggcagagggccctggatttctacagcattcatgtgaccaaggagtccacccaccccgtgaagcccctggcccagatcgccggaaacagatacgcctccggacctgtgggaaaggccctgagcgacgcatgtatgggcacaatcgcctccttcctgtctaagtaccaggacatcatcatcgaacaccagaaggtggtgaagggcaaccagaagagactggagagcctgcgggagctggccggcaaggaaaacctggaataccctagcgtgaccctgccacctcagcctcacaccaaggagggcgttgatgcctacaacgaagtgatcgcccgggtgcgaatgtgggtgaacctgaacctgtggcagaagctgaagctaagcagagatgatgccaagcctctgctgagactgaagggattcccttcctttcctctggtcgagagacaggccaacgaagtggactggtgggacatggtgtgtaacgtgaagaagctgatcaacgagaaaaaggaggatggcaaggtgttttggcagaatctggctggctacaagagacaggaagccctgagaccatacctgagcagcgaggaagatcggaagaagggaaagaaattcgctcggtaccagctgggcgacctgctgctgcacctggaaaagaagcacggcgaggactggggaaaggtgtacgacgaggcctgggagcggattgacaagaaagtggaaggcctgagcaagcacatcaagctggaagaggaacggagaagcgaggacgcccagagcaaggccgccctgaccgactggctgcgggctaaggccagcttcgtgatcgagggcctgaaggaggccgacaaggacgagttctgcagatgcgagctgaagctgcagaagtggtacggggacctgcggggaaagcccttcgccatcgaagccgagaacagcatcctggacatcagcggcttcagcaagcagtacaactgtgccttcatctggcagaaggacggcgtgaagaagctgaacctgtacctgatcatcaactacttcaagggcggcaagctgcggttcaagaagatcaaacctgaagccttcgaagccaacagattctacaccgtgatcaacaaaaagagcggcgagatcgtgcccatggaggtgaacttcaacttcgacgaccccaacctgatcatcctgcctctggcctttggcaagagacagggcagagaattcatctggaacgacctgctgtccctggaaaccggcagcctgaagctggccaacggaagagtgatcgagaagacactgtacaacagaagaacccggcaggatgagcctgccctgttcgtggccctgaccttcgagcggcgggaggtcctggactcctccaatatcaaaccaatgaacctgatcggcgtggcaagaggcgaaaacatccccgccgtgatcgccctgaccgaccccgagggctgcccactgagccggtttaaggatagcctgggaaacccaacccacatcctgagaatcggcgagagctataaggagaagcagcggaccatccaggccaagaaggaggtggagcagcggagagccggcggctacagccggaagtacgccagcaaagccaagaatctggcagacgatatggtgagaaacaccgctagagatctgctgtactacgccgtgacccaggatgccatgctgatcttcgccaacctgagccggggcttcggccggcagggcaagcggaccttcatggccgagagacagtacacacggatggaggactggctgaccgccaagctggcctacgagggcctgagcaagacctacctgtccaagacactggcccagtacacctccaagacatgcagcaactgtgggtttaccatcaccagcgccgactacgacagggtgctggagaagctgaagaagacagcaacaggctggatgaccacaattaacggcaaggagctgaaggtggagggccagattacctactacaacagatacaagagacagaacgtagtcaaggacctgtccgtcgagctggatagactgagcgaagaatctgtgaacaacgacatctcctcctggacaaagggcagaagcggagaagctctgagcctcctgaagaaaagattctcccatagacccgtgcaggagaagttcgtgtgcctgaactgcggcttcgagacacacgcagccgagcaagccgccctgaacatcgccagatcctggctgttcctgcggagccaggagtacaagaaataccagacaaacaagacaaccggcaacaccgataagagagccttcgtcgagacctggcagtccttttaccggaagaagcttaaggaggtgtggaaacctgccgtgcggtctggcggatctggcggaggctccagcaagctgagcgaggccttcgaggacgtggccgtgtacttcacctggaaggagtgggccctgctggaggccgccgacaagatgctgtacagggaccagatgctgaagaactaccaggccctgttcagcctgggctacaggggccccacccccgacctgatctgcaggatccagaggggcgagatggagctgtgggtgagcgacctggaggaggccggcgagagcagcctgagcgaggacagcggcggcccaagcagcggcgcccctcctcccagcggcggcagcccagccggctccccaacctctaccgaggagggcacctctgagtccgccacccccgagagcggccctggcacctccaccgagcccagcgagggcagcgcacccggcagccctgccggcagccccacctccacagaggagggaaccagcaccgagcccagcgaaggcagcgccccaggcaccagcaccgagcctagtgagcaggagattaaacggatcaacaagatcagaagaagacttgtgaaagacagcaacaccaagaaggccggcaagacaggccccatgaaaaccctgctggttagagtgatgacacccgatctgagagagcggctggaaaacctgagaaagaagcctgaaaatatcccccagcccatcagcaatacatctagagccaacctgaataagctgctgaccgattacaccgaaatgaagaaggcgatcctgcatgtgtactgggaagagttccagaaggaccctgtgggcctgatgagccgggtggcccagcctgccagcaagaagatcgatcagaacaagctgaaacctgagatggacgagaagggcaacctgaccaccgccggctttgcctgctctcagtgtggccagcccctgttcgtgtacaagctggagcaggtgtctgagaagggcaaggcttacaccaactacttcggacggtgcaatgtggccgagcacgaaaagctgatcctgctggcccagctgaagcccgagaaggatagcgacgaagccgtgacatatagcctgggaaagtttgggcagagggccctggatttctacagcattcatgtgaccaaggagtccacccaccccgtgaagcccctggcccagatcgccggaaacagatacgcctccggacctgtgggaaaggccctgagcgacgcatgtatgggcacaatcgcctccttcctgtctaagtaccaggacatcatcatcgaacaccagaaggtggtgaagggcaaccagaagagactggagagcctgcgggagctggccggcaaggaaaacctggaataccctagcgtgaccctgccacctcagcctcacaccaaggagggcgttgatgcctacaacgaagtgatcgcccgggtgcgaatgtgggtgaacctgaacctgtggcagaagctgaagctaagcagagatgatgccaagcctctgctgagactgaagggattcccttcctttcctctggtcgagagacaggccaacgaagtggactggtgggacatggtgtgtaacgtgaagaagctgatcaacgagaaaaaggaggatggcaaggtgttttggcagaatctggctggctacaagagacaggaagccctgagaccatacctgagcagcgaggaagatcggaagaagggaaagaaattcgctcggtaccagctgggcgacctgctgctgcacctggaaaagaagcacggcgaggactggggaaaggtgtacgacgaggcctgggagcggattgacaagaaagtggaaggcctgagcaagcacatcaagctggaagaggaacggagaagcgaggacgcccagagcaaggccgccctgaccgactggctgcgggctaaggccagcttcgtgatcgagggcctgaaggaggccgacaaggacgagttctgcagatgcgagctgaagctgcagaagtggtacggggacctgcggggaaagcccttcgccatcgaagccgagaacagcatcctggacatcagcggcttcagcaagcagtacaactgtgccttcatctggcagaaggacggcgtgaagaagctgaacctgtacctgatcatcaactacttcaagggcggcaagctgcggttcaagaagatcaaacctgaagccttcgaagccaacagattctacaccgtgatcaacaaaaagagcggcgagatcgtgcccatggaggtgaacttcaacttcgacgaccccaacctgatcatcctgcctctggcctttggcaagagacagggcagagaattcatctggaacgacctgctgtccctggaaaccggcagcctgaagctggccaacggaagagtgatcgagaagacactgtacaacagaagaacccggcaggatgagcctgccctgttcgtggccctgaccttcgagcggcgggaggtcctggactcctccaatatcaaaccaatgaacctgatcggcgtggcaagaggcgaaaacatccccgccgtgatcgccctgaccgaccccgagggctgcccactgagccggtttaaggatagcctgggaaacccaacccacatcctgagaatcggcgagagctataaggagaagcagcggaccatccaggccaagaaggaggtggagcagcggagagccggcggctacagccggaagtacgccagcaaagccaagaatctggcagacgatatggtgagaaacaccgctagagatctgctgtactacgccgtgacccaggatgccatgctgatcttcgccaacctgagccggggcttcggccggcagggcaagcggaccttcatggccgagagacagtacacacggatggaggactggctgaccgccaagctggcctacgagggcctgagcaagacctacctgtccaagacactggcccagtacacctccaagacatgcagcaactgtgggtttaccatcaccagcgccgactacgacagggtgctggagaagctgaagaagacagcaacaggctggatgaccacaattaacggcaaggagctgaaggtggagggccagattacctactacaacagatacaagagacagaacgtagtcaaggacctgtccgtcgagctggatagactgagcgaagaatctgtgaacaacgacatctcctcctggacaaagggcagaagcggagaagctctgagcctcctgaagaaaagattctcccatagacccgtgcaggagaagttcgtgtgcctgaactgcggcttcgagacacacgcagccgagcaagccgccctgaacatcgccagatcctggctgttcctgcggagccaggagtacaagaaataccagacaaacaagacaaccggcaacaccgataagagagccttcgtcgagacctggcagtccttttaccggaagaagcttaaggaggtgtggaaacctgccgtgcggtctggcggatctggcggaggctcctagcaagctgagcgaggccttcgaggacgtggccgtgtacttcacctggaaggagtgggccctgctggaggccgccgacaagatgctgtacagggaccagatgctgaagaactaccaggccctgttcagcctgggctacaggggccccacccccgacctgatctgcaggatccagaggggcgagatggagctgtgggtgagcgacctggaggaggccggcgagagcagcctgagcgaggacagcggatctggctccggcagcggccccaagaaaaagagaaaagtctaagctgccttctgcggggcttgccttctggccatgcccttcttctctcccttgcacctgtacctcttggtctttgaataaagcctgagtaggaaggctagcaaaaaaaaaaaaaaaaaaaaaaaaaaaaaaaaaaaaaaaaaaaaaaaaaaaaaaaaaaaaaaaaaaaaaaaaaaaaaaaa

SEQ ID NO: 16161 - RNA, 9485 nt, synthetic construct
  source 1..9485: mol_type = other RNA
aggaaataagagagaaaagaagagtaagaagaaatataagagccaccatggcccctaagaagaagcgtaaagtgagccggatggaacgcctcgtctacgaggtgcggcagaagtgcagaaacatcgaggacatctgcatctcctgcggatctctgaacgtgaccctggagcacccactgttcatcggcggcatgtgccagaactgtaaaaactgttttctggagtgtgcctatcaatacgacgatgacggctaccagagctactgcaccatctgttgcggcggaagagaggtgctgatgtgtggaaataacaactgctgccggtgcttctgcgtggaatgcgtggacctgctggtgggccccggcgccgcccaggccgctattaaggaagatccttggaactgctacatgtgcggccacaagggcacatacggcctgctgagacggagagaggactggcctagcagactgcagatgttcttcgccaataaccacgaccaggagttcgacccccctaaggtgtaccctcccgtccccgccgagaagagaaagcccatccgggtcctgagcctgttcgatggcatcgccaccggtctgctggtgctgaaggacctgggcatccaggtggataggtacattgcctccgaggtgtgcgaggactccatcaccgtgggaatggtgcgtcatcagggcaagatcatgtacgtgggcgacgtgcggagcgtgacacagaagcatatccaggagtggggccctttcgacctggtgatcggcggcagcccttgcaatgacctgagcatcgtgaacccagcccggaagggcctgtacgagggaaccggcagactgttcttcgagttttacagactgctgcacgacgcccggcctaaggaaggcgacgaccggcccttcttttggctgttcgagaatgtggtggccatgggagtcagcgacaagcgggatattagccggttcctggagagcaaccccgtgatgatcgatgccaaggaagtgagcgccgcccaccgggccagatacttctggggcaatctgcctggcatgaacagacccctggccagcaccgtgaacgacaagctggagctgcaggagtgcctggagcacggccggatcgccaagttcagcaaggtgagaaccatcaccacccgaagcaacagcatcaaacaaggcaaggaccagcactttcctgtgttcatgaacgagaaggaggacatcctgtggtgtaccgagatggagagagtgttcgggttcccagtccactacacagatgtcagcaacatgtctagactggccagacagagactgctgggaagaagctggtccgtccctgtgatcagacacctgttcgcccctctgaaggagtacttcgcctgcgtgagcagcggcaacagcaacgccaacagccggggccccagcttctctagcggcctggtgccactgtccctgagagggagccacatgggccccatggagatctacaaaaccgtgagcgcctggaagcggcagcctgtgcgcgtgctgagcctgtttcggaatatcgataaagtcctgaaaagcctgggattcctggagagcggctctggctccggcggtggcaccctgaagtacgtggaggatgtgacaaacgtggtcagacgggatgtggagaagtggggccccttcgatctggtgtacggcagcacccaacccctgggcagctcttgtgaccggtgccctggctggtacatgtttcagttccaccggatcctgcagtacgccctgccgagacaggagtcccagcggccattcttttggattttcatggacaacttgctgctgaccgaggatgaccaggaaactaccactcggttcctgcagaccgaagccgtgaccctgcaggacgtgagaggccgggactaccagaacgccatgcgggtgtggtccaacatccctggactgaaaagcaagcacgcacctctgacccctaaagaagaggagtacctgcaggcccaggtgcggagcagaagcaagctggacgcccctaaggtggatctgctggtgaagaattgcctcctgcccctgagagagtacttcaagtatttcagccagaatagtctgcccctgggaggcagcggcggcggcgccctggtgacatttgaggacgtcgccgtgcggttcacccaggaggaatgggctctgctggatccttctcagaaaatcctgtaccgggacgtgatgagagagacataccggaatctgacctccgtgggcatcaactgggaatgttgggaccttgaagcctgcttcagaagcctgggaagaaacctgagagtgcaggtggtgaagagaaagtgcgagctgaccaacagcggcccctgcgccgagggcggcccaagcagcggcgcccctcctcccagcggcggcagcccagccggctccccaacctctaccgaggagggcacctctgagtccgccacccccgagagcggccctggcacctccaccgagcccagcgagggcagcgcacccggcagccctgccggcagccccacctccacagaggagggaaccagcaccgagcccagcgaaggcagcgccccaggcaccagcaccgagcctagtgagcaggagattaaacggatcaacaagatcagaagaagacttgtgaaagacagcaacaccaagaaggccggcaagacaggccccatgaaaaccctgctggttagagtgatgacacccgatctgagagagcggctggaaaacctgagaaagaagcctgaaaatatcccccagcccatcagcaatacatctagagccaacctgaataagctgctgaccgattacaccgaaatgaagaaggcgatcctgcatgtgtactgggaagagttccagaaggaccctgtgggcctgatgagccgggtggcccagcctgccagcaagaagatcgatcagaacaagctgaaacctgagatggacgagaagggcaacctgaccaccgccggctttgcctgctctcagtgtggccagcccctgttcgtgtacaagctggagcaggtgtctgagaagggcaaggcttacaccaactacttcggacggtgcaatgtggccgagcacgaaaagctgatcctgctggcccagctgaagcccgagaaggatagcgacgaagccgtgacatatagcctgggaaagtttgggcagagggccctggatttctacagcattcatgtgaccaaggagtccacccaccccgtgaagcccctggcccagatcgccggaaacagatacgcctccggacctgtgggaaaggccctgagcgacgcatgtatgggcacaatcgcctccttcctgtctaagtaccaggacatcatcatcgaacaccagaaggtggtgaagggcaaccagaagagactggagagcctgcgggagctggccggcaaggaaaacctggaataccctagcgtgaccctgccacctcagcctcacaccaaggagggcgttgatgcctacaacgaagtgatcgcccgggtgcgaatgtgggtgaacctgaacctgtggcagaagctgaagctaagcagagatgatgccaagcctctgctgagactgaagggattcccttcctttcctctggtcgagagacaggccaacgaagtggactggtgggacatggtgtgtaacgtgaagaagctgatcaacgagaaaaaggaggatggcaaggtgttttggcagaatctggctggctacaagagacaggaagccctgagaccatacctgagcagcgaggaagatcggaagaagggaaagaaattcgctcggtaccagctgggcgacctgctgctgcacctggaaaagaagcacggcgaggactggggaaaggtgtacgacgaggcctgggagcggattgacaagaaagtggaaggcctgagcaagcacatcaagctggaagaggaacggagaagcgaggacgcccagagcaaggccgccctgaccgactggctgcgggctaaggccagcttcgtgatcgagggcctgaaggaggccgacaaggacgagttctgcagatgcgagctgaagctgcagaagtggtacggggacctgcggggaaagcccttcgccatcgaagccgagaacagcatcctggacatcagcggcttcagcaagcagtacaactgtgccttcatctggcagaaggacggcgtgaagaagctgaacctgtacctgatcatcaactacttcaagggcggcaagctgcggttcaagaagatcaaacctgaagccttcgaagccaacagattctacaccgtgatcaacaaaaagagcggcgagatcgtgcccatggaggtgaacttcaacttcgacgaccccaacctgatcatcctgcctctggcctttggcaagagacagggcagagaattcatctggaacgacctgctgtccctggaaaccggcagcctgaagctggccaacggaagagtgatcgagaagacactgtacaacagaagaacccggcaggatgagcctgccctgttcgtggccctgaccttcgagcggcgggaggtcctggactcctccaatatcaaaccaatgaacctgatcggcgtggcaagaggcgaaaacatccccgccgtgatcgccctgaccgaccccgagggctgcccactgagccggtttaaggatagcctgggaaacccaacccacatcctgagaatcggcgagagctataaggagaagcagcggaccatccaggccaagaaggaggtggagcagcggagagccggcggctacagccggaagtacgccagcaaagccaagaatctggcagacgatatggtgagaaacaccgctagagatctgctgtactacgccgtgacccaggatgccatgctgatcttcgccaacctgagccggggcttcggccggcagggcaagcggaccttcatggccgagagacagtacacacggatggaggactggctgaccgccaagctggcctacgagggcctgagcaagacctacctgtccaagacactggcccagtacacctccaagacatgcagcaactgtgggtttaccatcaccagcgccgactacgacagggtgctggagaagctgaagaagacagcaacaggctggatgaccacaattaacggcaaggagctgaaggtggagggccagattacctactacaacagatacaagagacagaacgtagtcaaggacctgtccgtcgagctggatagactgagcgaagaatctgtgaacaacgacatctcctcctggacaaagggcagaagcggagaagctctgagcctcctgaagaaaagattctcccatagacccgtgcaggagaagttcgtgtgcctgaactgcggcttcgagacacacgcagccgagcaagccgccctgaacatcgccagatcctggctgttcctgcggagccaggagtacaagaaataccagacaaacaagacaaccggcaacaccgataagagagccttcgtcgagacctggcagtccttttaccggaagaagcttaaggaggtgtggaaacctgccgtgcggtctggcggatctggcggaggctccgtgaccttcgaggacgtggccgtgtacttcagctgggaggagtggggcctgctggacgaggcccagaggtgcctgtaccaggacgtgatgctggagaacctggccctgatcaacagcctgggcctgaggcacggcgccgaggacgaggacgcccccgagcacagggtgagcgtgcaggccgccagccaggtgggcaccaggaaggccgtggtgagcccccagaaggcccaccccagggaggtgggcggcccaagcagcggcgcccctcctcccagcggcggcagcccagccggctccccaacctctaccgaggagggcacctctgagtccgccacccccgagagcggccctggcacctccaccgagcccagcgagggcagcgcacccggcagccctgccggcagccccacctccacagaggagggaaccagcaccgagcccagcgaaggcagcgccccaggcaccagcaccgagcctagtgagcaggagattaaacggatcaacaagatcagaagaagacttgtgaaagacagcaacaccaagaaggccggcaagacaggccccatgaaaaccctgctggttagagtgatgacacccgatctgagagagcggctggaaaacctgagaaagaagcctgaaaatatcccccagcccatcagcaatacatctagagccaacctgaataagctgctgaccgattacaccgaaatgaagaaggcgatcctgcatgtgtactgggaagagttccagaaggaccctgtgggcctgatgagccgggtggcccagcctgccagcaagaagatcgatcagaacaagctgaaacctgagatggacgagaagggcaacctgaccaccgccggctttgcctgctctcagtgtggccagcccctgttcgtgtacaagctggagcaggtgtctgagaagggcaaggcttacaccaactacttcggacggtgcaatgtggccgagcacgaaaagctgatcctgctggcccagctgaagcccgagaaggatagcgacgaagccgtgacatatagcctgggaaagtttgggcagagggccctggatttctacagcattcatgtgaccaaggagtccacccaccccgtgaagcccctggcccagatcgccggaaacagatacgcctccggacctgtgggaaaggccctgagcgacgcatgtatgggcacaatcgcctccttcctgtctaagtaccaggacatcatcatcgaacaccagaaggtggtgaagggcaaccagaagagactggagagcctgcgggagctggccggcaaggaaaacctggaataccctagcgtgaccctgccacctcagcctcacaccaaggagggcgttgatgcctacaacgaagtgatcgcccgggtgcgaatgtgggtgaacctgaacctgtggcagaagctgaagctaagcagagatgatgccaagcctctgctgagactgaagggattcccttcctttcctctggtcgagagacaggccaacgaagtggactggtgggacatggtgtgtaacgtgaagaagctgatcaacgagaaaaaggaggatggcaaggtgttttggcagaatctggctggctacaagagacaggaagccctgagaccatacctgagcagcgaggaagatcggaagaagggaaagaaattcgctcggtaccagctgggcgacctgctgctgcacctggaaaagaagcacggcgaggactggggaaaggtgtacgacgaggcctgggagcggattgacaagaaagtggaaggcctgagcaagcacatcaagctggaagaggaacggagaagcgaggacgcccagagcaaggccgccctgaccgactggctgcgggctaaggccagcttcgtgatcgagggcctgaaggaggccgacaaggacgagttctgcagatgcgagctgaagctgcagaagtggtacggggacctgcggggaaagcccttcgccatcgaagccgagaacagcatcctggacatcagcggcttcagcaagcagtacaactgtgccttcatctggcagaaggacggcgtgaagaagctgaacctgtacctgatcatcaactacttcaagggcggcaagctgcggttcaagaagatcaaacctgaagccttcgaagccaacagattctacaccgtgatcaacaaaaagagcggcgagatcgtgcccatggaggtgaacttcaacttcgacgaccccaacctgatcatcctgcctctggcctttggcaagagacagggcagagaattcatctggaacgacctgctgtccctggaaaccggcagcctgaagctggccaacggaagagtgatcgagaagacactgtacaacagaagaacccggcaggatgagcctgccctgttcgtggccctgaccttcgagcggcgggaggtcctggactcctccaatatcaaaccaatgaacctgatcggcgtggcaagaggcgaaaacatccccgccgtgatcgccctgaccgaccccgagggctgcccactgagccggtttaaggatagcctgggaaacccaacccacatcctgagaatcggcgagagctataaggagaagcagcggaccatccaggccaagaaggaggtggagcagcggagagccggcggctacagccggaagtacgccagcaaagccaagaatctggcagacgatatggtgagaaacaccgctagagatctgctgtactacgccgtgacccaggatgccatgctgatcttcgccaacctgagccggggcttcggccggcagggcaagcggaccttcatggccgagagacagtacacacggatggaggactggctgaccgccaagctggcctacgagggcctgagcaagacctacctgtccaagacactggcccagtacacctccaagacatgcagcaactgtgggtttaccatcaccagcgccgactacgacagggtgctggagaagctgaagaagacagcaacaggctggatgaccacaattaacggcaaggagctgaaggtggagggccagattacctactacaacagatacaagagacagaacgtagtcaaggacctgtccgtcgagctggatagactgagcgaagaatctgtgaacaacgacatctcctcctggacaaagggcagaagcggagaagctctgagcctcctgaagaaaagattctcccatagacccgtgcaggagaagttcgtgtgcctgaactgcggcttcgagacacacgcagccgagcaagccgccctgaacatcgccagatcctggctgttcctgcggagccaggagtacaagaaataccagacaaacaagacaaccggcaacaccgataagagagccttcgtcgagacctggcagtccttttaccggaagaagcttaaggaggtgtggaaacctgccgtgcggtctggcggatctggcggaggctcctgtgaccttcgaggacgtggccgtgtacttcagctgggaggagtggggcctgctggacgaggcccagaggtgcctgtaccaggacgtgatgctggagaacctggccctgatcaacagcctgggcctgaggcacggcgccgaggacgaggacgcccccgagcacagggtgagcgtgcaggccgccagccaggtgggcaccaggaaggccgtggtgagcccccagaaggcccaccccagggaggtgggatctggctccggcagcggccccaagaaaaagagaaaagtctaagctgccttctgcggggcttgccttctggccatgcccttcttctctcccttgcacctgtacctcttggtctttgaataaagcctgagtaggaaggctagcaaaaaaaaaaaaaaaaaaaaaaaaaaaaaaaaaaaaaaaaaaaaaaaaaaaaaaaaaaaaaaaaaaaaaaaaaaaaaaaa

SEQ ID NO: 16162 - RNA, 9485 nt, synthetic construct
  source 1..9485: mol_type = other RNA
aggaaataagagagaaaagaagagtaagaagaaatataagagccaccatggcccctaagaagaagcgtaaagtgagccggatggaacgcctcgtctacgaggtgcggcagaagtgcagaaacatcgaggacatctgcatctcctgcggatctctgaacgtgaccctggagcacccactgttcatcggcggcatgtgccagaactgtaaaaactgttttctggagtgtgcctatcaatacgacgatgacggctaccagagctactgcaccatctgttgcggcggaagagaggtgctgatgtgtggaaataacaactgctgccggtgcttctgcgtggaatgcgtggacctgctggtgggccccggcgccgcccaggccgctattaaggaagatccttggaactgctacatgtgcggccacaagggcacatacggcctgctgagacggagagaggactggcctagcagactgcagatgttcttcgccaataaccacgaccaggagttcgacccccctaaggtgtaccctcccgtccccgccgagaagagaaagcccatccgggtcctgagcctgttcgatggcatcgccaccggtctgctggtgctgaaggacctgggcatccaggtggataggtacattgcctccgaggtgtgcgaggactccatcaccgtgggaatggtgcgtcatcagggcaagatcatgtacgtgggcgacgtgcggagcgtgacacagaagcatatccaggagtggggccctttcgacctggtgatcggcggcagcccttgcaatgacctgagcatcgtgaacccagcccggaagggcctgtacgagggaaccggcagactgttcttcgagttttacagactgctgcacgacgcccggcctaaggaaggcgacgaccggcccttcttttggctgttcgagaatgtggtggccatgggagtcagcgacaagcgggatattagccggttcctggagagcaaccccgtgatgatcgatgccaaggaagtgagcgccgcccaccgggccagatacttctggggcaatctgcctggcatgaacagacccctggccagcaccgtgaacgacaagctggagctgcaggagtgcctggagcacggccggatcgccaagttcagcaaggtgagaaccatcaccacccgaagcaacagcatcaaacaaggcaaggaccagcactttcctgtgttcatgaacgagaaggaggacatcctgtggtgtaccgagatggagagagtgttcgggttcccagtccactacacagatgtcagcaacatgtctagactggccagacagagactgctgggaagaagctggtccgtccctgtgatcagacacctgttcgcccctctgaaggagtacttcgcctgcgtgagcagcggcaacagcaacgccaacagccggggccccagcttctctagcggcctggtgccactgtccctgagagggagccacatgggccccatggagatctacaaaaccgtgagcgcctggaagcggcagcctgtgcgcgtgctgagcctgtttcggaatatcgataaagtcctgaaaagcctgggattcctggagagcggctctggctccggcggtggcaccctgaagtacgtggaggatgtgacaaacgtggtcagacgggatgtggagaagtggggccccttcgatctggtgtacggcagcacccaacccctgggcagctcttgtgaccggtgccctggctggtacatgtttcagttccaccggatcctgcagtacgccctgccgagacaggagtcccagcggccattcttttggattttcatggacaacttgctgctgaccgaggatgaccaggaaactaccactcggttcctgcagaccgaagccgtgaccctgcaggacgtgagaggccgggactaccagaacgccatgcgggtgtggtccaacatccctggactgaaaagcaagcacgcacctctgacccctaaagaagaggagtacctgcaggcccaggtgcggagcagaagcaagctggacgcccctaaggtggatctgctggtgaagaattgcctcctgcccctgagagagtacttcaagtatttcagccagaatagtctgcccctgggaggcagcggcggcggcgccctggtgacatttgaggacgtcgccgtgcggttcacccaggaggaatgggctctgctggatccttctcagaaaatcctgtaccgggacgtgatgagagagacataccggaatctgacctccgtgggcatcaactgggaatgttgggaccttgaagcctgcttcagaagcctgggaagaaacctgagagtgcaggtggtgaagagaaagtgcgagctgaccaacagcggcccctgcgccgagggcggcccaagcagcggcgcccctcctcccagcggcggcagcccagccggctccccaacctctaccgaggagggcacctctgagtccgccacccccgagagcggccctggcacctccaccgagcccagcgagggcagcgcacccggcagccctgccggcagccccacctccacagaggagggaaccagcaccgagcccagcgaaggcagcgccccaggcaccagcaccgagcctagtgagcaggagattaaacggatcaacaagatcagaagaagacttgtgaaagacagcaacaccaagaaggccggcaagacaggccccatgaaaaccctgctggttagagtgatgacacccgatctgagagagcggctggaaaacctgagaaagaagcctgaaaatatcccccagcccatcagcaatacatctagagccaacctgaataagctgctgaccgattacaccgaaatgaagaaggcgatcctgcatgtgtactgggaagagttccagaaggaccctgtgggcctgatgagccgggtggcccagcctgccagcaagaagatcgatcagaacaagctgaaacctgagatggacgagaagggcaacctgaccaccgccggctttgcctgctctcagtgtggccagcccctgttcgtgtacaagctggagcaggtgtctgagaagggcaaggcttacaccaactacttcggacggtgcaatgtggccgagcacgaaaagctgatcctgctggcccagctgaagcccgagaaggatagcgacgaagccgtgacatatagcctgggaaagtttgggcagagggccctggatttctacagcattcatgtgaccaaggagtccacccaccccgtgaagcccctggcccagatcgccggaaacagatacgcctccggacctgtgggaaaggccctgagcgacgcatgtatgggcacaatcgcctccttcctgtctaagtaccaggacatcatcatcgaacaccagaaggtggtgaagggcaaccagaagagactggagagcctgcgggagctggccggcaaggaaaacctggaataccctagcgtgaccctgccacctcagcctcacaccaaggagggcgttgatgcctacaacgaagtgatcgcccgggtgcgaatgtgggtgaacctgaacctgtggcagaagctgaagctaagcagagatgatgccaagcctctgctgagactgaagggattcccttcctttcctctggtcgagagacaggccaacgaagtggactggtgggacatggtgtgtaacgtgaagaagctgatcaacgagaaaaaggaggatggcaaggtgttttggcagaatctggctggctacaagagacaggaagccctgagaccatacctgagcagcgaggaagatcggaagaagggaaagaaattcgctcggtaccagctgggcgacctgctgctgcacctggaaaagaagcacggcgaggactggggaaaggtgtacgacgaggcctgggagcggattgacaagaaagtggaaggcctgagcaagcacatcaagctggaagaggaacggagaagcgaggacgcccagagcaaggccgccctgaccgactggctgcgggctaaggccagcttcgtgatcgagggcctgaaggaggccgacaaggacgagttctgcagatgcgagctgaagctgcagaagtggtacggggacctgcggggaaagcccttcgccatcgaagccgagaacagcatcctggacatcagcggcttcagcaagcagtacaactgtgccttcatctggcagaaggacggcgtgaagaagctgaacctgtacctgatcatcaactacttcaagggcggcaagctgcggttcaagaagatcaaacctgaagccttcgaagccaacagattctacaccgtgatcaacaaaaagagcggcgagatcgtgcccatggaggtgaacttcaacttcgacgaccccaacctgatcatcctgcctctggcctttggcaagagacagggcagagaattcatctggaacgacctgctgtccctggaaaccggcagcctgaagctggccaacggaagagtgatcgagaagacactgtacaacagaagaacccggcaggatgagcctgccctgttcgtggccctgaccttcgagcggcgggaggtcctggactcctccaatatcaaaccaatgaacctgatcggcgtggcaagaggcgaaaacatccccgccgtgatcgccctgaccgaccccgagggctgcccactgagccggtttaaggatagcctgggaaacccaacccacatcctgagaatcggcgagagctataaggagaagcagcggaccatccaggccaagaaggaggtggagcagcggagagccggcggctacagccggaagtacgccagcaaagccaagaatctggcagacgatatggtgagaaacaccgctagagatctgctgtactacgccgtgacccaggatgccatgctgatcttcgccaacctgagccggggcttcggccggcagggcaagcggaccttcatggccgagagacagtacacacggatggaggactggctgaccgccaagctggcctacgagggcctgagcaagacctacctgtccaagacactggcccagtacacctccaagacatgcagcaactgtgggtttaccatcaccagcgccgactacgacagggtgctggagaagctgaagaagacagcaacaggctggatgaccacaattaacggcaaggagctgaaggtggagggccagattacctactacaacagatacaagagacagaacgtagtcaaggacctgtccgtcgagctggatagactgagcgaagaatctgtgaacaacgacatctcctcctggacaaagggcagaagcggagaagctctgagcctcctgaagaaaagattctcccatagacccgtgcaggagaagttcgtgtgcctgaactgcggcttcgagacacacgcagccgagcaagccgccctgaacatcgccagatcctggctgttcctgcggagccaggagtacaagaaataccagacaaacaagacaaccggcaacaccgataagagagccttcgtcgagacctggcagtccttttaccggaagaagcttaaggaggtgtggaaacctgccgtgcggtctggcggatctggcggaggctccaagcccggcaccgtgagcttcgccgacgtggccgtgtacttcagccccgaggagtggggctgcctgaggcccgcccagagggccctgtacagggacgtgatgcaggagacctacggccacctgggcgccctgggcttccccggccccaagcccgccctgatcagctggatggagcaggagagcgaggcctggagccccgccgcccaggaccccgagaagggcgagaggctgggcggcgccaggggcggcccaagcagcggcgcccctcctcccagcggcggcagcccagccggctccccaacctctaccgaggagggcacctctgagtccgccacccccgagagcggccctggcacctccaccgagcccagcgagggcagcgcacccggcagccctgccggcagccccacctccacagaggagggaaccagcaccgagcccagcgaaggcagcgccccaggcaccagcaccgagcctagtgagcaggagattaaacggatcaacaagatcagaagaagacttgtgaaagacagcaacaccaagaaggccggcaagacaggccccatgaaaaccctgctggttagagtgatgacacccgatctgagagagcggctggaaaacctgagaaagaagcctgaaaatatcccccagcccatcagcaatacatctagagccaacctgaataagctgctgaccgattacaccgaaatgaagaaggcgatcctgcatgtgtactgggaagagttccagaaggaccctgtgggcctgatgagccgggtggcccagcctgccagcaagaagatcgatcagaacaagctgaaacctgagatggacgagaagggcaacctgaccaccgccggctttgcctgctctcagtgtggccagcccctgttcgtgtacaagctggagcaggtgtctgagaagggcaaggcttacaccaactacttcggacggtgcaatgtggccgagcacgaaaagctgatcctgctggcccagctgaagcccgagaaggatagcgacgaagccgtgacatatagcctgggaaagtttgggcagagggccctggatttctacagcattcatgtgaccaaggagtccacccaccccgtgaagcccctggcccagatcgccggaaacagatacgcctccggacctgtgggaaaggccctgagcgacgcatgtatgggcacaatcgcctccttcctgtctaagtaccaggacatcatcatcgaacaccagaaggtggtgaagggcaaccagaagagactggagagcctgcgggagctggccggcaaggaaaacctggaataccctagcgtgaccctgccacctcagcctcacaccaaggagggcgttgatgcctacaacgaagtgatcgcccgggtgcgaatgtgggtgaacctgaacctgtggcagaagctgaagctaagcagagatgatgccaagcctctgctgagactgaagggattcccttcctttcctctggtcgagagacaggccaacgaagtggactggtgggacatggtgtgtaacgtgaagaagctgatcaacgagaaaaaggaggatggcaaggtgttttggcagaatctggctggctacaagagacaggaagccctgagaccatacctgagcagcgaggaagatcggaagaagggaaagaaattcgctcggtaccagctgggcgacctgctgctgcacctggaaaagaagcacggcgaggactggggaaaggtgtacgacgaggcctgggagcggattgacaagaaagtggaaggcctgagcaagcacatcaagctggaagaggaacggagaagcgaggacgcccagagcaaggccgccctgaccgactggctgcgggctaaggccagcttcgtgatcgagggcctgaaggaggccgacaaggacgagttctgcagatgcgagctgaagctgcagaagtggtacggggacctgcggggaaagcccttcgccatcgaagccgagaacagcatcctggacatcagcggcttcagcaagcagtacaactgtgccttcatctggcagaaggacggcgtgaagaagctgaacctgtacctgatcatcaactacttcaagggcggcaagctgcggttcaagaagatcaaacctgaagccttcgaagccaacagattctacaccgtgatcaacaaaaagagcggcgagatcgtgcccatggaggtgaacttcaacttcgacgaccccaacctgatcatcctgcctctggcctttggcaagagacagggcagagaattcatctggaacgacctgctgtccctggaaaccggcagcctgaagctggccaacggaagagtgatcgagaagacactgtacaacagaagaacccggcaggatgagcctgccctgttcgtggccctgaccttcgagcggcgggaggtcctggactcctccaatatcaaaccaatgaacctgatcggcgtggcaagaggcgaaaacatccccgccgtgatcgccctgaccgaccccgagggctgcccactgagccggtttaaggatagcctgggaaacccaacccacatcctgagaatcggcgagagctataaggagaagcagcggaccatccaggccaagaaggaggtggagcagcggagagccggcggctacagccggaagtacgccagcaaagccaagaatctggcagacgatatggtgagaaacaccgctagagatctgctgtactacgccgtgacccaggatgccatgctgatcttcgccaacctgagccggggcttcggccggcagggcaagcggaccttcatggccgagagacagtacacacggatggaggactggctgaccgccaagctggcctacgagggcctgagcaagacctacctgtccaagacactggcccagtacacctccaagacatgcagcaactgtgggtttaccatcaccagcgccgactacgacagggtgctggagaagctgaagaagacagcaacaggctggatgaccacaattaacggcaaggagctgaaggtggagggccagattacctactacaacagatacaagagacagaacgtagtcaaggacctgtccgtcgagctggatagactgagcgaagaatctgtgaacaacgacatctcctcctggacaaagggcagaagcggagaagctctgagcctcctgaagaaaagattctcccatagacccgtgcaggagaagttcgtgtgcctgaactgcggcttcgagacacacgcagccgagcaagccgccctgaacatcgccagatcctggctgttcctgcggagccaggagtacaagaaataccagacaaacaagacaaccggcaacaccgataagagagccttcgtcgagacctggcagtccttttaccggaagaagcttaaggaggtgtggaaacctgccgtgcggtctggcggatctggcggaggctcctaagcccggcaccgtgagcttcgccgacgtggccgtgtacttcagccccgaggagtggggctgcctgaggcccgcccagagggccctgtacagggacgtgatgcaggagacctacggccacctgggcgccctgggcttccccggccccaagcccgccctgatcagctggatggagcaggagagcgaggcctggagccccgccgcccaggaccccgagaagggcgagaggctgggcggcgccaggggatctggctccggcagcggccccaagaaaaagagaaaagtctaagctgccttctgcggggcttgccttctggccatgcccttcttctctcccttgcacctgtacctcttggtctttgaataaagcctgagtaggaaggctagcaaaaaaaaaaaaaaaaaaaaaaaaaaaaaaaaaaaaaaaaaaaaaaaaaaaaaaaaaaaaaaaaaaaaaaaaaaaaaaaa

SEQ ID NO: 16163 - RNA, 9485 nt, synthetic construct
  source 1..9485: mol_type = other RNA
aggaaataagagagaaaagaagagtaagaagaaatataagagccaccatggcccctaagaagaagcgtaaagtgagccggatggaacgcctcgtctacgaggtgcggcagaagtgcagaaacatcgaggacatctgcatctcctgcggatctctgaacgtgaccctggagcacccactgttcatcggcggcatgtgccagaactgtaaaaactgttttctggagtgtgcctatcaatacgacgatgacggctaccagagctactgcaccatctgttgcggcggaagagaggtgctgatgtgtggaaataacaactgctgccggtgcttctgcgtggaatgcgtggacctgctggtgggccccggcgccgcccaggccgctattaaggaagatccttggaactgctacatgtgcggccacaagggcacatacggcctgctgagacggagagaggactggcctagcagactgcagatgttcttcgccaataaccacgaccaggagttcgacccccctaaggtgtaccctcccgtccccgccgagaagagaaagcccatccgggtcctgagcctgttcgatggcatcgccaccggtctgctggtgctgaaggacctgggcatccaggtggataggtacattgcctccgaggtgtgcgaggactccatcaccgtgggaatggtgcgtcatcagggcaagatcatgtacgtgggcgacgtgcggagcgtgacacagaagcatatccaggagtggggccctttcgacctggtgatcggcggcagcccttgcaatgacctgagcatcgtgaacccagcccggaagggcctgtacgagggaaccggcagactgttcttcgagttttacagactgctgcacgacgcccggcctaaggaaggcgacgaccggcccttcttttggctgttcgagaatgtggtggccatgggagtcagcgacaagcgggatattagccggttcctggagagcaaccccgtgatgatcgatgccaaggaagtgagcgccgcccaccgggccagatacttctggggcaatctgcctggcatgaacagacccctggccagcaccgtgaacgacaagctggagctgcaggagtgcctggagcacggccggatcgccaagttcagcaaggtgagaaccatcaccacccgaagcaacagcatcaaacaaggcaaggaccagcactttcctgtgttcatgaacgagaaggaggacatcctgtggtgtaccgagatggagagagtgttcgggttcccagtccactacacagatgtcagcaacatgtctagactggccagacagagactgctgggaagaagctggtccgtccctgtgatcagacacctgttcgcccctctgaaggagtacttcgcctgcgtgagcagcggcaacagcaacgccaacagccggggccccagcttctctagcggcctggtgccactgtccctgagagggagccacatgggccccatggagatctacaaaaccgtgagcgcctggaagcggcagcctgtgcgcgtgctgagcctgtttcggaatatcgataaagtcctgaaaagcctgggattcctggagagcggctctggctccggcggtggcaccctgaagtacgtggaggatgtgacaaacgtggtcagacgggatgtggagaagtggggccccttcgatctggtgtacggcagcacccaacccctgggcagctcttgtgaccggtgccctggctggtacatgtttcagttccaccggatcctgcagtacgccctgccgagacaggagtcccagcggccattcttttggattttcatggacaacttgctgctgaccgaggatgaccaggaaactaccactcggttcctgcagaccgaagccgtgaccctgcaggacgtgagaggccgggactaccagaacgccatgcgggtgtggtccaacatccctggactgaaaagcaagcacgcacctctgacccctaaagaagaggagtacctgcaggcccaggtgcggagcagaagcaagctggacgcccctaaggtggatctgctggtgaagaattgcctcctgcccctgagagagtacttcaagtatttcagccagaatagtctgcccctgggaggcagcggcggcggcgccctggtgacatttgaggacgtcgccgtgcggttcacccaggaggaatgggctctgctggatccttctcagaaaatcctgtaccgggacgtgatgagagagacataccggaatctgacctccgtgggcatcaactgggaatgttgggaccttgaagcctgcttcagaagcctgggaagaaacctgagagtgcaggtggtgaagagaaagtgcgagctgaccaacagcggcccctgcgccgagggcggcccaagcagcggcgcccctcctcccagcggcggcagcccagccggctccccaacctctaccgaggagggcacctctgagtccgccacccccgagagcggccctggcacctccaccgagcccagcgagggcagcgcacccggcagccctgccggcagccccacctccacagaggagggaaccagcaccgagcccagcgaaggcagcgccccaggcaccagcaccgagcctagtgagcaggagattaaacggatcaacaagatcagaagaagacttgtgaaagacagcaacaccaagaaggccggcaagacaggccccatgaaaaccctgctggttagagtgatgacacccgatctgagagagcggctggaaaacctgagaaagaagcctgaaaatatcccccagcccatcagcaatacatctagagccaacctgaataagctgctgaccgattacaccgaaatgaagaaggcgatcctgcatgtgtactgggaagagttccagaaggaccctgtgggcctgatgagccgggtggcccagcctgccagcaagaagatcgatcagaacaagctgaaacctgagatggacgagaagggcaacctgaccaccgccggctttgcctgctctcagtgtggccagcccctgttcgtgtacaagctggagcaggtgtctgagaagggcaaggcttacaccaactacttcggacggtgcaatgtggccgagcacgaaaagctgatcctgctggcccagctgaagcccgagaaggatagcgacgaagccgtgacatatagcctgggaaagtttgggcagagggccctggatttctacagcattcatgtgaccaaggagtccacccaccccgtgaagcccctggcccagatcgccggaaacagatacgcctccggacctgtgggaaaggccctgagcgacgcatgtatgggcacaatcgcctccttcctgtctaagtaccaggacatcatcatcgaacaccagaaggtggtgaagggcaaccagaagagactggagagcctgcgggagctggccggcaaggaaaacctggaataccctagcgtgaccctgccacctcagcctcacaccaaggagggcgttgatgcctacaacgaagtgatcgcccgggtgcgaatgtgggtgaacctgaacctgtggcagaagctgaagctaagcagagatgatgccaagcctctgctgagactgaagggattcccttcctttcctctggtcgagagacaggccaacgaagtggactggtgggacatggtgtgtaacgtgaagaagctgatcaacgagaaaaaggaggatggcaaggtgttttggcagaatctggctggctacaagagacaggaagccctgagaccatacctgagcagcgaggaagatcggaagaagggaaagaaattcgctcggtaccagctgggcgacctgctgctgcacctggaaaagaagcacggcgaggactggggaaaggtgtacgacgaggcctgggagcggattgacaagaaagtggaaggcctgagcaagcacatcaagctggaagaggaacggagaagcgaggacgcccagagcaaggccgccctgaccgactggctgcgggctaaggccagcttcgtgatcgagggcctgaaggaggccgacaaggacgagttctgcagatgcgagctgaagctgcagaagtggtacggggacctgcggggaaagcccttcgccatcgaagccgagaacagcatcctggacatcagcggcttcagcaagcagtacaactgtgccttcatctggcagaaggacggcgtgaagaagctgaacctgtacctgatcatcaactacttcaagggcggcaagctgcggttcaagaagatcaaacctgaagccttcgaagccaacagattctacaccgtgatcaacaaaaagagcggcgagatcgtgcccatggaggtgaacttcaacttcgacgaccccaacctgatcatcctgcctctggcctttggcaagagacagggcagagaattcatctggaacgacctgctgtccctggaaaccggcagcctgaagctggccaacggaagagtgatcgagaagacactgtacaacagaagaacccggcaggatgagcctgccctgttcgtggccctgaccttcgagcggcgggaggtcctggactcctccaatatcaaaccaatgaacctgatcggcgtggcaagaggcgaaaacatccccgccgtgatcgccctgaccgaccccgagggctgcccactgagccggtttaaggatagcctgggaaacccaacccacatcctgagaatcggcgagagctataaggagaagcagcggaccatccaggccaagaaggaggtggagcagcggagagccggcggctacagccggaagtacgccagcaaagccaagaatctggcagacgatatggtgagaaacaccgctagagatctgctgtactacgccgtgacccaggatgccatgctgatcttcgccaacctgagccggggcttcggccggcagggcaagcggaccttcatggccgagagacagtacacacggatggaggactggctgaccgccaagctggcctacgagggcctgagcaagacctacctgtccaagacactggcccagtacacctccaagacatgcagcaactgtgggtttaccatcaccagcgccgactacgacagggtgctggagaagctgaagaagacagcaacaggctggatgaccacaattaacggcaaggagctgaaggtggagggccagattacctactacaacagatacaagagacagaacgtagtcaaggacctgtccgtcgagctggatagactgagcgaagaatctgtgaacaacgacatctcctcctggacaaagggcagaagcggagaagctctgagcctcctgaagaaaagattctcccatagacccgtgcaggagaagttcgtgtgcctgaactgcggcttcgagacacacgcagccgagcaagccgccctgaacatcgccagatcctggctgttcctgcggagccaggagtacaagaaataccagacaaacaagacaaccggcaacaccgataagagagccttcgtcgagacctggcagtccttttaccggaagaagcttaaggaggtgtggaaacctgccgtgcggtctggcggatctggcggaggctccacccccgacgtggtgaccttcgaggacgtggccgtgtgcttcagcagcggcgagtggcagtgcctgaccagggcccagaggcacctgtacaccgacgtgatgctggagaactacggcaacatgctgagcgccggcctggcctgccccaagccccccctgatcagccacctggagcagggcgccgtgccctgcgccgaggacctgcaggactggggcttcctgacctgcagcttccccgtgagcggcggcccaagcagcggcgcccctcctcccagcggcggcagcccagccggctccccaacctctaccgaggagggcacctctgagtccgccacccccgagagcggccctggcacctccaccgagcccagcgagggcagcgcacccggcagccctgccggcagccccacctccacagaggagggaaccagcaccgagcccagcgaaggcagcgccccaggcaccagcaccgagcctagtgagcaggagattaaacggatcaacaagatcagaagaagacttgtgaaagacagcaacaccaagaaggccggcaagacaggccccatgaaaaccctgctggttagagtgatgacacccgatctgagagagcggctggaaaacctgagaaagaagcctgaaaatatcccccagcccatcagcaatacatctagagccaacctgaataagctgctgaccgattacaccgaaatgaagaaggcgatcctgcatgtgtactgggaagagttccagaaggaccctgtgggcctgatgagccgggtggcccagcctgccagcaagaagatcgatcagaacaagctgaaacctgagatggacgagaagggcaacctgaccaccgccggctttgcctgctctcagtgtggccagcccctgttcgtgtacaagctggagcaggtgtctgagaagggcaaggcttacaccaactacttcggacggtgcaatgtggccgagcacgaaaagctgatcctgctggcccagctgaagcccgagaaggatagcgacgaagccgtgacatatagcctgggaaagtttgggcagagggccctggatttctacagcattcatgtgaccaaggagtccacccaccccgtgaagcccctggcccagatcgccggaaacagatacgcctccggacctgtgggaaaggccctgagcgacgcatgtatgggcacaatcgcctccttcctgtctaagtaccaggacatcatcatcgaacaccagaaggtggtgaagggcaaccagaagagactggagagcctgcgggagctggccggcaaggaaaacctggaataccctagcgtgaccctgccacctcagcctcacaccaaggagggcgttgatgcctacaacgaagtgatcgcccgggtgcgaatgtgggtgaacctgaacctgtggcagaagctgaagctaagcagagatgatgccaagcctctgctgagactgaagggattcccttcctttcctctggtcgagagacaggccaacgaagtggactggtgggacatggtgtgtaacgtgaagaagctgatcaacgagaaaaaggaggatggcaaggtgttttggcagaatctggctggctacaagagacaggaagccctgagaccatacctgagcagcgaggaagatcggaagaagggaaagaaattcgctcggtaccagctgggcgacctgctgctgcacctggaaaagaagcacggcgaggactggggaaaggtgtacgacgaggcctgggagcggattgacaagaaagtggaaggcctgagcaagcacatcaagctggaagaggaacggagaagcgaggacgcccagagcaaggccgccctgaccgactggctgcgggctaaggccagcttcgtgatcgagggcctgaaggaggccgacaaggacgagttctgcagatgcgagctgaagctgcagaagtggtacggggacctgcggggaaagcccttcgccatcgaagccgagaacagcatcctggacatcagcggcttcagcaagcagtacaactgtgccttcatctggcagaaggacggcgtgaagaagctgaacctgtacctgatcatcaactacttcaagggcggcaagctgcggttcaagaagatcaaacctgaagccttcgaagccaacagattctacaccgtgatcaacaaaaagagcggcgagatcgtgcccatggaggtgaacttcaacttcgacgaccccaacctgatcatcctgcctctggcctttggcaagagacagggcagagaattcatctggaacgacctgctgtccctggaaaccggcagcctgaagctggccaacggaagagtgatcgagaagacactgtacaacagaagaacccggcaggatgagcctgccctgttcgtggccctgaccttcgagcggcgggaggtcctggactcctccaatatcaaaccaatgaacctgatcggcgtggcaagaggcgaaaacatccccgccgtgatcgccctgaccgaccccgagggctgcccactgagccggtttaaggatagcctgggaaacccaacccacatcctgagaatcggcgagagctataaggagaagcagcggaccatccaggccaagaaggaggtggagcagcggagagccggcggctacagccggaagtacgccagcaaagccaagaatctggcagacgatatggtgagaaacaccgctagagatctgctgtactacgccgtgacccaggatgccatgctgatcttcgccaacctgagccggggcttcggccggcagggcaagcggaccttcatggccgagagacagtacacacggatggaggactggctgaccgccaagctggcctacgagggcctgagcaagacctacctgtccaagacactggcccagtacacctccaagacatgcagcaactgtgggtttaccatcaccagcgccgactacgacagggtgctggagaagctgaagaagacagcaacaggctggatgaccacaattaacggcaaggagctgaaggtggagggccagattacctactacaacagatacaagagacagaacgtagtcaaggacctgtccgtcgagctggatagactgagcgaagaatctgtgaacaacgacatctcctcctggacaaagggcagaagcggagaagctctgagcctcctgaagaaaagattctcccatagacccgtgcaggagaagttcgtgtgcctgaactgcggcttcgagacacacgcagccgagcaagccgccctgaacatcgccagatcctggctgttcctgcggagccaggagtacaagaaataccagacaaacaagacaaccggcaacaccgataagagagccttcgtcgagacctggcagtccttttaccggaagaagcttaaggaggtgtggaaacctgccgtgcggtctggcggatctggcggaggctcctacccccgacgtggtgaccttcgaggacgtggccgtgtgcttcagcagcggcgagtggcagtgcctgaccagggcccagaggcacctgtacaccgacgtgatgctggagaactacggcaacatgctgagcgccggcctggcctgccccaagccccccctgatcagccacctggagcagggcgccgtgccctgcgccgaggacctgcaggactggggcttcctgacctgcagcttccccgtgagcggatctggctccggcagcggccccaagaaaaagagaaaagtctaagctgccttctgcggggcttgccttctggccatgcccttcttctctcccttgcacctgtacctcttggtctttgaataaagcctgagtaggaaggctagcaaaaaaaaaaaaaaaaaaaaaaaaaaaaaaaaaaaaaaaaaaaaaaaaaaaaaaaaaaaaaaaaaaaaaaaaaaaaaaaa

SEQ ID NO: 16164 - RNA, 9485 nt, synthetic construct
  source 1..9485: mol_type = other RNA
aggaaataagagagaaaagaagagtaagaagaaatataagagccaccatggcccctaagaagaagcgtaaagtgagccggatggaacgcctcgtctacgaggtgcggcagaagtgcagaaacatcgaggacatctgcatctcctgcggatctctgaacgtgaccctggagcacccactgttcatcggcggcatgtgccagaactgtaaaaactgttttctggagtgtgcctatcaatacgacgatgacggctaccagagctactgcaccatctgttgcggcggaagagaggtgctgatgtgtggaaataacaactgctgccggtgcttctgcgtggaatgcgtggacctgctggtgggccccggcgccgcccaggccgctattaaggaagatccttggaactgctacatgtgcggccacaagggcacatacggcctgctgagacggagagaggactggcctagcagactgcagatgttcttcgccaataaccacgaccaggagttcgacccccctaaggtgtaccctcccgtccccgccgagaagagaaagcccatccgggtcctgagcctgttcgatggcatcgccaccggtctgctggtgctgaaggacctgggcatccaggtggataggtacattgcctccgaggtgtgcgaggactccatcaccgtgggaatggtgcgtcatcagggcaagatcatgtacgtgggcgacgtgcggagcgtgacacagaagcatatccaggagtggggccctttcgacctggtgatcggcggcagcccttgcaatgacctgagcatcgtgaacccagcccggaagggcctgtacgagggaaccggcagactgttcttcgagttttacagactgctgcacgacgcccggcctaaggaaggcgacgaccggcccttcttttggctgttcgagaatgtggtggccatgggagtcagcgacaagcgggatattagccggttcctggagagcaaccccgtgatgatcgatgccaaggaagtgagcgccgcccaccgggccagatacttctggggcaatctgcctggcatgaacagacccctggccagcaccgtgaacgacaagctggagctgcaggagtgcctggagcacggccggatcgccaagttcagcaaggtgagaaccatcaccacccgaagcaacagcatcaaacaaggcaaggaccagcactttcctgtgttcatgaacgagaaggaggacatcctgtggtgtaccgagatggagagagtgttcgggttcccagtccactacacagatgtcagcaacatgtctagactggccagacagagactgctgggaagaagctggtccgtccctgtgatcagacacctgttcgcccctctgaaggagtacttcgcctgcgtgagcagcggcaacagcaacgccaacagccggggccccagcttctctagcggcctggtgccactgtccctgagagggagccacatgggccccatggagatctacaaaaccgtgagcgcctggaagcggcagcctgtgcgcgtgctgagcctgtttcggaatatcgataaagtcctgaaaagcctgggattcctggagagcggctctggctccggcggtggcaccctgaagtacgtggaggatgtgacaaacgtggtcagacgggatgtggagaagtggggccccttcgatctggtgtacggcagcacccaacccctgggcagctcttgtgaccggtgccctggctggtacatgtttcagttccaccggatcctgcagtacgccctgccgagacaggagtcccagcggccattcttttggattttcatggacaacttgctgctgaccgaggatgaccaggaaactaccactcggttcctgcagaccgaagccgtgaccctgcaggacgtgagaggccgggactaccagaacgccatgcgggtgtggtccaacatccctggactgaaaagcaagcacgcacctctgacccctaaagaagaggagtacctgcaggcccaggtgcggagcagaagcaagctggacgcccctaaggtggatctgctggtgaagaattgcctcctgcccctgagagagtacttcaagtatttcagccagaatagtctgcccctgggaggcagcggcggcggcgccctggtgacatttgaggacgtcgccgtgcggttcacccaggaggaatgggctctgctggatccttctcagaaaatcctgtaccgggacgtgatgagagagacataccggaatctgacctccgtgggcatcaactgggaatgttgggaccttgaagcctgcttcagaagcctgggaagaaacctgagagtgcaggtggtgaagagaaagtgcgagctgaccaacagcggcccctgcgccgagggcggcccaagcagcggcgcccctcctcccagcggcggcagcccagccggctccccaacctctaccgaggagggcacctctgagtccgccacccccgagagcggccctggcacctccaccgagcccagcgagggcagcgcacccggcagccctgccggcagccccacctccacagaggagggaaccagcaccgagcccagcgaaggcagcgccccaggcaccagcaccgagcctagtgagcaggagattaaacggatcaacaagatcagaagaagacttgtgaaagacagcaacaccaagaaggccggcaagacaggccccatgaaaaccctgctggttagagtgatgacacccgatctgagagagcggctggaaaacctgagaaagaagcctgaaaatatcccccagcccatcagcaatacatctagagccaacctgaataagctgctgaccgattacaccgaaatgaagaaggcgatcctgcatgtgtactgggaagagttccagaaggaccctgtgggcctgatgagccgggtggcccagcctgccagcaagaagatcgatcagaacaagctgaaacctgagatggacgagaagggcaacctgaccaccgccggctttgcctgctctcagtgtggccagcccctgttcgtgtacaagctggagcaggtgtctgagaagggcaaggcttacaccaactacttcggacggtgcaatgtggccgagcacgaaaagctgatcctgctggcccagctgaagcccgagaaggatagcgacgaagccgtgacatatagcctgggaaagtttgggcagagggccctggatttctacagcattcatgtgaccaaggagtccacccaccccgtgaagcccctggcccagatcgccggaaacagatacgcctccggacctgtgggaaaggccctgagcgacgcatgtatgggcacaatcgcctccttcctgtctaagtaccaggacatcatcatcgaacaccagaaggtggtgaagggcaaccagaagagactggagagcctgcgggagctggccggcaaggaaaacctggaataccctagcgtgaccctgccacctcagcctcacaccaaggagggcgttgatgcctacaacgaagtgatcgcccgggtgcgaatgtgggtgaacctgaacctgtggcagaagctgaagctaagcagagatgatgccaagcctctgctgagactgaagggattcccttcctttcctctggtcgagagacaggccaacgaagtggactggtgggacatggtgtgtaacgtgaagaagctgatcaacgagaaaaaggaggatggcaaggtgttttggcagaatctggctggctacaagagacaggaagccctgagaccatacctgagcagcgaggaagatcggaagaagggaaagaaattcgctcggtaccagctgggcgacctgctgctgcacctggaaaagaagcacggcgaggactggggaaaggtgtacgacgaggcctgggagcggattgacaagaaagtggaaggcctgagcaagcacatcaagctggaagaggaacggagaagcgaggacgcccagagcaaggccgccctgaccgactggctgcgggctaaggccagcttcgtgatcgagggcctgaaggaggccgacaaggacgagttctgcagatgcgagctgaagctgcagaagtggtacggggacctgcggggaaagcccttcgccatcgaagccgagaacagcatcctggacatcagcggcttcagcaagcagtacaactgtgccttcatctggcagaaggacggcgtgaagaagctgaacctgtacctgatcatcaactacttcaagggcggcaagctgcggttcaagaagatcaaacctgaagccttcgaagccaacagattctacaccgtgatcaacaaaaagagcggcgagatcgtgcccatggaggtgaacttcaacttcgacgaccccaacctgatcatcctgcctctggcctttggcaagagacagggcagagaattcatctggaacgacctgctgtccctggaaaccggcagcctgaagctggccaacggaagagtgatcgagaagacactgtacaacagaagaacccggcaggatgagcctgccctgttcgtggccctgaccttcgagcggcgggaggtcctggactcctccaatatcaaaccaatgaacctgatcggcgtggcaagaggcgaaaacatccccgccgtgatcgccctgaccgaccccgagggctgcccactgagccggtttaaggatagcctgggaaacccaacccacatcctgagaatcggcgagagctataaggagaagcagcggaccatccaggccaagaaggaggtggagcagcggagagccggcggctacagccggaagtacgccagcaaagccaagaatctggcagacgatatggtgagaaacaccgctagagatctgctgtactacgccgtgacccaggatgccatgctgatcttcgccaacctgagccggggcttcggccggcagggcaagcggaccttcatggccgagagacagtacacacggatggaggactggctgaccgccaagctggcctacgagggcctgagcaagacctacctgtccaagacactggcccagtacacctccaagacatgcagcaactgtgggtttaccatcaccagcgccgactacgacagggtgctggagaagctgaagaagacagcaacaggctggatgaccacaattaacggcaaggagctgaaggtggagggccagattacctactacaacagatacaagagacagaacgtagtcaaggacctgtccgtcgagctggatagactgagcgaagaatctgtgaacaacgacatctcctcctggacaaagggcagaagcggagaagctctgagcctcctgaagaaaagattctcccatagacccgtgcaggagaagttcgtgtgcctgaactgcggcttcgagacacacgcagccgagcaagccgccctgaacatcgccagatcctggctgttcctgcggagccaggagtacaagaaataccagacaaacaagacaaccggcaacaccgataagagagccttcgtcgagacctggcagtccttttaccggaagaagcttaaggaggtgtggaaacctgccgtgcggtctggcggatctggcggaggctccctgctgaccttcgaggacgtggccgtgagcttcagcgaggaggagtggaagctgctggaccccacccagaagatcctgtacaacgacgtgatgcaggagaactacgagaccgtgatcagcctgggcctgaagctgaagaacgacaccggcaacgaccagcccatcagcctgagcgccctggagatccaggccagcggctgcaaggtgctgaggaaggccaggatgaaggtggcccagaagaccggcggcccaagcagcggcgcccctcctcccagcggcggcagcccagccggctccccaacctctaccgaggagggcacctctgagtccgccacccccgagagcggccctggcacctccaccgagcccagcgagggcagcgcacccggcagccctgccggcagccccacctccacagaggagggaaccagcaccgagcccagcgaaggcagcgccccaggcaccagcaccgagcctagtgagcaggagattaaacggatcaacaagatcagaagaagacttgtgaaagacagcaacaccaagaaggccggcaagacaggccccatgaaaaccctgctggttagagtgatgacacccgatctgagagagcggctggaaaacctgagaaagaagcctgaaaatatcccccagcccatcagcaatacatctagagccaacctgaataagctgctgaccgattacaccgaaatgaagaaggcgatcctgcatgtgtactgggaagagttccagaaggaccctgtgggcctgatgagccgggtggcccagcctgccagcaagaagatcgatcagaacaagctgaaacctgagatggacgagaagggcaacctgaccaccgccggctttgcctgctctcagtgtggccagcccctgttcgtgtacaagctggagcaggtgtctgagaagggcaaggcttacaccaactacttcggacggtgcaatgtggccgagcacgaaaagctgatcctgctggcccagctgaagcccgagaaggatagcgacgaagccgtgacatatagcctgggaaagtttgggcagagggccctggatttctacagcattcatgtgaccaaggagtccacccaccccgtgaagcccctggcccagatcgccggaaacagatacgcctccggacctgtgggaaaggccctgagcgacgcatgtatgggcacaatcgcctccttcctgtctaagtaccaggacatcatcatcgaacaccagaaggtggtgaagggcaaccagaagagactggagagcctgcgggagctggccggcaaggaaaacctggaataccctagcgtgaccctgccacctcagcctcacaccaaggagggcgttgatgcctacaacgaagtgatcgcccgggtgcgaatgtgggtgaacctgaacctgtggcagaagctgaagctaagcagagatgatgccaagcctctgctgagactgaagggattcccttcctttcctctggtcgagagacaggccaacgaagtggactggtgggacatggtgtgtaacgtgaagaagctgatcaacgagaaaaaggaggatggcaaggtgttttggcagaatctggctggctacaagagacaggaagccctgagaccatacctgagcagcgaggaagatcggaagaagggaaagaaattcgctcggtaccagctgggcgacctgctgctgcacctggaaaagaagcacggcgaggactggggaaaggtgtacgacgaggcctgggagcggattgacaagaaagtggaaggcctgagcaagcacatcaagctggaagaggaacggagaagcgaggacgcccagagcaaggccgccctgaccgactggctgcgggctaaggccagcttcgtgatcgagggcctgaaggaggccgacaaggacgagttctgcagatgcgagctgaagctgcagaagtggtacggggacctgcggggaaagcccttcgccatcgaagccgagaacagcatcctggacatcagcggcttcagcaagcagtacaactgtgccttcatctggcagaaggacggcgtgaagaagctgaacctgtacctgatcatcaactacttcaagggcggcaagctgcggttcaagaagatcaaacctgaagccttcgaagccaacagattctacaccgtgatcaacaaaaagagcggcgagatcgtgcccatggaggtgaacttcaacttcgacgaccccaacctgatcatcctgcctctggcctttggcaagagacagggcagagaattcatctggaacgacctgctgtccctggaaaccggcagcctgaagctggccaacggaagagtgatcgagaagacactgtacaacagaagaacccggcaggatgagcctgccctgttcgtggccctgaccttcgagcggcgggaggtcctggactcctccaatatcaaaccaatgaacctgatcggcgtggcaagaggcgaaaacatccccgccgtgatcgccctgaccgaccccgagggctgcccactgagccggtttaaggatagcctgggaaacccaacccacatcctgagaatcggcgagagctataaggagaagcagcggaccatccaggccaagaaggaggtggagcagcggagagccggcggctacagccggaagtacgccagcaaagccaagaatctggcagacgatatggtgagaaacaccgctagagatctgctgtactacgccgtgacccaggatgccatgctgatcttcgccaacctgagccggggcttcggccggcagggcaagcggaccttcatggccgagagacagtacacacggatggaggactggctgaccgccaagctggcctacgagggcctgagcaagacctacctgtccaagacactggcccagtacacctccaagacatgcagcaactgtgggtttaccatcaccagcgccgactacgacagggtgctggagaagctgaagaagacagcaacaggctggatgaccacaattaacggcaaggagctgaaggtggagggccagattacctactacaacagatacaagagacagaacgtagtcaaggacctgtccgtcgagctggatagactgagcgaagaatctgtgaacaacgacatctcctcctggacaaagggcagaagcggagaagctctgagcctcctgaagaaaagattctcccatagacccgtgcaggagaagttcgtgtgcctgaactgcggcttcgagacacacgcagccgagcaagccgccctgaacatcgccagatcctggctgttcctgcggagccaggagtacaagaaataccagacaaacaagacaaccggcaacaccgataagagagccttcgtcgagacctggcagtccttttaccggaagaagcttaaggaggtgtggaaacctgccgtgcggtctggcggatctggcggaggctcctctgctgaccttcgaggacgtggccgtgagcttcagcgaggaggagtggaagctgctggaccccacccagaagatcctgtacaacgacgtgatgcaggagaactacgagaccgtgatcagcctgggcctgaagctgaagaacgacaccggcaacgaccagcccatcagcctgagcgccctggagatccaggccagcggctgcaaggtgctgaggaaggccaggatgaaggtggcccagaagaccggatctggctccggcagcggccccaagaaaaagagaaaagtctaagctgccttctgcggggcttgccttctggccatgcccttcttctctcccttgcacctgtacctcttggtctttgaataaagcctgagtaggaaggctagcaaaaaaaaaaaaaaaaaaaaaaaaaaaaaaaaaaaaaaaaaaaaaaaaaaaaaaaaaaaaaaaaaaaaaaaaaaaaaaaa

SEQ ID NO: 16165 - RNA, 9485 nt, synthetic construct
  source 1..9485: mol_type = other RNA
aggaaataagagagaaaagaagagtaagaagaaatataagagccaccatggcccctaagaagaagcgtaaagtgagccggatggaacgcctcgtctacgaggtgcggcagaagtgcagaaacatcgaggacatctgcatctcctgcggatctctgaacgtgaccctggagcacccactgttcatcggcggcatgtgccagaactgtaaaaactgttttctggagtgtgcctatcaatacgacgatgacggctaccagagctactgcaccatctgttgcggcggaagagaggtgctgatgtgtggaaataacaactgctgccggtgcttctgcgtggaatgcgtggacctgctggtgggccccggcgccgcccaggccgctattaaggaagatccttggaactgctacatgtgcggccacaagggcacatacggcctgctgagacggagagaggactggcctagcagactgcagatgttcttcgccaataaccacgaccaggagttcgacccccctaaggtgtaccctcccgtccccgccgagaagagaaagcccatccgggtcctgagcctgttcgatggcatcgccaccggtctgctggtgctgaaggacctgggcatccaggtggataggtacattgcctccgaggtgtgcgaggactccatcaccgtgggaatggtgcgtcatcagggcaagatcatgtacgtgggcgacgtgcggagcgtgacacagaagcatatccaggagtggggccctttcgacctggtgatcggcggcagcccttgcaatgacctgagcatcgtgaacccagcccggaagggcctgtacgagggaaccggcagactgttcttcgagttttacagactgctgcacgacgcccggcctaaggaaggcgacgaccggcccttcttttggctgttcgagaatgtggtggccatgggagtcagcgacaagcgggatattagccggttcctggagagcaaccccgtgatgatcgatgccaaggaagtgagcgccgcccaccgggccagatacttctggggcaatctgcctggcatgaacagacccctggccagcaccgtgaacgacaagctggagctgcaggagtgcctggagcacggccggatcgccaagttcagcaaggtgagaaccatcaccacccgaagcaacagcatcaaacaaggcaaggaccagcactttcctgtgttcatgaacgagaaggaggacatcctgtggtgtaccgagatggagagagtgttcgggttcccagtccactacacagatgtcagcaacatgtctagactggccagacagagactgctgggaagaagctggtccgtccctgtgatcagacacctgttcgcccctctgaaggagtacttcgcctgcgtgagcagcggcaacagcaacgccaacagccggggccccagcttctctagcggcctggtgccactgtccctgagagggagccacatgggccccatggagatctacaaaaccgtgagcgcctggaagcggcagcctgtgcgcgtgctgagcctgtttcggaatatcgataaagtcctgaaaagcctgggattcctggagagcggctctggctccggcggtggcaccctgaagtacgtggaggatgtgacaaacgtggtcagacgggatgtggagaagtggggccccttcgatctggtgtacggcagcacccaacccctgggcagctcttgtgaccggtgccctggctggtacatgtttcagttccaccggatcctgcagtacgccctgccgagacaggagtcccagcggccattcttttggattttcatggacaacttgctgctgaccgaggatgaccaggaaactaccactcggttcctgcagaccgaagccgtgaccctgcaggacgtgagaggccgggactaccagaacgccatgcgggtgtggtccaacatccctggactgaaaagcaagcacgcacctctgacccctaaagaagaggagtacctgcaggcccaggtgcggagcagaagcaagctggacgcccctaaggtggatctgctggtgaagaattgcctcctgcccctgagagagtacttcaagtatttcagccagaatagtctgcccctgggaggcagcggcggcggcgccctggtgacatttgaggacgtcgccgtgcggttcacccaggaggaatgggctctgctggatccttctcagaaaatcctgtaccgggacgtgatgagagagacataccggaatctgacctccgtgggcatcaactgggaatgttgggaccttgaagcctgcttcagaagcctgggaagaaacctgagagtgcaggtggtgaagagaaagtgcgagctgaccaacagcggcccctgcgccgagggcggcccaagcagcggcgcccctcctcccagcggcggcagcccagccggctccccaacctctaccgaggagggcacctctgagtccgccacccccgagagcggccctggcacctccaccgagcccagcgagggcagcgcacccggcagccctgccggcagccccacctccacagaggagggaaccagcaccgagcccagcgaaggcagcgccccaggcaccagcaccgagcctagtgagcaggagattaaacggatcaacaagatcagaagaagacttgtgaaagacagcaacaccaagaaggccggcaagacaggccccatgaaaaccctgctggttagagtgatgacacccgatctgagagagcggctggaaaacctgagaaagaagcctgaaaatatcccccagcccatcagcaatacatctagagccaacctgaataagctgctgaccgattacaccgaaatgaagaaggcgatcctgcatgtgtactgggaagagttccagaaggaccctgtgggcctgatgagccgggtggcccagcctgccagcaagaagatcgatcagaacaagctgaaacctgagatggacgagaagggcaacctgaccaccgccggctttgcctgctctcagtgtggccagcccctgttcgtgtacaagctggagcaggtgtctgagaagggcaaggcttacaccaactacttcggacggtgcaatgtggccgagcacgaaaagctgatcctgctggcccagctgaagcccgagaaggatagcgacgaagccgtgacatatagcctgggaaagtttgggcagagggccctggatttctacagcattcatgtgaccaaggagtccacccaccccgtgaagcccctggcccagatcgccggaaacagatacgcctccggacctgtgggaaaggccctgagcgacgcatgtatgggcacaatcgcctccttcctgtctaagtaccaggacatcatcatcgaacaccagaaggtggtgaagggcaaccagaagagactggagagcctgcgggagctggccggcaaggaaaacctggaataccctagcgtgaccctgccacctcagcctcacaccaaggagggcgttgatgcctacaacgaagtgatcgcccgggtgcgaatgtgggtgaacctgaacctgtggcagaagctgaagctaagcagagatgatgccaagcctctgctgagactgaagggattcccttcctttcctctggtcgagagacaggccaacgaagtggactggtgggacatggtgtgtaacgtgaagaagctgatcaacgagaaaaaggaggatggcaaggtgttttggcagaatctggctggctacaagagacaggaagccctgagaccatacctgagcagcgaggaagatcggaagaagggaaagaaattcgctcggtaccagctgggcgacctgctgctgcacctggaaaagaagcacggcgaggactggggaaaggtgtacgacgaggcctgggagcggattgacaagaaagtggaaggcctgagcaagcacatcaagctggaagaggaacggagaagcgaggacgcccagagcaaggccgccctgaccgactggctgcgggctaaggccagcttcgtgatcgagggcctgaaggaggccgacaaggacgagttctgcagatgcgagctgaagctgcagaagtggtacggggacctgcggggaaagcccttcgccatcgaagccgagaacagcatcctggacatcagcggcttcagcaagcagtacaactgtgccttcatctggcagaaggacggcgtgaagaagctgaacctgtacctgatcatcaactacttcaagggcggcaagctgcggttcaagaagatcaaacctgaagccttcgaagccaacagattctacaccgtgatcaacaaaaagagcggcgagatcgtgcccatggaggtgaacttcaacttcgacgaccccaacctgatcatcctgcctctggcctttggcaagagacagggcagagaattcatctggaacgacctgctgtccctggaaaccggcagcctgaagctggccaacggaagagtgatcgagaagacactgtacaacagaagaacccggcaggatgagcctgccctgttcgtggccctgaccttcgagcggcgggaggtcctggactcctccaatatcaaaccaatgaacctgatcggcgtggcaagaggcgaaaacatccccgccgtgatcgccctgaccgaccccgagggctgcccactgagccggtttaaggatagcctgggaaacccaacccacatcctgagaatcggcgagagctataaggagaagcagcggaccatccaggccaagaaggaggtggagcagcggagagccggcggctacagccggaagtacgccagcaaagccaagaatctggcagacgatatggtgagaaacaccgctagagatctgctgtactacgccgtgacccaggatgccatgctgatcttcgccaacctgagccggggcttcggccggcagggcaagcggaccttcatggccgagagacagtacacacggatggaggactggctgaccgccaagctggcctacgagggcctgagcaagacctacctgtccaagacactggcccagtacacctccaagacatgcagcaactgtgggtttaccatcaccagcgccgactacgacagggtgctggagaagctgaagaagacagcaacaggctggatgaccacaattaacggcaaggagctgaaggtggagggccagattacctactacaacagatacaagagacagaacgtagtcaaggacctgtccgtcgagctggatagactgagcgaagaatctgtgaacaacgacatctcctcctggacaaagggcagaagcggagaagctctgagcctcctgaagaaaagattctcccatagacccgtgcaggagaagttcgtgtgcctgaactgcggcttcgagacacacgcagccgagcaagccgccctgaacatcgccagatcctggctgttcctgcggagccaggagtacaagaaataccagacaaacaagacaaccggcaacaccgataagagagccttcgtcgagacctggcagtccttttaccggaagaagcttaaggaggtgtggaaacctgccgtgcggtctggcggatctggcggaggctcccaggccagcgtgaccttcagggacgtggccgtggacttcaccggcgaggagtggaggtgcctggagcccgcccagagggccctgtacagggacgtgatgctggagacctacgagaacctggtgttcctgggcctgagcgtgcccatcagcaagctggacctgatcttcctgctggagaggggcggcgccctgagcaggcccatgggcagggtgcccagcgacagctgccccgacagcttcatcggcggcccaagcagcggcgcccctcctcccagcggcggcagcccagccggctccccaacctctaccgaggagggcacctctgagtccgccacccccgagagcggccctggcacctccaccgagcccagcgagggcagcgcacccggcagccctgccggcagccccacctccacagaggagggaaccagcaccgagcccagcgaaggcagcgccccaggcaccagcaccgagcctagtgagcaggagattaaacggatcaacaagatcagaagaagacttgtgaaagacagcaacaccaagaaggccggcaagacaggccccatgaaaaccctgctggttagagtgatgacacccgatctgagagagcggctggaaaacctgagaaagaagcctgaaaatatcccccagcccatcagcaatacatctagagccaacctgaataagctgctgaccgattacaccgaaatgaagaaggcgatcctgcatgtgtactgggaagagttccagaaggaccctgtgggcctgatgagccgggtggcccagcctgccagcaagaagatcgatcagaacaagctgaaacctgagatggacgagaagggcaacctgaccaccgccggctttgcctgctctcagtgtggccagcccctgttcgtgtacaagctggagcaggtgtctgagaagggcaaggcttacaccaactacttcggacggtgcaatgtggccgagcacgaaaagctgatcctgctggcccagctgaagcccgagaaggatagcgacgaagccgtgacatatagcctgggaaagtttgggcagagggccctggatttctacagcattcatgtgaccaaggagtccacccaccccgtgaagcccctggcccagatcgccggaaacagatacgcctccggacctgtgggaaaggccctgagcgacgcatgtatgggcacaatcgcctccttcctgtctaagtaccaggacatcatcatcgaacaccagaaggtggtgaagggcaaccagaagagactggagagcctgcgggagctggccggcaaggaaaacctggaataccctagcgtgaccctgccacctcagcctcacaccaaggagggcgttgatgcctacaacgaagtgatcgcccgggtgcgaatgtgggtgaacctgaacctgtggcagaagctgaagctaagcagagatgatgccaagcctctgctgagactgaagggattcccttcctttcctctggtcgagagacaggccaacgaagtggactggtgggacatggtgtgtaacgtgaagaagctgatcaacgagaaaaaggaggatggcaaggtgttttggcagaatctggctggctacaagagacaggaagccctgagaccatacctgagcagcgaggaagatcggaagaagggaaagaaattcgctcggtaccagctgggcgacctgctgctgcacctggaaaagaagcacggcgaggactggggaaaggtgtacgacgaggcctgggagcggattgacaagaaagtggaaggcctgagcaagcacatcaagctggaagaggaacggagaagcgaggacgcccagagcaaggccgccctgaccgactggctgcgggctaaggccagcttcgtgatcgagggcctgaaggaggccgacaaggacgagttctgcagatgcgagctgaagctgcagaagtggtacggggacctgcggggaaagcccttcgccatcgaagccgagaacagcatcctggacatcagcggcttcagcaagcagtacaactgtgccttcatctggcagaaggacggcgtgaagaagctgaacctgtacctgatcatcaactacttcaagggcggcaagctgcggttcaagaagatcaaacctgaagccttcgaagccaacagattctacaccgtgatcaacaaaaagagcggcgagatcgtgcccatggaggtgaacttcaacttcgacgaccccaacctgatcatcctgcctctggcctttggcaagagacagggcagagaattcatctggaacgacctgctgtccctggaaaccggcagcctgaagctggccaacggaagagtgatcgagaagacactgtacaacagaagaacccggcaggatgagcctgccctgttcgtggccctgaccttcgagcggcgggaggtcctggactcctccaatatcaaaccaatgaacctgatcggcgtggcaagaggcgaaaacatccccgccgtgatcgccctgaccgaccccgagggctgcccactgagccggtttaaggatagcctgggaaacccaacccacatcctgagaatcggcgagagctataaggagaagcagcggaccatccaggccaagaaggaggtggagcagcggagagccggcggctacagccggaagtacgccagcaaagccaagaatctggcagacgatatggtgagaaacaccgctagagatctgctgtactacgccgtgacccaggatgccatgctgatcttcgccaacctgagccggggcttcggccggcagggcaagcggaccttcatggccgagagacagtacacacggatggaggactggctgaccgccaagctggcctacgagggcctgagcaagacctacctgtccaagacactggcccagtacacctccaagacatgcagcaactgtgggtttaccatcaccagcgccgactacgacagggtgctggagaagctgaagaagacagcaacaggctggatgaccacaattaacggcaaggagctgaaggtggagggccagattacctactacaacagatacaagagacagaacgtagtcaaggacctgtccgtcgagctggatagactgagcgaagaatctgtgaacaacgacatctcctcctggacaaagggcagaagcggagaagctctgagcctcctgaagaaaagattctcccatagacccgtgcaggagaagttcgtgtgcctgaactgcggcttcgagacacacgcagccgagcaagccgccctgaacatcgccagatcctggctgttcctgcggagccaggagtacaagaaataccagacaaacaagacaaccggcaacaccgataagagagccttcgtcgagacctggcagtccttttaccggaagaagcttaaggaggtgtggaaacctgccgtgcggtctggcggatctggcggaggctcctcaggccagcgtgaccttcagggacgtggccgtggacttcaccggcgaggagtggaggtgcctggagcccgcccagagggccctgtacagggacgtgatgctggagacctacgagaacctggtgttcctgggcctgagcgtgcccatcagcaagctggacctgatcttcctgctggagaggggcggcgccctgagcaggcccatgggcagggtgcccagcgacagctgccccgacagcttcatcggatctggctccggcagcggccccaagaaaaagagaaaagtctaagctgccttctgcggggcttgccttctggccatgcccttcttctctcccttgcacctgtacctcttggtctttgaataaagcctgagtaggaaggctagcaaaaaaaaaaaaaaaaaaaaaaaaaaaaaaaaaaaaaaaaaaaaaaaaaaaaaaaaaaaaaaaaaaaaaaaaaaaaaaaa

SEQ ID NO: 16166 - RNA, 9485 nt, synthetic construct
  source 1..9485: mol_type = other RNA
aggaaataagagagaaaagaagagtaagaagaaatataagagccaccatggcccctaagaagaagcgtaaagtgagccggatggaacgcctcgtctacgaggtgcggcagaagtgcagaaacatcgaggacatctgcatctcctgcggatctctgaacgtgaccctggagcacccactgttcatcggcggcatgtgccagaactgtaaaaactgttttctggagtgtgcctatcaatacgacgatgacggctaccagagctactgcaccatctgttgcggcggaagagaggtgctgatgtgtggaaataacaactgctgccggtgcttctgcgtggaatgcgtggacctgctggtgggccccggcgccgcccaggccgctattaaggaagatccttggaactgctacatgtgcggccacaagggcacatacggcctgctgagacggagagaggactggcctagcagactgcagatgttcttcgccaataaccacgaccaggagttcgacccccctaaggtgtaccctcccgtccccgccgagaagagaaagcccatccgggtcctgagcctgttcgatggcatcgccaccggtctgctggtgctgaaggacctgggcatccaggtggataggtacattgcctccgaggtgtgcgaggactccatcaccgtgggaatggtgcgtcatcagggcaagatcatgtacgtgggcgacgtgcggagcgtgacacagaagcatatccaggagtggggccctttcgacctggtgatcggcggcagcccttgcaatgacctgagcatcgtgaacccagcccggaagggcctgtacgagggaaccggcagactgttcttcgagttttacagactgctgcacgacgcccggcctaaggaaggcgacgaccggcccttcttttggctgttcgagaatgtggtggccatgggagtcagcgacaagcgggatattagccggttcctggagagcaaccccgtgatgatcgatgccaaggaagtgagcgccgcccaccgggccagatacttctggggcaatctgcctggcatgaacagacccctggccagcaccgtgaacgacaagctggagctgcaggagtgcctggagcacggccggatcgccaagttcagcaaggtgagaaccatcaccacccgaagcaacagcatcaaacaaggcaaggaccagcactttcctgtgttcatgaacgagaaggaggacatcctgtggtgtaccgagatggagagagtgttcgggttcccagtccactacacagatgtcagcaacatgtctagactggccagacagagactgctgggaagaagctggtccgtccctgtgatcagacacctgttcgcccctctgaaggagtacttcgcctgcgtgagcagcggcaacagcaacgccaacagccggggccccagcttctctagcggcctggtgccactgtccctgagagggagccacatgggccccatggagatctacaaaaccgtgagcgcctggaagcggcagcctgtgcgcgtgctgagcctgtttcggaatatcgataaagtcctgaaaagcctgggattcctggagagcggctctggctccggcggtggcaccctgaagtacgtggaggatgtgacaaacgtggtcagacgggatgtggagaagtggggccccttcgatctggtgtacggcagcacccaacccctgggcagctcttgtgaccggtgccctggctggtacatgtttcagttccaccggatcctgcagtacgccctgccgagacaggagtcccagcggccattcttttggattttcatggacaacttgctgctgaccgaggatgaccaggaaactaccactcggttcctgcagaccgaagccgtgaccctgcaggacgtgagaggccgggactaccagaacgccatgcgggtgtggtccaacatccctggactgaaaagcaagcacgcacctctgacccctaaagaagaggagtacctgcaggcccaggtgcggagcagaagcaagctggacgcccctaaggtggatctgctggtgaagaattgcctcctgcccctgagagagtacttcaagtatttcagccagaatagtctgcccctgggaggcagcggcggcggcgccctggtgacatttgaggacgtcgccgtgcggttcacccaggaggaatgggctctgctggatccttctcagaaaatcctgtaccgggacgtgatgagagagacataccggaatctgacctccgtgggcatcaactgggaatgttgggaccttgaagcctgcttcagaagcctgggaagaaacctgagagtgcaggtggtgaagagaaagtgcgagctgaccaacagcggcccctgcgccgagggcggcccaagcagcggcgcccctcctcccagcggcggcagcccagccggctccccaacctctaccgaggagggcacctctgagtccgccacccccgagagcggccctggcacctccaccgagcccagcgagggcagcgcacccggcagccctgccggcagccccacctccacagaggagggaaccagcaccgagcccagcgaaggcagcgccccaggcaccagcaccgagcctagtgagcaggagattaaacggatcaacaagatcagaagaagacttgtgaaagacagcaacaccaagaaggccggcaagacaggccccatgaaaaccctgctggttagagtgatgacacccgatctgagagagcggctggaaaacctgagaaagaagcctgaaaatatcccccagcccatcagcaatacatctagagccaacctgaataagctgctgaccgattacaccgaaatgaagaaggcgatcctgcatgtgtactgggaagagttccagaaggaccctgtgggcctgatgagccgggtggcccagcctgccagcaagaagatcgatcagaacaagctgaaacctgagatggacgagaagggcaacctgaccaccgccggctttgcctgctctcagtgtggccagcccctgttcgtgtacaagctggagcaggtgtctgagaagggcaaggcttacaccaactacttcggacggtgcaatgtggccgagcacgaaaagctgatcctgctggcccagctgaagcccgagaaggatagcgacgaagccgtgacatatagcctgggaaagtttgggcagagggccctggatttctacagcattcatgtgaccaaggagtccacccaccccgtgaagcccctggcccagatcgccggaaacagatacgcctccggacctgtgggaaaggccctgagcgacgcatgtatgggcacaatcgcctccttcctgtctaagtaccaggacatcatcatcgaacaccagaaggtggtgaagggcaaccagaagagactggagagcctgcgggagctggccggcaaggaaaacctggaataccctagcgtgaccctgccacctcagcctcacaccaaggagggcgttgatgcctacaacgaagtgatcgcccgggtgcgaatgtgggtgaacctgaacctgtggcagaagctgaagctaagcagagatgatgccaagcctctgctgagactgaagggattcccttcctttcctctggtcgagagacaggccaacgaagtggactggtgggacatggtgtgtaacgtgaagaagctgatcaacgagaaaaaggaggatggcaaggtgttttggcagaatctggctggctacaagagacaggaagccctgagaccatacctgagcagcgaggaagatcggaagaagggaaagaaattcgctcggtaccagctgggcgacctgctgctgcacctggaaaagaagcacggcgaggactggggaaaggtgtacgacgaggcctgggagcggattgacaagaaagtggaaggcctgagcaagcacatcaagctggaagaggaacggagaagcgaggacgcccagagcaaggccgccctgaccgactggctgcgggctaaggccagcttcgtgatcgagggcctgaaggaggccgacaaggacgagttctgcagatgcgagctgaagctgcagaagtggtacggggacctgcggggaaagcccttcgccatcgaagccgagaacagcatcctggacatcagcggcttcagcaagcagtacaactgtgccttcatctggcagaaggacggcgtgaagaagctgaacctgtacctgatcatcaactacttcaagggcggcaagctgcggttcaagaagatcaaacctgaagccttcgaagccaacagattctacaccgtgatcaacaaaaagagcggcgagatcgtgcccatggaggtgaacttcaacttcgacgaccccaacctgatcatcctgcctctggcctttggcaagagacagggcagagaattcatctggaacgacctgctgtccctggaaaccggcagcctgaagctggccaacggaagagtgatcgagaagacactgtacaacagaagaacccggcaggatgagcctgccctgttcgtggccctgaccttcgagcggcgggaggtcctggactcctccaatatcaaaccaatgaacctgatcggcgtggcaagaggcgaaaacatccccgccgtgatcgccctgaccgaccccgagggctgcccactgagccggtttaaggatagcctgggaaacccaacccacatcctgagaatcggcgagagctataaggagaagcagcggaccatccaggccaagaaggaggtggagcagcggagagccggcggctacagccggaagtacgccagcaaagccaagaatctggcagacgatatggtgagaaacaccgctagagatctgctgtactacgccgtgacccaggatgccatgctgatcttcgccaacctgagccggggcttcggccggcagggcaagcggaccttcatggccgagagacagtacacacggatggaggactggctgaccgccaagctggcctacgagggcctgagcaagacctacctgtccaagacactggcccagtacacctccaagacatgcagcaactgtgggtttaccatcaccagcgccgactacgacagggtgctggagaagctgaagaagacagcaacaggctggatgaccacaattaacggcaaggagctgaaggtggagggccagattacctactacaacagatacaagagacagaacgtagtcaaggacctgtccgtcgagctggatagactgagcgaagaatctgtgaacaacgacatctcctcctggacaaagggcagaagcggagaagctctgagcctcctgaagaaaagattctcccatagacccgtgcaggagaagttcgtgtgcctgaactgcggcttcgagacacacgcagccgagcaagccgccctgaacatcgccagatcctggctgttcctgcggagccaggagtacaagaaataccagacaaacaagacaaccggcaacaccgataagagagccttcgtcgagacctggcagtccttttaccggaagaagcttaaggaggtgtggaaacctgccgtgcggtctggcggatctggcggaggctccatgagcggcccccccggcagcctggagatggagcccctgcagttcagggacgtggccgtggagttcagcctggaggagtggcactgcctggacaccgcccagcagaacctgtacagggacgtgatgctggagaactacaggcacctggtgttcctgggcatcgtggtgagcaagcccgacctgatcacctgcctggagcagggcaagaagcccctgaccatgaagaggcacgagatgatcgccggcggcccaagcagcggcgcccctcctcccagcggcggcagcccagccggctccccaacctctaccgaggagggcacctctgagtccgccacccccgagagcggccctggcacctccaccgagcccagcgagggcagcgcacccggcagccctgccggcagccccacctccacagaggagggaaccagcaccgagcccagcgaaggcagcgccccaggcaccagcaccgagcctagtgagcaggagattaaacggatcaacaagatcagaagaagacttgtgaaagacagcaacaccaagaaggccggcaagacaggccccatgaaaaccctgctggttagagtgatgacacccgatctgagagagcggctggaaaacctgagaaagaagcctgaaaatatcccccagcccatcagcaatacatctagagccaacctgaataagctgctgaccgattacaccgaaatgaagaaggcgatcctgcatgtgtactgggaagagttccagaaggaccctgtgggcctgatgagccgggtggcccagcctgccagcaagaagatcgatcagaacaagctgaaacctgagatggacgagaagggcaacctgaccaccgccggctttgcctgctctcagtgtggccagcccctgttcgtgtacaagctggagcaggtgtctgagaagggcaaggcttacaccaactacttcggacggtgcaatgtggccgagcacgaaaagctgatcctgctggcccagctgaagcccgagaaggatagcgacgaagccgtgacatatagcctgggaaagtttgggcagagggccctggatttctacagcattcatgtgaccaaggagtccacccaccccgtgaagcccctggcccagatcgccggaaacagatacgcctccggacctgtgggaaaggccctgagcgacgcatgtatgggcacaatcgcctccttcctgtctaagtaccaggacatcatcatcgaacaccagaaggtggtgaagggcaaccagaagagactggagagcctgcgggagctggccggcaaggaaaacctggaataccctagcgtgaccctgccacctcagcctcacaccaaggagggcgttgatgcctacaacgaagtgatcgcccgggtgcgaatgtgggtgaacctgaacctgtggcagaagctgaagctaagcagagatgatgccaagcctctgctgagactgaagggattcccttcctttcctctggtcgagagacaggccaacgaagtggactggtgggacatggtgtgtaacgtgaagaagctgatcaacgagaaaaaggaggatggcaaggtgttttggcagaatctggctggctacaagagacaggaagccctgagaccatacctgagcagcgaggaagatcggaagaagggaaagaaattcgctcggtaccagctgggcgacctgctgctgcacctggaaaagaagcacggcgaggactggggaaaggtgtacgacgaggcctgggagcggattgacaagaaagtggaaggcctgagcaagcacatcaagctggaagaggaacggagaagcgaggacgcccagagcaaggccgccctgaccgactggctgcgggctaaggccagcttcgtgatcgagggcctgaaggaggccgacaaggacgagttctgcagatgcgagctgaagctgcagaagtggtacggggacctgcggggaaagcccttcgccatcgaagccgagaacagcatcctggacatcagcggcttcagcaagcagtacaactgtgccttcatctggcagaaggacggcgtgaagaagctgaacctgtacctgatcatcaactacttcaagggcggcaagctgcggttcaagaagatcaaacctgaagccttcgaagccaacagattctacaccgtgatcaacaaaaagagcggcgagatcgtgcccatggaggtgaacttcaacttcgacgaccccaacctgatcatcctgcctctggcctttggcaagagacagggcagagaattcatctggaacgacctgctgtccctggaaaccggcagcctgaagctggccaacggaagagtgatcgagaagacactgtacaacagaagaacccggcaggatgagcctgccctgttcgtggccctgaccttcgagcggcgggaggtcctggactcctccaatatcaaaccaatgaacctgatcggcgtggcaagaggcgaaaacatccccgccgtgatcgccctgaccgaccccgagggctgcccactgagccggtttaaggatagcctgggaaacccaacccacatcctgagaatcggcgagagctataaggagaagcagcggaccatccaggccaagaaggaggtggagcagcggagagccggcggctacagccggaagtacgccagcaaagccaagaatctggcagacgatatggtgagaaacaccgctagagatctgctgtactacgccgtgacccaggatgccatgctgatcttcgccaacctgagccggggcttcggccggcagggcaagcggaccttcatggccgagagacagtacacacggatggaggactggctgaccgccaagctggcctacgagggcctgagcaagacctacctgtccaagacactggcccagtacacctccaagacatgcagcaactgtgggtttaccatcaccagcgccgactacgacagggtgctggagaagctgaagaagacagcaacaggctggatgaccacaattaacggcaaggagctgaaggtggagggccagattacctactacaacagatacaagagacagaacgtagtcaaggacctgtccgtcgagctggatagactgagcgaagaatctgtgaacaacgacatctcctcctggacaaagggcagaagcggagaagctctgagcctcctgaagaaaagattctcccatagacccgtgcaggagaagttcgtgtgcctgaactgcggcttcgagacacacgcagccgagcaagccgccctgaacatcgccagatcctggctgttcctgcggagccaggagtacaagaaataccagacaaacaagacaaccggcaacaccgataagagagccttcgtcgagacctggcagtccttttaccggaagaagcttaaggaggtgtggaaacctgccgtgcggtctggcggatctggcggaggctcctatgagcggcccccccggcagcctggagatggagcccctgcagttcagggacgtggccgtggagttcagcctggaggagtggcactgcctggacaccgcccagcagaacctgtacagggacgtgatgctggagaactacaggcacctggtgttcctgggcatcgtggtgagcaagcccgacctgatcacctgcctggagcagggcaagaagcccctgaccatgaagaggcacgagatgatcgccggatctggctccggcagcggccccaagaaaaagagaaaagtctaagctgccttctgcggggcttgccttctggccatgcccttcttctctcccttgcacctgtacctcttggtctttgaataaagcctgagtaggaaggctagcaaaaaaaaaaaaaaaaaaaaaaaaaaaaaaaaaaaaaaaaaaaaaaaaaaaaaaaaaaaaaaaaaaaaaaaaaaaaaaaa

SEQ ID NO: 16167 - RNA, 9485 nt, synthetic construct
  source 1..9485: mol_type = other RNA
aggaaataagagagaaaagaagagtaagaagaaatataagagccaccatggcccctaagaagaagcgtaaagtgagccggatggaacgcctcgtctacgaggtgcggcagaagtgcagaaacatcgaggacatctgcatctcctgcggatctctgaacgtgaccctggagcacccactgttcatcggcggcatgtgccagaactgtaaaaactgttttctggagtgtgcctatcaatacgacgatgacggctaccagagctactgcaccatctgttgcggcggaagagaggtgctgatgtgtggaaataacaactgctgccggtgcttctgcgtggaatgcgtggacctgctggtgggccccggcgccgcccaggccgctattaaggaagatccttggaactgctacatgtgcggccacaagggcacatacggcctgctgagacggagagaggactggcctagcagactgcagatgttcttcgccaataaccacgaccaggagttcgacccccctaaggtgtaccctcccgtccccgccgagaagagaaagcccatccgggtcctgagcctgttcgatggcatcgccaccggtctgctggtgctgaaggacctgggcatccaggtggataggtacattgcctccgaggtgtgcgaggactccatcaccgtgggaatggtgcgtcatcagggcaagatcatgtacgtgggcgacgtgcggagcgtgacacagaagcatatccaggagtggggccctttcgacctggtgatcggcggcagcccttgcaatgacctgagcatcgtgaacccagcccggaagggcctgtacgagggaaccggcagactgttcttcgagttttacagactgctgcacgacgcccggcctaaggaaggcgacgaccggcccttcttttggctgttcgagaatgtggtggccatgggagtcagcgacaagcgggatattagccggttcctggagagcaaccccgtgatgatcgatgccaaggaagtgagcgccgcccaccgggccagatacttctggggcaatctgcctggcatgaacagacccctggccagcaccgtgaacgacaagctggagctgcaggagtgcctggagcacggccggatcgccaagttcagcaaggtgagaaccatcaccacccgaagcaacagcatcaaacaaggcaaggaccagcactttcctgtgttcatgaacgagaaggaggacatcctgtggtgtaccgagatggagagagtgttcgggttcccagtccactacacagatgtcagcaacatgtctagactggccagacagagactgctgggaagaagctggtccgtccctgtgatcagacacctgttcgcccctctgaaggagtacttcgcctgcgtgagcagcggcaacagcaacgccaacagccggggccccagcttctctagcggcctggtgccactgtccctgagagggagccacatgggccccatggagatctacaaaaccgtgagcgcctggaagcggcagcctgtgcgcgtgctgagcctgtttcggaatatcgataaagtcctgaaaagcctgggattcctggagagcggctctggctccggcggtggcaccctgaagtacgtggaggatgtgacaaacgtggtcagacgggatgtggagaagtggggccccttcgatctggtgtacggcagcacccaacccctgggcagctcttgtgaccggtgccctggctggtacatgtttcagttccaccggatcctgcagtacgccctgccgagacaggagtcccagcggccattcttttggattttcatggacaacttgctgctgaccgaggatgaccaggaaactaccactcggttcctgcagaccgaagccgtgaccctgcaggacgtgagaggccgggactaccagaacgccatgcgggtgtggtccaacatccctggactgaaaagcaagcacgcacctctgacccctaaagaagaggagtacctgcaggcccaggtgcggagcagaagcaagctggacgcccctaaggtggatctgctggtgaagaattgcctcctgcccctgagagagtacttcaagtatttcagccagaatagtctgcccctgggaggcagcggcggcggcgccctggtgacatttgaggacgtcgccgtgcggttcacccaggaggaatgggctctgctggatccttctcagaaaatcctgtaccgggacgtgatgagagagacataccggaatctgacctccgtgggcatcaactgggaatgttgggaccttgaagcctgcttcagaagcctgggaagaaacctgagagtgcaggtggtgaagagaaagtgcgagctgaccaacagcggcccctgcgccgagggcggcccaagcagcggcgcccctcctcccagcggcggcagcccagccggctccccaacctctaccgaggagggcacctctgagtccgccacccccgagagcggccctggcacctccaccgagcccagcgagggcagcgcacccggcagccctgccggcagccccacctccacagaggagggaaccagcaccgagcccagcgaaggcagcgccccaggcaccagcaccgagcctagtgagcaggagattaaacggatcaacaagatcagaagaagacttgtgaaagacagcaacaccaagaaggccggcaagacaggccccatgaaaaccctgctggttagagtgatgacacccgatctgagagagcggctggaaaacctgagaaagaagcctgaaaatatcccccagcccatcagcaatacatctagagccaacctgaataagctgctgaccgattacaccgaaatgaagaaggcgatcctgcatgtgtactgggaagagttccagaaggaccctgtgggcctgatgagccgggtggcccagcctgccagcaagaagatcgatcagaacaagctgaaacctgagatggacgagaagggcaacctgaccaccgccggctttgcctgctctcagtgtggccagcccctgttcgtgtacaagctggagcaggtgtctgagaagggcaaggcttacaccaactacttcggacggtgcaatgtggccgagcacgaaaagctgatcctgctggcccagctgaagcccgagaaggatagcgacgaagccgtgacatatagcctgggaaagtttgggcagagggccctggatttctacagcattcatgtgaccaaggagtccacccaccccgtgaagcccctggcccagatcgccggaaacagatacgcctccggacctgtgggaaaggccctgagcgacgcatgtatgggcacaatcgcctccttcctgtctaagtaccaggacatcatcatcgaacaccagaaggtggtgaagggcaaccagaagagactggagagcctgcgggagctggccggcaaggaaaacctggaataccctagcgtgaccctgccacctcagcctcacaccaaggagggcgttgatgcctacaacgaagtgatcgcccgggtgcgaatgtgggtgaacctgaacctgtggcagaagctgaagctaagcagagatgatgccaagcctctgctgagactgaagggattcccttcctttcctctggtcgagagacaggccaacgaagtggactggtgggacatggtgtgtaacgtgaagaagctgatcaacgagaaaaaggaggatggcaaggtgttttggcagaatctggctggctacaagagacaggaagccctgagaccatacctgagcagcgaggaagatcggaagaagggaaagaaattcgctcggtaccagctgggcgacctgctgctgcacctggaaaagaagcacggcgaggactggggaaaggtgtacgacgaggcctgggagcggattgacaagaaagtggaaggcctgagcaagcacatcaagctggaagaggaacggagaagcgaggacgcccagagcaaggccgccctgaccgactggctgcgggctaaggccagcttcgtgatcgagggcctgaaggaggccgacaaggacgagttctgcagatgcgagctgaagctgcagaagtggtacggggacctgcggggaaagcccttcgccatcgaagccgagaacagcatcctggacatcagcggcttcagcaagcagtacaactgtgccttcatctggcagaaggacggcgtgaagaagctgaacctgtacctgatcatcaactacttcaagggcggcaagctgcggttcaagaagatcaaacctgaagccttcgaagccaacagattctacaccgtgatcaacaaaaagagcggcgagatcgtgcccatggaggtgaacttcaacttcgacgaccccaacctgatcatcctgcctctggcctttggcaagagacagggcagagaattcatctggaacgacctgctgtccctggaaaccggcagcctgaagctggccaacggaagagtgatcgagaagacactgtacaacagaagaacccggcaggatgagcctgccctgttcgtggccctgaccttcgagcggcgggaggtcctggactcctccaatatcaaaccaatgaacctgatcggcgtggcaagaggcgaaaacatccccgccgtgatcgccctgaccgaccccgagggctgcccactgagccggtttaaggatagcctgggaaacccaacccacatcctgagaatcggcgagagctataaggagaagcagcggaccatccaggccaagaaggaggtggagcagcggagagccggcggctacagccggaagtacgccagcaaagccaagaatctggcagacgatatggtgagaaacaccgctagagatctgctgtactacgccgtgacccaggatgccatgctgatcttcgccaacctgagccggggcttcggccggcagggcaagcggaccttcatggccgagagacagtacacacggatggaggactggctgaccgccaagctggcctacgagggcctgagcaagacctacctgtccaagacactggcccagtacacctccaagacatgcagcaactgtgggtttaccatcaccagcgccgactacgacagggtgctggagaagctgaagaagacagcaacaggctggatgaccacaattaacggcaaggagctgaaggtggagggccagattacctactacaacagatacaagagacagaacgtagtcaaggacctgtccgtcgagctggatagactgagcgaagaatctgtgaacaacgacatctcctcctggacaaagggcagaagcggagaagctctgagcctcctgaagaaaagattctcccatagacccgtgcaggagaagttcgtgtgcctgaactgcggcttcgagacacacgcagccgagcaagccgccctgaacatcgccagatcctggctgttcctgcggagccaggagtacaagaaataccagacaaacaagacaaccggcaacaccgataagagagccttcgtcgagacctggcagtccttttaccggaagaagcttaaggaggtgtggaaacctgccgtgcggtctggcggatctggcggaggctcccccgagaccgtggtgagcttcgaggacgtggccgtgaggttcagccccgacgagtggcacctgctggacgacggccagaggaggctgtacagggacgtgctgagggagaactacagccacgtgaggagcctgggcttccccgtgcccgacctggccgtgatcttcaggatggagaggggcgaggagccctggccccccggcctgcccgccggcgagtggccctggggccagggccaggcccccggcggcccaagcagcggcgcccctcctcccagcggcggcagcccagccggctccccaacctctaccgaggagggcacctctgagtccgccacccccgagagcggccctggcacctccaccgagcccagcgagggcagcgcacccggcagccctgccggcagccccacctccacagaggagggaaccagcaccgagcccagcgaaggcagcgccccaggcaccagcaccgagcctagtgagcaggagattaaacggatcaacaagatcagaagaagacttgtgaaagacagcaacaccaagaaggccggcaagacaggccccatgaaaaccctgctggttagagtgatgacacccgatctgagagagcggctggaaaacctgagaaagaagcctgaaaatatcccccagcccatcagcaatacatctagagccaacctgaataagctgctgaccgattacaccgaaatgaagaaggcgatcctgcatgtgtactgggaagagttccagaaggaccctgtgggcctgatgagccgggtggcccagcctgccagcaagaagatcgatcagaacaagctgaaacctgagatggacgagaagggcaacctgaccaccgccggctttgcctgctctcagtgtggccagcccctgttcgtgtacaagctggagcaggtgtctgagaagggcaaggcttacaccaactacttcggacggtgcaatgtggccgagcacgaaaagctgatcctgctggcccagctgaagcccgagaaggatagcgacgaagccgtgacatatagcctgggaaagtttgggcagagggccctggatttctacagcattcatgtgaccaaggagtccacccaccccgtgaagcccctggcccagatcgccggaaacagatacgcctccggacctgtgggaaaggccctgagcgacgcatgtatgggcacaatcgcctccttcctgtctaagtaccaggacatcatcatcgaacaccagaaggtggtgaagggcaaccagaagagactggagagcctgcgggagctggccggcaaggaaaacctggaataccctagcgtgaccctgccacctcagcctcacaccaaggagggcgttgatgcctacaacgaagtgatcgcccgggtgcgaatgtgggtgaacctgaacctgtggcagaagctgaagctaagcagagatgatgccaagcctctgctgagactgaagggattcccttcctttcctctggtcgagagacaggccaacgaagtggactggtgggacatggtgtgtaacgtgaagaagctgatcaacgagaaaaaggaggatggcaaggtgttttggcagaatctggctggctacaagagacaggaagccctgagaccatacctgagcagcgaggaagatcggaagaagggaaagaaattcgctcggtaccagctgggcgacctgctgctgcacctggaaaagaagcacggcgaggactggggaaaggtgtacgacgaggcctgggagcggattgacaagaaagtggaaggcctgagcaagcacatcaagctggaagaggaacggagaagcgaggacgcccagagcaaggccgccctgaccgactggctgcgggctaaggccagcttcgtgatcgagggcctgaaggaggccgacaaggacgagttctgcagatgcgagctgaagctgcagaagtggtacggggacctgcggggaaagcccttcgccatcgaagccgagaacagcatcctggacatcagcggcttcagcaagcagtacaactgtgccttcatctggcagaaggacggcgtgaagaagctgaacctgtacctgatcatcaactacttcaagggcggcaagctgcggttcaagaagatcaaacctgaagccttcgaagccaacagattctacaccgtgatcaacaaaaagagcggcgagatcgtgcccatggaggtgaacttcaacttcgacgaccccaacctgatcatcctgcctctggcctttggcaagagacagggcagagaattcatctggaacgacctgctgtccctggaaaccggcagcctgaagctggccaacggaagagtgatcgagaagacactgtacaacagaagaacccggcaggatgagcctgccctgttcgtggccctgaccttcgagcggcgggaggtcctggactcctccaatatcaaaccaatgaacctgatcggcgtggcaagaggcgaaaacatccccgccgtgatcgccctgaccgaccccgagggctgcccactgagccggtttaaggatagcctgggaaacccaacccacatcctgagaatcggcgagagctataaggagaagcagcggaccatccaggccaagaaggaggtggagcagcggagagccggcggctacagccggaagtacgccagcaaagccaagaatctggcagacgatatggtgagaaacaccgctagagatctgctgtactacgccgtgacccaggatgccatgctgatcttcgccaacctgagccggggcttcggccggcagggcaagcggaccttcatggccgagagacagtacacacggatggaggactggctgaccgccaagctggcctacgagggcctgagcaagacctacctgtccaagacactggcccagtacacctccaagacatgcagcaactgtgggtttaccatcaccagcgccgactacgacagggtgctggagaagctgaagaagacagcaacaggctggatgaccacaattaacggcaaggagctgaaggtggagggccagattacctactacaacagatacaagagacagaacgtagtcaaggacctgtccgtcgagctggatagactgagcgaagaatctgtgaacaacgacatctcctcctggacaaagggcagaagcggagaagctctgagcctcctgaagaaaagattctcccatagacccgtgcaggagaagttcgtgtgcctgaactgcggcttcgagacacacgcagccgagcaagccgccctgaacatcgccagatcctggctgttcctgcggagccaggagtacaagaaataccagacaaacaagacaaccggcaacaccgataagagagccttcgtcgagacctggcagtccttttaccggaagaagcttaaggaggtgtggaaacctgccgtgcggtctggcggatctggcggaggctcctcccgagaccgtggtgagcttcgaggacgtggccgtgaggttcagccccgacgagtggcacctgctggacgacggccagaggaggctgtacagggacgtgctgagggagaactacagccacgtgaggagcctgggcttccccgtgcccgacctggccgtgatcttcaggatggagaggggcgaggagccctggccccccggcctgcccgccggcgagtggccctggggccagggccaggcccccggatctggctccggcagcggccccaagaaaaagagaaaagtctaagctgccttctgcggggcttgccttctggccatgcccttcttctctcccttgcacctgtacctcttggtctttgaataaagcctgagtaggaaggctagcaaaaaaaaaaaaaaaaaaaaaaaaaaaaaaaaaaaaaaaaaaaaaaaaaaaaaaaaaaaaaaaaaaaaaaaaaaaaaaaa

SEQ ID NO: 16168 - RNA, 9485 nt, synthetic construct
  source 1..9485: mol_type = other RNA
aggaaataagagagaaaagaagagtaagaagaaatataagagccaccatggcccctaagaagaagcgtaaagtgagccggatggaacgcctcgtctacgaggtgcggcagaagtgcagaaacatcgaggacatctgcatctcctgcggatctctgaacgtgaccctggagcacccactgttcatcggcggcatgtgccagaactgtaaaaactgttttctggagtgtgcctatcaatacgacgatgacggctaccagagctactgcaccatctgttgcggcggaagagaggtgctgatgtgtggaaataacaactgctgccggtgcttctgcgtggaatgcgtggacctgctggtgggccccggcgccgcccaggccgctattaaggaagatccttggaactgctacatgtgcggccacaagggcacatacggcctgctgagacggagagaggactggcctagcagactgcagatgttcttcgccaataaccacgaccaggagttcgacccccctaaggtgtaccctcccgtccccgccgagaagagaaagcccatccgggtcctgagcctgttcgatggcatcgccaccggtctgctggtgctgaaggacctgggcatccaggtggataggtacattgcctccgaggtgtgcgaggactccatcaccgtgggaatggtgcgtcatcagggcaagatcatgtacgtgggcgacgtgcggagcgtgacacagaagcatatccaggagtggggccctttcgacctggtgatcggcggcagcccttgcaatgacctgagcatcgtgaacccagcccggaagggcctgtacgagggaaccggcagactgttcttcgagttttacagactgctgcacgacgcccggcctaaggaaggcgacgaccggcccttcttttggctgttcgagaatgtggtggccatgggagtcagcgacaagcgggatattagccggttcctggagagcaaccccgtgatgatcgatgccaaggaagtgagcgccgcccaccgggccagatacttctggggcaatctgcctggcatgaacagacccctggccagcaccgtgaacgacaagctggagctgcaggagtgcctggagcacggccggatcgccaagttcagcaaggtgagaaccatcaccacccgaagcaacagcatcaaacaaggcaaggaccagcactttcctgtgttcatgaacgagaaggaggacatcctgtggtgtaccgagatggagagagtgttcgggttcccagtccactacacagatgtcagcaacatgtctagactggccagacagagactgctgggaagaagctggtccgtccctgtgatcagacacctgttcgcccctctgaaggagtacttcgcctgcgtgagcagcggcaacagcaacgccaacagccggggccccagcttctctagcggcctggtgccactgtccctgagagggagccacatgggccccatggagatctacaaaaccgtgagcgcctggaagcggcagcctgtgcgcgtgctgagcctgtttcggaatatcgataaagtcctgaaaagcctgggattcctggagagcggctctggctccggcggtggcaccctgaagtacgtggaggatgtgacaaacgtggtcagacgggatgtggagaagtggggccccttcgatctggtgtacggcagcacccaacccctgggcagctcttgtgaccggtgccctggctggtacatgtttcagttccaccggatcctgcagtacgccctgccgagacaggagtcccagcggccattcttttggattttcatggacaacttgctgctgaccgaggatgaccaggaaactaccactcggttcctgcagaccgaagccgtgaccctgcaggacgtgagaggccgggactaccagaacgccatgcgggtgtggtccaacatccctggactgaaaagcaagcacgcacctctgacccctaaagaagaggagtacctgcaggcccaggtgcggagcagaagcaagctggacgcccctaaggtggatctgctggtgaagaattgcctcctgcccctgagagagtacttcaagtatttcagccagaatagtctgcccctgggaggcagcggcggcggcgccctggtgacatttgaggacgtcgccgtgcggttcacccaggaggaatgggctctgctggatccttctcagaaaatcctgtaccgggacgtgatgagagagacataccggaatctgacctccgtgggcatcaactgggaatgttgggaccttgaagcctgcttcagaagcctgggaagaaacctgagagtgcaggtggtgaagagaaagtgcgagctgaccaacagcggcccctgcgccgagggcggcccaagcagcggcgcccctcctcccagcggcggcagcccagccggctccccaacctctaccgaggagggcacctctgagtccgccacccccgagagcggccctggcacctccaccgagcccagcgagggcagcgcacccggcagccctgccggcagccccacctccacagaggagggaaccagcaccgagcccagcgaaggcagcgccccaggcaccagcaccgagcctagtgagcaggagattaaacggatcaacaagatcagaagaagacttgtgaaagacagcaacaccaagaaggccggcaagacaggccccatgaaaaccctgctggttagagtgatgacacccgatctgagagagcggctggaaaacctgagaaagaagcctgaaaatatcccccagcccatcagcaatacatctagagccaacctgaataagctgctgaccgattacaccgaaatgaagaaggcgatcctgcatgtgtactgggaagagttccagaaggaccctgtgggcctgatgagccgggtggcccagcctgccagcaagaagatcgatcagaacaagctgaaacctgagatggacgagaagggcaacctgaccaccgccggctttgcctgctctcagtgtggccagcccctgttcgtgtacaagctggagcaggtgtctgagaagggcaaggcttacaccaactacttcggacggtgcaatgtggccgagcacgaaaagctgatcctgctggcccagctgaagcccgagaaggatagcgacgaagccgtgacatatagcctgggaaagtttgggcagagggccctggatttctacagcattcatgtgaccaaggagtccacccaccccgtgaagcccctggcccagatcgccggaaacagatacgcctccggacctgtgggaaaggccctgagcgacgcatgtatgggcacaatcgcctccttcctgtctaagtaccaggacatcatcatcgaacaccagaaggtggtgaagggcaaccagaagagactggagagcctgcgggagctggccggcaaggaaaacctggaataccctagcgtgaccctgccacctcagcctcacaccaaggagggcgttgatgcctacaacgaagtgatcgcccgggtgcgaatgtgggtgaacctgaacctgtggcagaagctgaagctaagcagagatgatgccaagcctctgctgagactgaagggattcccttcctttcctctggtcgagagacaggccaacgaagtggactggtgggacatggtgtgtaacgtgaagaagctgatcaacgagaaaaaggaggatggcaaggtgttttggcagaatctggctggctacaagagacaggaagccctgagaccatacctgagcagcgaggaagatcggaagaagggaaagaaattcgctcggtaccagctgggcgacctgctgctgcacctggaaaagaagcacggcgaggactggggaaaggtgtacgacgaggcctgggagcggattgacaagaaagtggaaggcctgagcaagcacatcaagctggaagaggaacggagaagcgaggacgcccagagcaaggccgccctgaccgactggctgcgggctaaggccagcttcgtgatcgagggcctgaaggaggccgacaaggacgagttctgcagatgcgagctgaagctgcagaagtggtacggggacctgcggggaaagcccttcgccatcgaagccgagaacagcatcctggacatcagcggcttcagcaagcagtacaactgtgccttcatctggcagaaggacggcgtgaagaagctgaacctgtacctgatcatcaactacttcaagggcggcaagctgcggttcaagaagatcaaacctgaagccttcgaagccaacagattctacaccgtgatcaacaaaaagagcggcgagatcgtgcccatggaggtgaacttcaacttcgacgaccccaacctgatcatcctgcctctggcctttggcaagagacagggcagagaattcatctggaacgacctgctgtccctggaaaccggcagcctgaagctggccaacggaagagtgatcgagaagacactgtacaacagaagaacccggcaggatgagcctgccctgttcgtggccctgaccttcgagcggcgggaggtcctggactcctccaatatcaaaccaatgaacctgatcggcgtggcaagaggcgaaaacatccccgccgtgatcgccctgaccgaccccgagggctgcccactgagccggtttaaggatagcctgggaaacccaacccacatcctgagaatcggcgagagctataaggagaagcagcggaccatccaggccaagaaggaggtggagcagcggagagccggcggctacagccggaagtacgccagcaaagccaagaatctggcagacgatatggtgagaaacaccgctagagatctgctgtactacgccgtgacccaggatgccatgctgatcttcgccaacctgagccggggcttcggccggcagggcaagcggaccttcatggccgagagacagtacacacggatggaggactggctgaccgccaagctggcctacgagggcctgagcaagacctacctgtccaagacactggcccagtacacctccaagacatgcagcaactgtgggtttaccatcaccagcgccgactacgacagggtgctggagaagctgaagaagacagcaacaggctggatgaccacaattaacggcaaggagctgaaggtggagggccagattacctactacaacagatacaagagacagaacgtagtcaaggacctgtccgtcgagctggatagactgagcgaagaatctgtgaacaacgacatctcctcctggacaaagggcagaagcggagaagctctgagcctcctgaagaaaagattctcccatagacccgtgcaggagaagttcgtgtgcctgaactgcggcttcgagacacacgcagccgagcaagccgccctgaacatcgccagatcctggctgttcctgcggagccaggagtacaagaaataccagacaaacaagacaaccggcaacaccgataagagagccttcgtcgagacctggcagtccttttaccggaagaagcttaaggaggtgtggaaacctgccgtgcggtctggcggatctggcggaggctccctgcagggcctgctgaccttcagggacgtggccatcgagttcagcgaggaggagtggggctgcctgacccacacccagaggcagctgtacagggacgtgatgctggagaactacggccacctgcacttcctgggcctgctgctgagcaagcccgacctgatcatgttcctggagcaggagaagcagctgtgggacgtgaagaggaaggagagcaggggcttcagccccgagagccagtgcctgggcggcccaagcagcggcgcccctcctcccagcggcggcagcccagccggctccccaacctctaccgaggagggcacctctgagtccgccacccccgagagcggccctggcacctccaccgagcccagcgagggcagcgcacccggcagccctgccggcagccccacctccacagaggagggaaccagcaccgagcccagcgaaggcagcgccccaggcaccagcaccgagcctagtgagcaggagattaaacggatcaacaagatcagaagaagacttgtgaaagacagcaacaccaagaaggccggcaagacaggccccatgaaaaccctgctggttagagtgatgacacccgatctgagagagcggctggaaaacctgagaaagaagcctgaaaatatcccccagcccatcagcaatacatctagagccaacctgaataagctgctgaccgattacaccgaaatgaagaaggcgatcctgcatgtgtactgggaagagttccagaaggaccctgtgggcctgatgagccgggtggcccagcctgccagcaagaagatcgatcagaacaagctgaaacctgagatggacgagaagggcaacctgaccaccgccggctttgcctgctctcagtgtggccagcccctgttcgtgtacaagctggagcaggtgtctgagaagggcaaggcttacaccaactacttcggacggtgcaatgtggccgagcacgaaaagctgatcctgctggcccagctgaagcccgagaaggatagcgacgaagccgtgacatatagcctgggaaagtttgggcagagggccctggatttctacagcattcatgtgaccaaggagtccacccaccccgtgaagcccctggcccagatcgccggaaacagatacgcctccggacctgtgggaaaggccctgagcgacgcatgtatgggcacaatcgcctccttcctgtctaagtaccaggacatcatcatcgaacaccagaaggtggtgaagggcaaccagaagagactggagagcctgcgggagctggccggcaaggaaaacctggaataccctagcgtgaccctgccacctcagcctcacaccaaggagggcgttgatgcctacaacgaagtgatcgcccgggtgcgaatgtgggtgaacctgaacctgtggcagaagctgaagctaagcagagatgatgccaagcctctgctgagactgaagggattcccttcctttcctctggtcgagagacaggccaacgaagtggactggtgggacatggtgtgtaacgtgaagaagctgatcaacgagaaaaaggaggatggcaaggtgttttggcagaatctggctggctacaagagacaggaagccctgagaccatacctgagcagcgaggaagatcggaagaagggaaagaaattcgctcggtaccagctgggcgacctgctgctgcacctggaaaagaagcacggcgaggactggggaaaggtgtacgacgaggcctgggagcggattgacaagaaagtggaaggcctgagcaagcacatcaagctggaagaggaacggagaagcgaggacgcccagagcaaggccgccctgaccgactggctgcgggctaaggccagcttcgtgatcgagggcctgaaggaggccgacaaggacgagttctgcagatgcgagctgaagctgcagaagtggtacggggacctgcggggaaagcccttcgccatcgaagccgagaacagcatcctggacatcagcggcttcagcaagcagtacaactgtgccttcatctggcagaaggacggcgtgaagaagctgaacctgtacctgatcatcaactacttcaagggcggcaagctgcggttcaagaagatcaaacctgaagccttcgaagccaacagattctacaccgtgatcaacaaaaagagcggcgagatcgtgcccatggaggtgaacttcaacttcgacgaccccaacctgatcatcctgcctctggcctttggcaagagacagggcagagaattcatctggaacgacctgctgtccctggaaaccggcagcctgaagctggccaacggaagagtgatcgagaagacactgtacaacagaagaacccggcaggatgagcctgccctgttcgtggccctgaccttcgagcggcgggaggtcctggactcctccaatatcaaaccaatgaacctgatcggcgtggcaagaggcgaaaacatccccgccgtgatcgccctgaccgaccccgagggctgcccactgagccggtttaaggatagcctgggaaacccaacccacatcctgagaatcggcgagagctataaggagaagcagcggaccatccaggccaagaaggaggtggagcagcggagagccggcggctacagccggaagtacgccagcaaagccaagaatctggcagacgatatggtgagaaacaccgctagagatctgctgtactacgccgtgacccaggatgccatgctgatcttcgccaacctgagccggggcttcggccggcagggcaagcggaccttcatggccgagagacagtacacacggatggaggactggctgaccgccaagctggcctacgagggcctgagcaagacctacctgtccaagacactggcccagtacacctccaagacatgcagcaactgtgggtttaccatcaccagcgccgactacgacagggtgctggagaagctgaagaagacagcaacaggctggatgaccacaattaacggcaaggagctgaaggtggagggccagattacctactacaacagatacaagagacagaacgtagtcaaggacctgtccgtcgagctggatagactgagcgaagaatctgtgaacaacgacatctcctcctggacaaagggcagaagcggagaagctctgagcctcctgaagaaaagattctcccatagacccgtgcaggagaagttcgtgtgcctgaactgcggcttcgagacacacgcagccgagcaagccgccctgaacatcgccagatcctggctgttcctgcggagccaggagtacaagaaataccagacaaacaagacaaccggcaacaccgataagagagccttcgtcgagacctggcagtccttttaccggaagaagcttaaggaggtgtggaaacctgccgtgcggtctggcggatctggcggaggctcctctgcagggcctgctgaccttcagggacgtggccatcgagttcagcgaggaggagtggggctgcctgacccacacccagaggcagctgtacagggacgtgatgctggagaactacggccacctgcacttcctgggcctgctgctgagcaagcccgacctgatcatgttcctggagcaggagaagcagctgtgggacgtgaagaggaaggagagcaggggcttcagccccgagagccagtgcctgggatctggctccggcagcggccccaagaaaaagagaaaagtctaagctgccttctgcggggcttgccttctggccatgcccttcttctctcccttgcacctgtacctcttggtctttgaataaagcctgagtaggaaggctagcaaaaaaaaaaaaaaaaaaaaaaaaaaaaaaaaaaaaaaaaaaaaaaaaaaaaaaaaaaaaaaaaaaaaaaaaaaaaaaaa

SEQ ID NO: 16169 - RNA, 9485 nt, synthetic construct
  source 1..9485: mol_type = other RNA
aggaaataagagagaaaagaagagtaagaagaaatataagagccaccatggcccctaagaagaagcgtaaagtgagccggatggaacgcctcgtctacgaggtgcggcagaagtgcagaaacatcgaggacatctgcatctcctgcggatctctgaacgtgaccctggagcacccactgttcatcggcggcatgtgccagaactgtaaaaactgttttctggagtgtgcctatcaatacgacgatgacggctaccagagctactgcaccatctgttgcggcggaagagaggtgctgatgtgtggaaataacaactgctgccggtgcttctgcgtggaatgcgtggacctgctggtgggccccggcgccgcccaggccgctattaaggaagatccttggaactgctacatgtgcggccacaagggcacatacggcctgctgagacggagagaggactggcctagcagactgcagatgttcttcgccaataaccacgaccaggagttcgacccccctaaggtgtaccctcccgtccccgccgagaagagaaagcccatccgggtcctgagcctgttcgatggcatcgccaccggtctgctggtgctgaaggacctgggcatccaggtggataggtacattgcctccgaggtgtgcgaggactccatcaccgtgggaatggtgcgtcatcagggcaagatcatgtacgtgggcgacgtgcggagcgtgacacagaagcatatccaggagtggggccctttcgacctggtgatcggcggcagcccttgcaatgacctgagcatcgtgaacccagcccggaagggcctgtacgagggaaccggcagactgttcttcgagttttacagactgctgcacgacgcccggcctaaggaaggcgacgaccggcccttcttttggctgttcgagaatgtggtggccatgggagtcagcgacaagcgggatattagccggttcctggagagcaaccccgtgatgatcgatgccaaggaagtgagcgccgcccaccgggccagatacttctggggcaatctgcctggcatgaacagacccctggccagcaccgtgaacgacaagctggagctgcaggagtgcctggagcacggccggatcgccaagttcagcaaggtgagaaccatcaccacccgaagcaacagcatcaaacaaggcaaggaccagcactttcctgtgttcatgaacgagaaggaggacatcctgtggtgtaccgagatggagagagtgttcgggttcccagtccactacacagatgtcagcaacatgtctagactggccagacagagactgctgggaagaagctggtccgtccctgtgatcagacacctgttcgcccctctgaaggagtacttcgcctgcgtgagcagcggcaacagcaacgccaacagccggggccccagcttctctagcggcctggtgccactgtccctgagagggagccacatgggccccatggagatctacaaaaccgtgagcgcctggaagcggcagcctgtgcgcgtgctgagcctgtttcggaatatcgataaagtcctgaaaagcctgggattcctggagagcggctctggctccggcggtggcaccctgaagtacgtggaggatgtgacaaacgtggtcagacgggatgtggagaagtggggccccttcgatctggtgtacggcagcacccaacccctgggcagctcttgtgaccggtgccctggctggtacatgtttcagttccaccggatcctgcagtacgccctgccgagacaggagtcccagcggccattcttttggattttcatggacaacttgctgctgaccgaggatgaccaggaaactaccactcggttcctgcagaccgaagccgtgaccctgcaggacgtgagaggccgggactaccagaacgccatgcgggtgtggtccaacatccctggactgaaaagcaagcacgcacctctgacccctaaagaagaggagtacctgcaggcccaggtgcggagcagaagcaagctggacgcccctaaggtggatctgctggtgaagaattgcctcctgcccctgagagagtacttcaagtatttcagccagaatagtctgcccctgggaggcagcggcggcggcgccctggtgacatttgaggacgtcgccgtgcggttcacccaggaggaatgggctctgctggatccttctcagaaaatcctgtaccgggacgtgatgagagagacataccggaatctgacctccgtgggcatcaactgggaatgttgggaccttgaagcctgcttcagaagcctgggaagaaacctgagagtgcaggtggtgaagagaaagtgcgagctgaccaacagcggcccctgcgccgagggcggcccaagcagcggcgcccctcctcccagcggcggcagcccagccggctccccaacctctaccgaggagggcacctctgagtccgccacccccgagagcggccctggcacctccaccgagcccagcgagggcagcgcacccggcagccctgccggcagccccacctccacagaggagggaaccagcaccgagcccagcgaaggcagcgccccaggcaccagcaccgagcctagtgagcaggagattaaacggatcaacaagatcagaagaagacttgtgaaagacagcaacaccaagaaggccggcaagacaggccccatgaaaaccctgctggttagagtgatgacacccgatctgagagagcggctggaaaacctgagaaagaagcctgaaaatatcccccagcccatcagcaatacatctagagccaacctgaataagctgctgaccgattacaccgaaatgaagaaggcgatcctgcatgtgtactgggaagagttccagaaggaccctgtgggcctgatgagccgggtggcccagcctgccagcaagaagatcgatcagaacaagctgaaacctgagatggacgagaagggcaacctgaccaccgccggctttgcctgctctcagtgtggccagcccctgttcgtgtacaagctggagcaggtgtctgagaagggcaaggcttacaccaactacttcggacggtgcaatgtggccgagcacgaaaagctgatcctgctggcccagctgaagcccgagaaggatagcgacgaagccgtgacatatagcctgggaaagtttgggcagagggccctggatttctacagcattcatgtgaccaaggagtccacccaccccgtgaagcccctggcccagatcgccggaaacagatacgcctccggacctgtgggaaaggccctgagcgacgcatgtatgggcacaatcgcctccttcctgtctaagtaccaggacatcatcatcgaacaccagaaggtggtgaagggcaaccagaagagactggagagcctgcgggagctggccggcaaggaaaacctggaataccctagcgtgaccctgccacctcagcctcacaccaaggagggcgttgatgcctacaacgaagtgatcgcccgggtgcgaatgtgggtgaacctgaacctgtggcagaagctgaagctaagcagagatgatgccaagcctctgctgagactgaagggattcccttcctttcctctggtcgagagacaggccaacgaagtggactggtgggacatggtgtgtaacgtgaagaagctgatcaacgagaaaaaggaggatggcaaggtgttttggcagaatctggctggctacaagagacaggaagccctgagaccatacctgagcagcgaggaagatcggaagaagggaaagaaattcgctcggtaccagctgggcgacctgctgctgcacctggaaaagaagcacggcgaggactggggaaaggtgtacgacgaggcctgggagcggattgacaagaaagtggaaggcctgagcaagcacatcaagctggaagaggaacggagaagcgaggacgcccagagcaaggccgccctgaccgactggctgcgggctaaggccagcttcgtgatcgagggcctgaaggaggccgacaaggacgagttctgcagatgcgagctgaagctgcagaagtggtacggggacctgcggggaaagcccttcgccatcgaagccgagaacagcatcctggacatcagcggcttcagcaagcagtacaactgtgccttcatctggcagaaggacggcgtgaagaagctgaacctgtacctgatcatcaactacttcaagggcggcaagctgcggttcaagaagatcaaacctgaagccttcgaagccaacagattctacaccgtgatcaacaaaaagagcggcgagatcgtgcccatggaggtgaacttcaacttcgacgaccccaacctgatcatcctgcctctggcctttggcaagagacagggcagagaattcatctggaacgacctgctgtccctggaaaccggcagcctgaagctggccaacggaagagtgatcgagaagacactgtacaacagaagaacccggcaggatgagcctgccctgttcgtggccctgaccttcgagcggcgggaggtcctggactcctccaatatcaaaccaatgaacctgatcggcgtggcaagaggcgaaaacatccccgccgtgatcgccctgaccgaccccgagggctgcccactgagccggtttaaggatagcctgggaaacccaacccacatcctgagaatcggcgagagctataaggagaagcagcggaccatccaggccaagaaggaggtggagcagcggagagccggcggctacagccggaagtacgccagcaaagccaagaatctggcagacgatatggtgagaaacaccgctagagatctgctgtactacgccgtgacccaggatgccatgctgatcttcgccaacctgagccggggcttcggccggcagggcaagcggaccttcatggccgagagacagtacacacggatggaggactggctgaccgccaagctggcctacgagggcctgagcaagacctacctgtccaagacactggcccagtacacctccaagacatgcagcaactgtgggtttaccatcaccagcgccgactacgacagggtgctggagaagctgaagaagacagcaacaggctggatgaccacaattaacggcaaggagctgaaggtggagggccagattacctactacaacagatacaagagacagaacgtagtcaaggacctgtccgtcgagctggatagactgagcgaagaatctgtgaacaacgacatctcctcctggacaaagggcagaagcggagaagctctgagcctcctgaagaaaagattctcccatagacccgtgcaggagaagttcgtgtgcctgaactgcggcttcgagacacacgcagccgagcaagccgccctgaacatcgccagatcctggctgttcctgcggagccaggagtacaagaaataccagacaaacaagacaaccggcaacaccgataagagagccttcgtcgagacctggcagtccttttaccggaagaagcttaaggaggtgtggaaacctgccgtgcggtctggcggatctggcggaggctccttcagcctggaggacgtgagcgtgagcttcagccccgccgagtgggccctgctggaccccgcccagagggccctgtggagggaggtgatgagggagaacgccgagaacgtggccttcctggccaggagcatcggcgagaccctggtggaggccaacaacgaccccgtgagcgagggcaggctggagaggagcagcggcggcgccgaggagcagatcagcttccccaacggcctggccaagaggggcggcccaagcagcggcgcccctcctcccagcggcggcagcccagccggctccccaacctctaccgaggagggcacctctgagtccgccacccccgagagcggccctggcacctccaccgagcccagcgagggcagcgcacccggcagccctgccggcagccccacctccacagaggagggaaccagcaccgagcccagcgaaggcagcgccccaggcaccagcaccgagcctagtgagcaggagattaaacggatcaacaagatcagaagaagacttgtgaaagacagcaacaccaagaaggccggcaagacaggccccatgaaaaccctgctggttagagtgatgacacccgatctgagagagcggctggaaaacctgagaaagaagcctgaaaatatcccccagcccatcagcaatacatctagagccaacctgaataagctgctgaccgattacaccgaaatgaagaaggcgatcctgcatgtgtactgggaagagttccagaaggaccctgtgggcctgatgagccgggtggcccagcctgccagcaagaagatcgatcagaacaagctgaaacctgagatggacgagaagggcaacctgaccaccgccggctttgcctgctctcagtgtggccagcccctgttcgtgtacaagctggagcaggtgtctgagaagggcaaggcttacaccaactacttcggacggtgcaatgtggccgagcacgaaaagctgatcctgctggcccagctgaagcccgagaaggatagcgacgaagccgtgacatatagcctgggaaagtttgggcagagggccctggatttctacagcattcatgtgaccaaggagtccacccaccccgtgaagcccctggcccagatcgccggaaacagatacgcctccggacctgtgggaaaggccctgagcgacgcatgtatgggcacaatcgcctccttcctgtctaagtaccaggacatcatcatcgaacaccagaaggtggtgaagggcaaccagaagagactggagagcctgcgggagctggccggcaaggaaaacctggaataccctagcgtgaccctgccacctcagcctcacaccaaggagggcgttgatgcctacaacgaagtgatcgcccgggtgcgaatgtgggtgaacctgaacctgtggcagaagctgaagctaagcagagatgatgccaagcctctgctgagactgaagggattcccttcctttcctctggtcgagagacaggccaacgaagtggactggtgggacatggtgtgtaacgtgaagaagctgatcaacgagaaaaaggaggatggcaaggtgttttggcagaatctggctggctacaagagacaggaagccctgagaccatacctgagcagcgaggaagatcggaagaagggaaagaaattcgctcggtaccagctgggcgacctgctgctgcacctggaaaagaagcacggcgaggactggggaaaggtgtacgacgaggcctgggagcggattgacaagaaagtggaaggcctgagcaagcacatcaagctggaagaggaacggagaagcgaggacgcccagagcaaggccgccctgaccgactggctgcgggctaaggccagcttcgtgatcgagggcctgaaggaggccgacaaggacgagttctgcagatgcgagctgaagctgcagaagtggtacggggacctgcggggaaagcccttcgccatcgaagccgagaacagcatcctggacatcagcggcttcagcaagcagtacaactgtgccttcatctggcagaaggacggcgtgaagaagctgaacctgtacctgatcatcaactacttcaagggcggcaagctgcggttcaagaagatcaaacctgaagccttcgaagccaacagattctacaccgtgatcaacaaaaagagcggcgagatcgtgcccatggaggtgaacttcaacttcgacgaccccaacctgatcatcctgcctctggcctttggcaagagacagggcagagaattcatctggaacgacctgctgtccctggaaaccggcagcctgaagctggccaacggaagagtgatcgagaagacactgtacaacagaagaacccggcaggatgagcctgccctgttcgtggccctgaccttcgagcggcgggaggtcctggactcctccaatatcaaaccaatgaacctgatcggcgtggcaagaggcgaaaacatccccgccgtgatcgccctgaccgaccccgagggctgcccactgagccggtttaaggatagcctgggaaacccaacccacatcctgagaatcggcgagagctataaggagaagcagcggaccatccaggccaagaaggaggtggagcagcggagagccggcggctacagccggaagtacgccagcaaagccaagaatctggcagacgatatggtgagaaacaccgctagagatctgctgtactacgccgtgacccaggatgccatgctgatcttcgccaacctgagccggggcttcggccggcagggcaagcggaccttcatggccgagagacagtacacacggatggaggactggctgaccgccaagctggcctacgagggcctgagcaagacctacctgtccaagacactggcccagtacacctccaagacatgcagcaactgtgggtttaccatcaccagcgccgactacgacagggtgctggagaagctgaagaagacagcaacaggctggatgaccacaattaacggcaaggagctgaaggtggagggccagattacctactacaacagatacaagagacagaacgtagtcaaggacctgtccgtcgagctggatagactgagcgaagaatctgtgaacaacgacatctcctcctggacaaagggcagaagcggagaagctctgagcctcctgaagaaaagattctcccatagacccgtgcaggagaagttcgtgtgcctgaactgcggcttcgagacacacgcagccgagcaagccgccctgaacatcgccagatcctggctgttcctgcggagccaggagtacaagaaataccagacaaacaagacaaccggcaacaccgataagagagccttcgtcgagacctggcagtccttttaccggaagaagcttaaggaggtgtggaaacctgccgtgcggtctggcggatctggcggaggctcctttcagcctggaggacgtgagcgtgagcttcagccccgccgagtgggccctgctggaccccgcccagagggccctgtggagggaggtgatgagggagaacgccgagaacgtggccttcctggccaggagcatcggcgagaccctggtggaggccaacaacgaccccgtgagcgagggcaggctggagaggagcagcggcggcgccgaggagcagatcagcttccccaacggcctggccaagaggggatctggctccggcagcggccccaagaaaaagagaaaagtctaagctgccttctgcggggcttgccttctggccatgcccttcttctctcccttgcacctgtacctcttggtctttgaataaagcctgagtaggaaggctagcaaaaaaaaaaaaaaaaaaaaaaaaaaaaaaaaaaaaaaaaaaaaaaaaaaaaaaaaaaaaaaaaaaaaaaaaaaaaaaaa

SEQ ID NO: 16170 - RNA, 9485 nt, synthetic construct
  source 1..9485: mol_type = other RNA
aggaaataagagagaaaagaagagtaagaagaaatataagagccaccatggcccctaagaagaagcgtaaagtgagccggatggaacgcctcgtctacgaggtgcggcagaagtgcagaaacatcgaggacatctgcatctcctgcggatctctgaacgtgaccctggagcacccactgttcatcggcggcatgtgccagaactgtaaaaactgttttctggagtgtgcctatcaatacgacgatgacggctaccagagctactgcaccatctgttgcggcggaagagaggtgctgatgtgtggaaataacaactgctgccggtgcttctgcgtggaatgcgtggacctgctggtgggccccggcgccgcccaggccgctattaaggaagatccttggaactgctacatgtgcggccacaagggcacatacggcctgctgagacggagagaggactggcctagcagactgcagatgttcttcgccaataaccacgaccaggagttcgacccccctaaggtgtaccctcccgtccccgccgagaagagaaagcccatccgggtcctgagcctgttcgatggcatcgccaccggtctgctggtgctgaaggacctgggcatccaggtggataggtacattgcctccgaggtgtgcgaggactccatcaccgtgggaatggtgcgtcatcagggcaagatcatgtacgtgggcgacgtgcggagcgtgacacagaagcatatccaggagtggggccctttcgacctggtgatcggcggcagcccttgcaatgacctgagcatcgtgaacccagcccggaagggcctgtacgagggaaccggcagactgttcttcgagttttacagactgctgcacgacgcccggcctaaggaaggcgacgaccggcccttcttttggctgttcgagaatgtggtggccatgggagtcagcgacaagcgggatattagccggttcctggagagcaaccccgtgatgatcgatgccaaggaagtgagcgccgcccaccgggccagatacttctggggcaatctgcctggcatgaacagacccctggccagcaccgtgaacgacaagctggagctgcaggagtgcctggagcacggccggatcgccaagttcagcaaggtgagaaccatcaccacccgaagcaacagcatcaaacaaggcaaggaccagcactttcctgtgttcatgaacgagaaggaggacatcctgtggtgtaccgagatggagagagtgttcgggttcccagtccactacacagatgtcagcaacatgtctagactggccagacagagactgctgggaagaagctggtccgtccctgtgatcagacacctgttcgcccctctgaaggagtacttcgcctgcgtgagcagcggcaacagcaacgccaacagccggggccccagcttctctagcggcctggtgccactgtccctgagagggagccacatgggccccatggagatctacaaaaccgtgagcgcctggaagcggcagcctgtgcgcgtgctgagcctgtttcggaatatcgataaagtcctgaaaagcctgggattcctggagagcggctctggctccggcggtggcaccctgaagtacgtggaggatgtgacaaacgtggtcagacgggatgtggagaagtggggccccttcgatctggtgtacggcagcacccaacccctgggcagctcttgtgaccggtgccctggctggtacatgtttcagttccaccggatcctgcagtacgccctgccgagacaggagtcccagcggccattcttttggattttcatggacaacttgctgctgaccgaggatgaccaggaaactaccactcggttcctgcagaccgaagccgtgaccctgcaggacgtgagaggccgggactaccagaacgccatgcgggtgtggtccaacatccctggactgaaaagcaagcacgcacctctgacccctaaagaagaggagtacctgcaggcccaggtgcggagcagaagcaagctggacgcccctaaggtggatctgctggtgaagaattgcctcctgcccctgagagagtacttcaagtatttcagccagaatagtctgcccctgggaggcagcggcggcggcgccctggtgacatttgaggacgtcgccgtgcggttcacccaggaggaatgggctctgctggatccttctcagaaaatcctgtaccgggacgtgatgagagagacataccggaatctgacctccgtgggcatcaactgggaatgttgggaccttgaagcctgcttcagaagcctgggaagaaacctgagagtgcaggtggtgaagagaaagtgcgagctgaccaacagcggcccctgcgccgagggcggcccaagcagcggcgcccctcctcccagcggcggcagcccagccggctccccaacctctaccgaggagggcacctctgagtccgccacccccgagagcggccctggcacctccaccgagcccagcgagggcagcgcacccggcagccctgccggcagccccacctccacagaggagggaaccagcaccgagcccagcgaaggcagcgccccaggcaccagcaccgagcctagtgagcaggagattaaacggatcaacaagatcagaagaagacttgtgaaagacagcaacaccaagaaggccggcaagacaggccccatgaaaaccctgctggttagagtgatgacacccgatctgagagagcggctggaaaacctgagaaagaagcctgaaaatatcccccagcccatcagcaatacatctagagccaacctgaataagctgctgaccgattacaccgaaatgaagaaggcgatcctgcatgtgtactgggaagagttccagaaggaccctgtgggcctgatgagccgggtggcccagcctgccagcaagaagatcgatcagaacaagctgaaacctgagatggacgagaagggcaacctgaccaccgccggctttgcctgctctcagtgtggccagcccctgttcgtgtacaagctggagcaggtgtctgagaagggcaaggcttacaccaactacttcggacggtgcaatgtggccgagcacgaaaagctgatcctgctggcccagctgaagcccgagaaggatagcgacgaagccgtgacatatagcctgggaaagtttgggcagagggccctggatttctacagcattcatgtgaccaaggagtccacccaccccgtgaagcccctggcccagatcgccggaaacagatacgcctccggacctgtgggaaaggccctgagcgacgcatgtatgggcacaatcgcctccttcctgtctaagtaccaggacatcatcatcgaacaccagaaggtggtgaagggcaaccagaagagactggagagcctgcgggagctggccggcaaggaaaacctggaataccctagcgtgaccctgccacctcagcctcacaccaaggagggcgttgatgcctacaacgaagtgatcgcccgggtgcgaatgtgggtgaacctgaacctgtggcagaagctgaagctaagcagagatgatgccaagcctctgctgagactgaagggattcccttcctttcctctggtcgagagacaggccaacgaagtggactggtgggacatggtgtgtaacgtgaagaagctgatcaacgagaaaaaggaggatggcaaggtgttttggcagaatctggctggctacaagagacaggaagccctgagaccatacctgagcagcgaggaagatcggaagaagggaaagaaattcgctcggtaccagctgggcgacctgctgctgcacctggaaaagaagcacggcgaggactggggaaaggtgtacgacgaggcctgggagcggattgacaagaaagtggaaggcctgagcaagcacatcaagctggaagaggaacggagaagcgaggacgcccagagcaaggccgccctgaccgactggctgcgggctaaggccagcttcgtgatcgagggcctgaaggaggccgacaaggacgagttctgcagatgcgagctgaagctgcagaagtggtacggggacctgcggggaaagcccttcgccatcgaagccgagaacagcatcctggacatcagcggcttcagcaagcagtacaactgtgccttcatctggcagaaggacggcgtgaagaagctgaacctgtacctgatcatcaactacttcaagggcggcaagctgcggttcaagaagatcaaacctgaagccttcgaagccaacagattctacaccgtgatcaacaaaaagagcggcgagatcgtgcccatggaggtgaacttcaacttcgacgaccccaacctgatcatcctgcctctggcctttggcaagagacagggcagagaattcatctggaacgacctgctgtccctggaaaccggcagcctgaagctggccaacggaagagtgatcgagaagacactgtacaacagaagaacccggcaggatgagcctgccctgttcgtggccctgaccttcgagcggcgggaggtcctggactcctccaatatcaaaccaatgaacctgatcggcgtggcaagaggcgaaaacatccccgccgtgatcgccctgaccgaccccgagggctgcccactgagccggtttaaggatagcctgggaaacccaacccacatcctgagaatcggcgagagctataaggagaagcagcggaccatccaggccaagaaggaggtggagcagcggagagccggcggctacagccggaagtacgccagcaaagccaagaatctggcagacgatatggtgagaaacaccgctagagatctgctgtactacgccgtgacccaggatgccatgctgatcttcgccaacctgagccggggcttcggccggcagggcaagcggaccttcatggccgagagacagtacacacggatggaggactggctgaccgccaagctggcctacgagggcctgagcaagacctacctgtccaagacactggcccagtacacctccaagacatgcagcaactgtgggtttaccatcaccagcgccgactacgacagggtgctggagaagctgaagaagacagcaacaggctggatgaccacaattaacggcaaggagctgaaggtggagggccagattacctactacaacagatacaagagacagaacgtagtcaaggacctgtccgtcgagctggatagactgagcgaagaatctgtgaacaacgacatctcctcctggacaaagggcagaagcggagaagctctgagcctcctgaagaaaagattctcccatagacccgtgcaggagaagttcgtgtgcctgaactgcggcttcgagacacacgcagccgagcaagccgccctgaacatcgccagatcctggctgttcctgcggagccaggagtacaagaaataccagacaaacaagacaaccggcaacaccgataagagagccttcgtcgagacctggcagtccttttaccggaagaagcttaaggaggtgtggaaacctgccgtgcggtctggcggatctggcggaggctccatggcccacctgatgatgttcagggacgtggccgtggacttcagccaggaggagtgggagtgcctggacctggagcagaggggcctgtacagggacgtgatgctggagaactacagcaacatggtgagcctgggcctgtgcatctaccagcccgaggccttcagcctgctggagaagggcaaggagccctggaagatcctgagggacgagaccaggggcccctgccccgacatgcagagcaggggcggcccaagcagcggcgcccctcctcccagcggcggcagcccagccggctccccaacctctaccgaggagggcacctctgagtccgccacccccgagagcggccctggcacctccaccgagcccagcgagggcagcgcacccggcagccctgccggcagccccacctccacagaggagggaaccagcaccgagcccagcgaaggcagcgccccaggcaccagcaccgagcctagtgagcaggagattaaacggatcaacaagatcagaagaagacttgtgaaagacagcaacaccaagaaggccggcaagacaggccccatgaaaaccctgctggttagagtgatgacacccgatctgagagagcggctggaaaacctgagaaagaagcctgaaaatatcccccagcccatcagcaatacatctagagccaacctgaataagctgctgaccgattacaccgaaatgaagaaggcgatcctgcatgtgtactgggaagagttccagaaggaccctgtgggcctgatgagccgggtggcccagcctgccagcaagaagatcgatcagaacaagctgaaacctgagatggacgagaagggcaacctgaccaccgccggctttgcctgctctcagtgtggccagcccctgttcgtgtacaagctggagcaggtgtctgagaagggcaaggcttacaccaactacttcggacggtgcaatgtggccgagcacgaaaagctgatcctgctggcccagctgaagcccgagaaggatagcgacgaagccgtgacatatagcctgggaaagtttgggcagagggccctggatttctacagcattcatgtgaccaaggagtccacccaccccgtgaagcccctggcccagatcgccggaaacagatacgcctccggacctgtgggaaaggccctgagcgacgcatgtatgggcacaatcgcctccttcctgtctaagtaccaggacatcatcatcgaacaccagaaggtggtgaagggcaaccagaagagactggagagcctgcgggagctggccggcaaggaaaacctggaataccctagcgtgaccctgccacctcagcctcacaccaaggagggcgttgatgcctacaacgaagtgatcgcccgggtgcgaatgtgggtgaacctgaacctgtggcagaagctgaagctaagcagagatgatgccaagcctctgctgagactgaagggattcccttcctttcctctggtcgagagacaggccaacgaagtggactggtgggacatggtgtgtaacgtgaagaagctgatcaacgagaaaaaggaggatggcaaggtgttttggcagaatctggctggctacaagagacaggaagccctgagaccatacctgagcagcgaggaagatcggaagaagggaaagaaattcgctcggtaccagctgggcgacctgctgctgcacctggaaaagaagcacggcgaggactggggaaaggtgtacgacgaggcctgggagcggattgacaagaaagtggaaggcctgagcaagcacatcaagctggaagaggaacggagaagcgaggacgcccagagcaaggccgccctgaccgactggctgcgggctaaggccagcttcgtgatcgagggcctgaaggaggccgacaaggacgagttctgcagatgcgagctgaagctgcagaagtggtacggggacctgcggggaaagcccttcgccatcgaagccgagaacagcatcctggacatcagcggcttcagcaagcagtacaactgtgccttcatctggcagaaggacggcgtgaagaagctgaacctgtacctgatcatcaactacttcaagggcggcaagctgcggttcaagaagatcaaacctgaagccttcgaagccaacagattctacaccgtgatcaacaaaaagagcggcgagatcgtgcccatggaggtgaacttcaacttcgacgaccccaacctgatcatcctgcctctggcctttggcaagagacagggcagagaattcatctggaacgacctgctgtccctggaaaccggcagcctgaagctggccaacggaagagtgatcgagaagacactgtacaacagaagaacccggcaggatgagcctgccctgttcgtggccctgaccttcgagcggcgggaggtcctggactcctccaatatcaaaccaatgaacctgatcggcgtggcaagaggcgaaaacatccccgccgtgatcgccctgaccgaccccgagggctgcccactgagccggtttaaggatagcctgggaaacccaacccacatcctgagaatcggcgagagctataaggagaagcagcggaccatccaggccaagaaggaggtggagcagcggagagccggcggctacagccggaagtacgccagcaaagccaagaatctggcagacgatatggtgagaaacaccgctagagatctgctgtactacgccgtgacccaggatgccatgctgatcttcgccaacctgagccggggcttcggccggcagggcaagcggaccttcatggccgagagacagtacacacggatggaggactggctgaccgccaagctggcctacgagggcctgagcaagacctacctgtccaagacactggcccagtacacctccaagacatgcagcaactgtgggtttaccatcaccagcgccgactacgacagggtgctggagaagctgaagaagacagcaacaggctggatgaccacaattaacggcaaggagctgaaggtggagggccagattacctactacaacagatacaagagacagaacgtagtcaaggacctgtccgtcgagctggatagactgagcgaagaatctgtgaacaacgacatctcctcctggacaaagggcagaagcggagaagctctgagcctcctgaagaaaagattctcccatagacccgtgcaggagaagttcgtgtgcctgaactgcggcttcgagacacacgcagccgagcaagccgccctgaacatcgccagatcctggctgttcctgcggagccaggagtacaagaaataccagacaaacaagacaaccggcaacaccgataagagagccttcgtcgagacctggcagtccttttaccggaagaagcttaaggaggtgtggaaacctgccgtgcggtctggcggatctggcggaggctcctatggcccacctgatgatgttcagggacgtggccgtggacttcagccaggaggagtgggagtgcctggacctggagcagaggggcctgtacagggacgtgatgctggagaactacagcaacatggtgagcctgggcctgtgcatctaccagcccgaggccttcagcctgctggagaagggcaaggagccctggaagatcctgagggacgagaccaggggcccctgccccgacatgcagagcaggggatctggctccggcagcggccccaagaaaaagagaaaagtctaagctgccttctgcggggcttgccttctggccatgcccttcttctctcccttgcacctgtacctcttggtctttgaataaagcctgagtaggaaggctagcaaaaaaaaaaaaaaaaaaaaaaaaaaaaaaaaaaaaaaaaaaaaaaaaaaaaaaaaaaaaaaaaaaaaaaaaaaaaaaaa

SEQ ID NO: 16171 - RNA, 9485 nt, synthetic construct
  source 1..9485: mol_type = other RNA
aggaaataagagagaaaagaagagtaagaagaaatataagagccaccatggcccctaagaagaagcgtaaagtgagccggatggaacgcctcgtctacgaggtgcggcagaagtgcagaaacatcgaggacatctgcatctcctgcggatctctgaacgtgaccctggagcacccactgttcatcggcggcatgtgccagaactgtaaaaactgttttctggagtgtgcctatcaatacgacgatgacggctaccagagctactgcaccatctgttgcggcggaagagaggtgctgatgtgtggaaataacaactgctgccggtgcttctgcgtggaatgcgtggacctgctggtgggccccggcgccgcccaggccgctattaaggaagatccttggaactgctacatgtgcggccacaagggcacatacggcctgctgagacggagagaggactggcctagcagactgcagatgttcttcgccaataaccacgaccaggagttcgacccccctaaggtgtaccctcccgtccccgccgagaagagaaagcccatccgggtcctgagcctgttcgatggcatcgccaccggtctgctggtgctgaaggacctgggcatccaggtggataggtacattgcctccgaggtgtgcgaggactccatcaccgtgggaatggtgcgtcatcagggcaagatcatgtacgtgggcgacgtgcggagcgtgacacagaagcatatccaggagtggggccctttcgacctggtgatcggcggcagcccttgcaatgacctgagcatcgtgaacccagcccggaagggcctgtacgagggaaccggcagactgttcttcgagttttacagactgctgcacgacgcccggcctaaggaaggcgacgaccggcccttcttttggctgttcgagaatgtggtggccatgggagtcagcgacaagcgggatattagccggttcctggagagcaaccccgtgatgatcgatgccaaggaagtgagcgccgcccaccgggccagatacttctggggcaatctgcctggcatgaacagacccctggccagcaccgtgaacgacaagctggagctgcaggagtgcctggagcacggccggatcgccaagttcagcaaggtgagaaccatcaccacccgaagcaacagcatcaaacaaggcaaggaccagcactttcctgtgttcatgaacgagaaggaggacatcctgtggtgtaccgagatggagagagtgttcgggttcccagtccactacacagatgtcagcaacatgtctagactggccagacagagactgctgggaagaagctggtccgtccctgtgatcagacacctgttcgcccctctgaaggagtacttcgcctgcgtgagcagcggcaacagcaacgccaacagccggggccccagcttctctagcggcctggtgccactgtccctgagagggagccacatgggccccatggagatctacaaaaccgtgagcgcctggaagcggcagcctgtgcgcgtgctgagcctgtttcggaatatcgataaagtcctgaaaagcctgggattcctggagagcggctctggctccggcggtggcaccctgaagtacgtggaggatgtgacaaacgtggtcagacgggatgtggagaagtggggccccttcgatctggtgtacggcagcacccaacccctgggcagctcttgtgaccggtgccctggctggtacatgtttcagttccaccggatcctgcagtacgccctgccgagacaggagtcccagcggccattcttttggattttcatggacaacttgctgctgaccgaggatgaccaggaaactaccactcggttcctgcagaccgaagccgtgaccctgcaggacgtgagaggccgggactaccagaacgccatgcgggtgtggtccaacatccctggactgaaaagcaagcacgcacctctgacccctaaagaagaggagtacctgcaggcccaggtgcggagcagaagcaagctggacgcccctaaggtggatctgctggtgaagaattgcctcctgcccctgagagagtacttcaagtatttcagccagaatagtctgcccctgggaggcagcggcggcggcgccctggtgacatttgaggacgtcgccgtgcggttcacccaggaggaatgggctctgctggatccttctcagaaaatcctgtaccgggacgtgatgagagagacataccggaatctgacctccgtgggcatcaactgggaatgttgggaccttgaagcctgcttcagaagcctgggaagaaacctgagagtgcaggtggtgaagagaaagtgcgagctgaccaacagcggcccctgcgccgagggcggcccaagcagcggcgcccctcctcccagcggcggcagcccagccggctccccaacctctaccgaggagggcacctctgagtccgccacccccgagagcggccctggcacctccaccgagcccagcgagggcagcgcacccggcagccctgccggcagccccacctccacagaggagggaaccagcaccgagcccagcgaaggcagcgccccaggcaccagcaccgagcctagtgagcaggagattaaacggatcaacaagatcagaagaagacttgtgaaagacagcaacaccaagaaggccggcaagacaggccccatgaaaaccctgctggttagagtgatgacacccgatctgagagagcggctggaaaacctgagaaagaagcctgaaaatatcccccagcccatcagcaatacatctagagccaacctgaataagctgctgaccgattacaccgaaatgaagaaggcgatcctgcatgtgtactgggaagagttccagaaggaccctgtgggcctgatgagccgggtggcccagcctgccagcaagaagatcgatcagaacaagctgaaacctgagatggacgagaagggcaacctgaccaccgccggctttgcctgctctcagtgtggccagcccctgttcgtgtacaagctggagcaggtgtctgagaagggcaaggcttacaccaactacttcggacggtgcaatgtggccgagcacgaaaagctgatcctgctggcccagctgaagcccgagaaggatagcgacgaagccgtgacatatagcctgggaaagtttgggcagagggccctggatttctacagcattcatgtgaccaaggagtccacccaccccgtgaagcccctggcccagatcgccggaaacagatacgcctccggacctgtgggaaaggccctgagcgacgcatgtatgggcacaatcgcctccttcctgtctaagtaccaggacatcatcatcgaacaccagaaggtggtgaagggcaaccagaagagactggagagcctgcgggagctggccggcaaggaaaacctggaataccctagcgtgaccctgccacctcagcctcacaccaaggagggcgttgatgcctacaacgaagtgatcgcccgggtgcgaatgtgggtgaacctgaacctgtggcagaagctgaagctaagcagagatgatgccaagcctctgctgagactgaagggattcccttcctttcctctggtcgagagacaggccaacgaagtggactggtgggacatggtgtgtaacgtgaagaagctgatcaacgagaaaaaggaggatggcaaggtgttttggcagaatctggctggctacaagagacaggaagccctgagaccatacctgagcagcgaggaagatcggaagaagggaaagaaattcgctcggtaccagctgggcgacctgctgctgcacctggaaaagaagcacggcgaggactggggaaaggtgtacgacgaggcctgggagcggattgacaagaaagtggaaggcctgagcaagcacatcaagctggaagaggaacggagaagcgaggacgcccagagcaaggccgccctgaccgactggctgcgggctaaggccagcttcgtgatcgagggcctgaaggaggccgacaaggacgagttctgcagatgcgagctgaagctgcagaagtggtacggggacctgcggggaaagcccttcgccatcgaagccgagaacagcatcctggacatcagcggcttcagcaagcagtacaactgtgccttcatctggcagaaggacggcgtgaagaagctgaacctgtacctgatcatcaactacttcaagggcggcaagctgcggttcaagaagatcaaacctgaagccttcgaagccaacagattctacaccgtgatcaacaaaaagagcggcgagatcgtgcccatggaggtgaacttcaacttcgacgaccccaacctgatcatcctgcctctggcctttggcaagagacagggcagagaattcatctggaacgacctgctgtccctggaaaccggcagcctgaagctggccaacggaagagtgatcgagaagacactgtacaacagaagaacccggcaggatgagcctgccctgttcgtggccctgaccttcgagcggcgggaggtcctggactcctccaatatcaaaccaatgaacctgatcggcgtggcaagaggcgaaaacatccccgccgtgatcgccctgaccgaccccgagggctgcccactgagccggtttaaggatagcctgggaaacccaacccacatcctgagaatcggcgagagctataaggagaagcagcggaccatccaggccaagaaggaggtggagcagcggagagccggcggctacagccggaagtacgccagcaaagccaagaatctggcagacgatatggtgagaaacaccgctagagatctgctgtactacgccgtgacccaggatgccatgctgatcttcgccaacctgagccggggcttcggccggcagggcaagcggaccttcatggccgagagacagtacacacggatggaggactggctgaccgccaagctggcctacgagggcctgagcaagacctacctgtccaagacactggcccagtacacctccaagacatgcagcaactgtgggtttaccatcaccagcgccgactacgacagggtgctggagaagctgaagaagacagcaacaggctggatgaccacaattaacggcaaggagctgaaggtggagggccagattacctactacaacagatacaagagacagaacgtagtcaaggacctgtccgtcgagctggatagactgagcgaagaatctgtgaacaacgacatctcctcctggacaaagggcagaagcggagaagctctgagcctcctgaagaaaagattctcccatagacccgtgcaggagaagttcgtgtgcctgaactgcggcttcgagacacacgcagccgagcaagccgccctgaacatcgccagatcctggctgttcctgcggagccaggagtacaagaaataccagacaaacaagacaaccggcaacaccgataagagagccttcgtcgagacctggcagtccttttaccggaagaagcttaaggaggtgtggaaacctgccgtgcggtctggcggatctggcggaggctccatggacgccgtgacctacgaggacgtgcaggtgagcttcaccagggaggagtggaccctgctggaccccagccagaagagcctgtacaaggacgtgatggtggagacctacaggaacctgaccgccatcggctacaagtgggaggaccagaacatcaagaagcaccaccagtgcagcaggaggcacggcaggcacgagaggagcaacagcgccgagaaggactacgagtgcgagcagtgcggcggcggcccaagcagcggcgcccctcctcccagcggcggcagcccagccggctccccaacctctaccgaggagggcacctctgagtccgccacccccgagagcggccctggcacctccaccgagcccagcgagggcagcgcacccggcagccctgccggcagccccacctccacagaggagggaaccagcaccgagcccagcgaaggcagcgccccaggcaccagcaccgagcctagtgagcaggagattaaacggatcaacaagatcagaagaagacttgtgaaagacagcaacaccaagaaggccggcaagacaggccccatgaaaaccctgctggttagagtgatgacacccgatctgagagagcggctggaaaacctgagaaagaagcctgaaaatatcccccagcccatcagcaatacatctagagccaacctgaataagctgctgaccgattacaccgaaatgaagaaggcgatcctgcatgtgtactgggaagagttccagaaggaccctgtgggcctgatgagccgggtggcccagcctgccagcaagaagatcgatcagaacaagctgaaacctgagatggacgagaagggcaacctgaccaccgccggctttgcctgctctcagtgtggccagcccctgttcgtgtacaagctggagcaggtgtctgagaagggcaaggcttacaccaactacttcggacggtgcaatgtggccgagcacgaaaagctgatcctgctggcccagctgaagcccgagaaggatagcgacgaagccgtgacatatagcctgggaaagtttgggcagagggccctggatttctacagcattcatgtgaccaaggagtccacccaccccgtgaagcccctggcccagatcgccggaaacagatacgcctccggacctgtgggaaaggccctgagcgacgcatgtatgggcacaatcgcctccttcctgtctaagtaccaggacatcatcatcgaacaccagaaggtggtgaagggcaaccagaagagactggagagcctgcgggagctggccggcaaggaaaacctggaataccctagcgtgaccctgccacctcagcctcacaccaaggagggcgttgatgcctacaacgaagtgatcgcccgggtgcgaatgtgggtgaacctgaacctgtggcagaagctgaagctaagcagagatgatgccaagcctctgctgagactgaagggattcccttcctttcctctggtcgagagacaggccaacgaagtggactggtgggacatggtgtgtaacgtgaagaagctgatcaacgagaaaaaggaggatggcaaggtgttttggcagaatctggctggctacaagagacaggaagccctgagaccatacctgagcagcgaggaagatcggaagaagggaaagaaattcgctcggtaccagctgggcgacctgctgctgcacctggaaaagaagcacggcgaggactggggaaaggtgtacgacgaggcctgggagcggattgacaagaaagtggaaggcctgagcaagcacatcaagctggaagaggaacggagaagcgaggacgcccagagcaaggccgccctgaccgactggctgcgggctaaggccagcttcgtgatcgagggcctgaaggaggccgacaaggacgagttctgcagatgcgagctgaagctgcagaagtggtacggggacctgcggggaaagcccttcgccatcgaagccgagaacagcatcctggacatcagcggcttcagcaagcagtacaactgtgccttcatctggcagaaggacggcgtgaagaagctgaacctgtacctgatcatcaactacttcaagggcggcaagctgcggttcaagaagatcaaacctgaagccttcgaagccaacagattctacaccgtgatcaacaaaaagagcggcgagatcgtgcccatggaggtgaacttcaacttcgacgaccccaacctgatcatcctgcctctggcctttggcaagagacagggcagagaattcatctggaacgacctgctgtccctggaaaccggcagcctgaagctggccaacggaagagtgatcgagaagacactgtacaacagaagaacccggcaggatgagcctgccctgttcgtggccctgaccttcgagcggcgggaggtcctggactcctccaatatcaaaccaatgaacctgatcggcgtggcaagaggcgaaaacatccccgccgtgatcgccctgaccgaccccgagggctgcccactgagccggtttaaggatagcctgggaaacccaacccacatcctgagaatcggcgagagctataaggagaagcagcggaccatccaggccaagaaggaggtggagcagcggagagccggcggctacagccggaagtacgccagcaaagccaagaatctggcagacgatatggtgagaaacaccgctagagatctgctgtactacgccgtgacccaggatgccatgctgatcttcgccaacctgagccggggcttcggccggcagggcaagcggaccttcatggccgagagacagtacacacggatggaggactggctgaccgccaagctggcctacgagggcctgagcaagacctacctgtccaagacactggcccagtacacctccaagacatgcagcaactgtgggtttaccatcaccagcgccgactacgacagggtgctggagaagctgaagaagacagcaacaggctggatgaccacaattaacggcaaggagctgaaggtggagggccagattacctactacaacagatacaagagacagaacgtagtcaaggacctgtccgtcgagctggatagactgagcgaagaatctgtgaacaacgacatctcctcctggacaaagggcagaagcggagaagctctgagcctcctgaagaaaagattctcccatagacccgtgcaggagaagttcgtgtgcctgaactgcggcttcgagacacacgcagccgagcaagccgccctgaacatcgccagatcctggctgttcctgcggagccaggagtacaagaaataccagacaaacaagacaaccggcaacaccgataagagagccttcgtcgagacctggcagtccttttaccggaagaagcttaaggaggtgtggaaacctgccgtgcggtctggcggatctggcggaggctcctatggacgccgtgacctacgaggacgtgcaggtgagcttcaccagggaggagtggaccctgctggaccccagccagaagagcctgtacaaggacgtgatggtggagacctacaggaacctgaccgccatcggctacaagtgggaggaccagaacatcaagaagcaccaccagtgcagcaggaggcacggcaggcacgagaggagcaacagcgccgagaaggactacgagtgcgagcagtgcggcggatctggctccggcagcggccccaagaaaaagagaaaagtctaagctgccttctgcggggcttgccttctggccatgcccttcttctctcccttgcacctgtacctcttggtctttgaataaagcctgagtaggaaggctagcaaaaaaaaaaaaaaaaaaaaaaaaaaaaaaaaaaaaaaaaaaaaaaaaaaaaaaaaaaaaaaaaaaaaaaaaaaaaaaaa

SEQ ID NO: 16172 - RNA, 9485 nt, synthetic construct
  source 1..9485: mol_type = other RNA
aggaaataagagagaaaagaagagtaagaagaaatataagagccaccatggcccctaagaagaagcgtaaagtgagccggatggaacgcctcgtctacgaggtgcggcagaagtgcagaaacatcgaggacatctgcatctcctgcggatctctgaacgtgaccctggagcacccactgttcatcggcggcatgtgccagaactgtaaaaactgttttctggagtgtgcctatcaatacgacgatgacggctaccagagctactgcaccatctgttgcggcggaagagaggtgctgatgtgtggaaataacaactgctgccggtgcttctgcgtggaatgcgtggacctgctggtgggccccggcgccgcccaggccgctattaaggaagatccttggaactgctacatgtgcggccacaagggcacatacggcctgctgagacggagagaggactggcctagcagactgcagatgttcttcgccaataaccacgaccaggagttcgacccccctaaggtgtaccctcccgtccccgccgagaagagaaagcccatccgggtcctgagcctgttcgatggcatcgccaccggtctgctggtgctgaaggacctgggcatccaggtggataggtacattgcctccgaggtgtgcgaggactccatcaccgtgggaatggtgcgtcatcagggcaagatcatgtacgtgggcgacgtgcggagcgtgacacagaagcatatccaggagtggggccctttcgacctggtgatcggcggcagcccttgcaatgacctgagcatcgtgaacccagcccggaagggcctgtacgagggaaccggcagactgttcttcgagttttacagactgctgcacgacgcccggcctaaggaaggcgacgaccggcccttcttttggctgttcgagaatgtggtggccatgggagtcagcgacaagcgggatattagccggttcctggagagcaaccccgtgatgatcgatgccaaggaagtgagcgccgcccaccgggccagatacttctggggcaatctgcctggcatgaacagacccctggccagcaccgtgaacgacaagctggagctgcaggagtgcctggagcacggccggatcgccaagttcagcaaggtgagaaccatcaccacccgaagcaacagcatcaaacaaggcaaggaccagcactttcctgtgttcatgaacgagaaggaggacatcctgtggtgtaccgagatggagagagtgttcgggttcccagtccactacacagatgtcagcaacatgtctagactggccagacagagactgctgggaagaagctggtccgtccctgtgatcagacacctgttcgcccctctgaaggagtacttcgcctgcgtgagcagcggcaacagcaacgccaacagccggggccccagcttctctagcggcctggtgccactgtccctgagagggagccacatgggccccatggagatctacaaaaccgtgagcgcctggaagcggcagcctgtgcgcgtgctgagcctgtttcggaatatcgataaagtcctgaaaagcctgggattcctggagagcggctctggctccggcggtggcaccctgaagtacgtggaggatgtgacaaacgtggtcagacgggatgtggagaagtggggccccttcgatctggtgtacggcagcacccaacccctgggcagctcttgtgaccggtgccctggctggtacatgtttcagttccaccggatcctgcagtacgccctgccgagacaggagtcccagcggccattcttttggattttcatggacaacttgctgctgaccgaggatgaccaggaaactaccactcggttcctgcagaccgaagccgtgaccctgcaggacgtgagaggccgggactaccagaacgccatgcgggtgtggtccaacatccctggactgaaaagcaagcacgcacctctgacccctaaagaagaggagtacctgcaggcccaggtgcggagcagaagcaagctggacgcccctaaggtggatctgctggtgaagaattgcctcctgcccctgagagagtacttcaagtatttcagccagaatagtctgcccctgggaggcagcggcggcggcgccctggtgacatttgaggacgtcgccgtgcggttcacccaggaggaatgggctctgctggatccttctcagaaaatcctgtaccgggacgtgatgagagagacataccggaatctgacctccgtgggcatcaactgggaatgttgggaccttgaagcctgcttcagaagcctgggaagaaacctgagagtgcaggtggtgaagagaaagtgcgagctgaccaacagcggcccctgcgccgagggcggcccaagcagcggcgcccctcctcccagcggcggcagcccagccggctccccaacctctaccgaggagggcacctctgagtccgccacccccgagagcggccctggcacctccaccgagcccagcgagggcagcgcacccggcagccctgccggcagccccacctccacagaggagggaaccagcaccgagcccagcgaaggcagcgccccaggcaccagcaccgagcctagtgagcaggagattaaacggatcaacaagatcagaagaagacttgtgaaagacagcaacaccaagaaggccggcaagacaggccccatgaaaaccctgctggttagagtgatgacacccgatctgagagagcggctggaaaacctgagaaagaagcctgaaaatatcccccagcccatcagcaatacatctagagccaacctgaataagctgctgaccgattacaccgaaatgaagaaggcgatcctgcatgtgtactgggaagagttccagaaggaccctgtgggcctgatgagccgggtggcccagcctgccagcaagaagatcgatcagaacaagctgaaacctgagatggacgagaagggcaacctgaccaccgccggctttgcctgctctcagtgtggccagcccctgttcgtgtacaagctggagcaggtgtctgagaagggcaaggcttacaccaactacttcggacggtgcaatgtggccgagcacgaaaagctgatcctgctggcccagctgaagcccgagaaggatagcgacgaagccgtgacatatagcctgggaaagtttgggcagagggccctggatttctacagcattcatgtgaccaaggagtccacccaccccgtgaagcccctggcccagatcgccggaaacagatacgcctccggacctgtgggaaaggccctgagcgacgcatgtatgggcacaatcgcctccttcctgtctaagtaccaggacatcatcatcgaacaccagaaggtggtgaagggcaaccagaagagactggagagcctgcgggagctggccggcaaggaaaacctggaataccctagcgtgaccctgccacctcagcctcacaccaaggagggcgttgatgcctacaacgaagtgatcgcccgggtgcgaatgtgggtgaacctgaacctgtggcagaagctgaagctaagcagagatgatgccaagcctctgctgagactgaagggattcccttcctttcctctggtcgagagacaggccaacgaagtggactggtgggacatggtgtgtaacgtgaagaagctgatcaacgagaaaaaggaggatggcaaggtgttttggcagaatctggctggctacaagagacaggaagccctgagaccatacctgagcagcgaggaagatcggaagaagggaaagaaattcgctcggtaccagctgggcgacctgctgctgcacctggaaaagaagcacggcgaggactggggaaaggtgtacgacgaggcctgggagcggattgacaagaaagtggaaggcctgagcaagcacatcaagctggaagaggaacggagaagcgaggacgcccagagcaaggccgccctgaccgactggctgcgggctaaggccagcttcgtgatcgagggcctgaaggaggccgacaaggacgagttctgcagatgcgagctgaagctgcagaagtggtacggggacctgcggggaaagcccttcgccatcgaagccgagaacagcatcctggacatcagcggcttcagcaagcagtacaactgtgccttcatctggcagaaggacggcgtgaagaagctgaacctgtacctgatcatcaactacttcaagggcggcaagctgcggttcaagaagatcaaacctgaagccttcgaagccaacagattctacaccgtgatcaacaaaaagagcggcgagatcgtgcccatggaggtgaacttcaacttcgacgaccccaacctgatcatcctgcctctggcctttggcaagagacagggcagagaattcatctggaacgacctgctgtccctggaaaccggcagcctgaagctggccaacggaagagtgatcgagaagacactgtacaacagaagaacccggcaggatgagcctgccctgttcgtggccctgaccttcgagcggcgggaggtcctggactcctccaatatcaaaccaatgaacctgatcggcgtggcaagaggcgaaaacatccccgccgtgatcgccctgaccgaccccgagggctgcccactgagccggtttaaggatagcctgggaaacccaacccacatcctgagaatcggcgagagctataaggagaagcagcggaccatccaggccaagaaggaggtggagcagcggagagccggcggctacagccggaagtacgccagcaaagccaagaatctggcagacgatatggtgagaaacaccgctagagatctgctgtactacgccgtgacccaggatgccatgctgatcttcgccaacctgagccggggcttcggccggcagggcaagcggaccttcatggccgagagacagtacacacggatggaggactggctgaccgccaagctggcctacgagggcctgagcaagacctacctgtccaagacactggcccagtacacctccaagacatgcagcaactgtgggtttaccatcaccagcgccgactacgacagggtgctggagaagctgaagaagacagcaacaggctggatgaccacaattaacggcaaggagctgaaggtggagggccagattacctactacaacagatacaagagacagaacgtagtcaaggacctgtccgtcgagctggatagactgagcgaagaatctgtgaacaacgacatctcctcctggacaaagggcagaagcggagaagctctgagcctcctgaagaaaagattctcccatagacccgtgcaggagaagttcgtgtgcctgaactgcggcttcgagacacacgcagccgagcaagccgccctgaacatcgccagatcctggctgttcctgcggagccaggagtacaagaaataccagacaaacaagacaaccggcaacaccgataagagagccttcgtcgagacctggcagtccttttaccggaagaagcttaaggaggtgtggaaacctgccgtgcggtctggcggatctggcggaggctcccaggagctgctgaccttcaaggacgtgagcgtggagttcagcatggacgagtgggcctgcctggaccccgcccagcagaccctgtaccaggacgtgatgctggagaactacaggcacctggtgttcctgggcctgaccctgagcaagcccgacctgatcacctgcctggagcagagcaaggagccctggaaggtgaagagccaccagaccgtggtgaagcaccccgccgtgagcgacccccccggcggcccaagcagcggcgcccctcctcccagcggcggcagcccagccggctccccaacctctaccgaggagggcacctctgagtccgccacccccgagagcggccctggcacctccaccgagcccagcgagggcagcgcacccggcagccctgccggcagccccacctccacagaggagggaaccagcaccgagcccagcgaaggcagcgccccaggcaccagcaccgagcctagtgagcaggagattaaacggatcaacaagatcagaagaagacttgtgaaagacagcaacaccaagaaggccggcaagacaggccccatgaaaaccctgctggttagagtgatgacacccgatctgagagagcggctggaaaacctgagaaagaagcctgaaaatatcccccagcccatcagcaatacatctagagccaacctgaataagctgctgaccgattacaccgaaatgaagaaggcgatcctgcatgtgtactgggaagagttccagaaggaccctgtgggcctgatgagccgggtggcccagcctgccagcaagaagatcgatcagaacaagctgaaacctgagatggacgagaagggcaacctgaccaccgccggctttgcctgctctcagtgtggccagcccctgttcgtgtacaagctggagcaggtgtctgagaagggcaaggcttacaccaactacttcggacggtgcaatgtggccgagcacgaaaagctgatcctgctggcccagctgaagcccgagaaggatagcgacgaagccgtgacatatagcctgggaaagtttgggcagagggccctggatttctacagcattcatgtgaccaaggagtccacccaccccgtgaagcccctggcccagatcgccggaaacagatacgcctccggacctgtgggaaaggccctgagcgacgcatgtatgggcacaatcgcctccttcctgtctaagtaccaggacatcatcatcgaacaccagaaggtggtgaagggcaaccagaagagactggagagcctgcgggagctggccggcaaggaaaacctggaataccctagcgtgaccctgccacctcagcctcacaccaaggagggcgttgatgcctacaacgaagtgatcgcccgggtgcgaatgtgggtgaacctgaacctgtggcagaagctgaagctaagcagagatgatgccaagcctctgctgagactgaagggattcccttcctttcctctggtcgagagacaggccaacgaagtggactggtgggacatggtgtgtaacgtgaagaagctgatcaacgagaaaaaggaggatggcaaggtgttttggcagaatctggctggctacaagagacaggaagccctgagaccatacctgagcagcgaggaagatcggaagaagggaaagaaattcgctcggtaccagctgggcgacctgctgctgcacctggaaaagaagcacggcgaggactggggaaaggtgtacgacgaggcctgggagcggattgacaagaaagtggaaggcctgagcaagcacatcaagctggaagaggaacggagaagcgaggacgcccagagcaaggccgccctgaccgactggctgcgggctaaggccagcttcgtgatcgagggcctgaaggaggccgacaaggacgagttctgcagatgcgagctgaagctgcagaagtggtacggggacctgcggggaaagcccttcgccatcgaagccgagaacagcatcctggacatcagcggcttcagcaagcagtacaactgtgccttcatctggcagaaggacggcgtgaagaagctgaacctgtacctgatcatcaactacttcaagggcggcaagctgcggttcaagaagatcaaacctgaagccttcgaagccaacagattctacaccgtgatcaacaaaaagagcggcgagatcgtgcccatggaggtgaacttcaacttcgacgaccccaacctgatcatcctgcctctggcctttggcaagagacagggcagagaattcatctggaacgacctgctgtccctggaaaccggcagcctgaagctggccaacggaagagtgatcgagaagacactgtacaacagaagaacccggcaggatgagcctgccctgttcgtggccctgaccttcgagcggcgggaggtcctggactcctccaatatcaaaccaatgaacctgatcggcgtggcaagaggcgaaaacatccccgccgtgatcgccctgaccgaccccgagggctgcccactgagccggtttaaggatagcctgggaaacccaacccacatcctgagaatcggcgagagctataaggagaagcagcggaccatccaggccaagaaggaggtggagcagcggagagccggcggctacagccggaagtacgccagcaaagccaagaatctggcagacgatatggtgagaaacaccgctagagatctgctgtactacgccgtgacccaggatgccatgctgatcttcgccaacctgagccggggcttcggccggcagggcaagcggaccttcatggccgagagacagtacacacggatggaggactggctgaccgccaagctggcctacgagggcctgagcaagacctacctgtccaagacactggcccagtacacctccaagacatgcagcaactgtgggtttaccatcaccagcgccgactacgacagggtgctggagaagctgaagaagacagcaacaggctggatgaccacaattaacggcaaggagctgaaggtggagggccagattacctactacaacagatacaagagacagaacgtagtcaaggacctgtccgtcgagctggatagactgagcgaagaatctgtgaacaacgacatctcctcctggacaaagggcagaagcggagaagctctgagcctcctgaagaaaagattctcccatagacccgtgcaggagaagttcgtgtgcctgaactgcggcttcgagacacacgcagccgagcaagccgccctgaacatcgccagatcctggctgttcctgcggagccaggagtacaagaaataccagacaaacaagacaaccggcaacaccgataagagagccttcgtcgagacctggcagtccttttaccggaagaagcttaaggaggtgtggaaacctgccgtgcggtctggcggatctggcggaggctcctcaggagctgctgaccttcaaggacgtgagcgtggagttcagcatggacgagtgggcctgcctggaccccgcccagcagaccctgtaccaggacgtgatgctggagaactacaggcacctggtgttcctgggcctgaccctgagcaagcccgacctgatcacctgcctggagcagagcaaggagccctggaaggtgaagagccaccagaccgtggtgaagcaccccgccgtgagcgacccccccggatctggctccggcagcggccccaagaaaaagagaaaagtctaagctgccttctgcggggcttgccttctggccatgcccttcttctctcccttgcacctgtacctcttggtctttgaataaagcctgagtaggaaggctagcaaaaaaaaaaaaaaaaaaaaaaaaaaaaaaaaaaaaaaaaaaaaaaaaaaaaaaaaaaaaaaaaaaaaaaaaaaaaaaaa

SEQ ID NO: 16173 - RNA, 9551 nt, synthetic construct
  source 1..9551: mol_type = other RNA
aggaaataagagagaaaagaagagtaagaagaaatataagagccaccatggcccctaagaagaagcgtaaagtgagccggatggaacgcctcgtctacgaggtgcggcagaagtgcagaaacatcgaggacatctgcatctcctgcggatctctgaacgtgaccctggagcacccactgttcatcggcggcatgtgccagaactgtaaaaactgttttctggagtgtgcctatcaatacgacgatgacggctaccagagctactgcaccatctgttgcggcggaagagaggtgctgatgtgtggaaataacaactgctgccggtgcttctgcgtggaatgcgtggacctgctggtgggccccggcgccgcccaggccgctattaaggaagatccttggaactgctacatgtgcggccacaagggcacatacggcctgctgagacggagagaggactggcctagcagactgcagatgttcttcgccaataaccacgaccaggagttcgacccccctaaggtgtaccctcccgtccccgccgagaagagaaagcccatccgggtcctgagcctgttcgatggcatcgccaccggtctgctggtgctgaaggacctgggcatccaggtggataggtacattgcctccgaggtgtgcgaggactccatcaccgtgggaatggtgcgtcatcagggcaagatcatgtacgtgggcgacgtgcggagcgtgacacagaagcatatccaggagtggggccctttcgacctggtgatcggcggcagcccttgcaatgacctgagcatcgtgaacccagcccggaagggcctgtacgagggaaccggcagactgttcttcgagttttacagactgctgcacgacgcccggcctaaggaaggcgacgaccggcccttcttttggctgttcgagaatgtggtggccatgggagtcagcgacaagcgggatattagccggttcctggagagcaaccccgtgatgatcgatgccaaggaagtgagcgccgcccaccgggccagatacttctggggcaatctgcctggcatgaacagacccctggccagcaccgtgaacgacaagctggagctgcaggagtgcctggagcacggccggatcgccaagttcagcaaggtgagaaccatcaccacccgaagcaacagcatcaaacaaggcaaggaccagcactttcctgtgttcatgaacgagaaggaggacatcctgtggtgtaccgagatggagagagtgttcgggttcccagtccactacacagatgtcagcaacatgtctagactggccagacagagactgctgggaagaagctggtccgtccctgtgatcagacacctgttcgcccctctgaaggagtacttcgcctgcgtgagcagcggcaacagcaacgccaacagccggggccccagcttctctagcggcctggtgccactgtccctgagagggagccacatgggccccatggagatctacaaaaccgtgagcgcctggaagcggcagcctgtgcgcgtgctgagcctgtttcggaatatcgataaagtcctgaaaagcctgggattcctggagagcggctctggctccggcggtggcaccctgaagtacgtggaggatgtgacaaacgtggtcagacgggatgtggagaagtggggccccttcgatctggtgtacggcagcacccaacccctgggcagctcttgtgaccggtgccctggctggtacatgtttcagttccaccggatcctgcagtacgccctgccgagacaggagtcccagcggccattcttttggattttcatggacaacttgctgctgaccgaggatgaccaggaaactaccactcggttcctgcagaccgaagccgtgaccctgcaggacgtgagaggccgggactaccagaacgccatgcgggtgtggtccaacatccctggactgaaaagcaagcacgcacctctgacccctaaagaagaggagtacctgcaggcccaggtgcggagcagaagcaagctggacgcccctaaggtggatctgctggtgaagaattgcctcctgcccctgagagagtacttcaagtatttcagccagaatagtctgcccctgggaggcagcggcggcggcgccctggtgacatttgaggacgtcgccgtgcggttcacccaggaggaatgggctctgctggatccttctcagaaaatcctgtaccgggacgtgatgagagagacataccggaatctgacctccgtgggcatcaactgggaatgttgggaccttgaagcctgcttcagaagcctgggaagaaacctgagagtgcaggtggtgaagagaaagtgcgagctgaccaacagcggcccctgcgccgagggcggcccaagcagcggcgcccctcctcccagcggcggcagcccagccggctccccaacctctaccgaggagggcacctctgagtccgccacccccgagagcggccctggcacctccaccgagcccagcgagggcagcgcacccggcagccctgccggcagccccacctccacagaggagggaaccagcaccgagcccagcgaaggcagcgccccaggcaccagcaccgagcctagtgagcaggagattaaacggatcaacaagatcagaagaagacttgtgaaagacagcaacaccaagaaggccggcaagacaggccccatgaaaaccctgctggttagagtgatgacacccgatctgagagagcggctggaaaacctgagaaagaagcctgaaaatatcccccagcccatcagcaatacatctagagccaacctgaataagctgctgaccgattacaccgaaatgaagaaggcgatcctgcatgtgtactgggaagagttccagaaggaccctgtgggcctgatgagccgggtggcccagcctgccagcaagaagatcgatcagaacaagctgaaacctgagatggacgagaagggcaacctgaccaccgccggctttgcctgctctcagtgtggccagcccctgttcgtgtacaagctggagcaggtgtctgagaagggcaaggcttacaccaactacttcggacggtgcaatgtggccgagcacgaaaagctgatcctgctggcccagctgaagcccgagaaggatagcgacgaagccgtgacatatagcctgggaaagtttgggcagagggccctggatttctacagcattcatgtgaccaaggagtccacccaccccgtgaagcccctggcccagatcgccggaaacagatacgcctccggacctgtgggaaaggccctgagcgacgcatgtatgggcacaatcgcctccttcctgtctaagtaccaggacatcatcatcgaacaccagaaggtggtgaagggcaaccagaagagactggagagcctgcgggagctggccggcaaggaaaacctggaataccctagcgtgaccctgccacctcagcctcacaccaaggagggcgttgatgcctacaacgaagtgatcgcccgggtgcgaatgtgggtgaacctgaacctgtggcagaagctgaagctaagcagagatgatgccaagcctctgctgagactgaagggattcccttcctttcctctggtcgagagacaggccaacgaagtggactggtgggacatggtgtgtaacgtgaagaagctgatcaacgagaaaaaggaggatggcaaggtgttttggcagaatctggctggctacaagagacaggaagccctgagaccatacctgagcagcgaggaagatcggaagaagggaaagaaattcgctcggtaccagctgggcgacctgctgctgcacctggaaaagaagcacggcgaggactggggaaaggtgtacgacgaggcctgggagcggattgacaagaaagtggaaggcctgagcaagcacatcaagctggaagaggaacggagaagcgaggacgcccagagcaaggccgccctgaccgactggctgcgggctaaggccagcttcgtgatcgagggcctgaaggaggccgacaaggacgagttctgcagatgcgagctgaagctgcagaagtggtacggggacctgcggggaaagcccttcgccatcgaagccgagaacagcatcctggacatcagcggcttcagcaagcagtacaactgtgccttcatctggcagaaggacggcgtgaagaagctgaacctgtacctgatcatcaactacttcaagggcggcaagctgcggttcaagaagatcaaacctgaagccttcgaagccaacagattctacaccgtgatcaacaaaaagagcggcgagatcgtgcccatggaggtgaacttcaacttcgacgaccccaacctgatcatcctgcctctggcctttggcaagagacagggcagagaattcatctggaacgacctgctgtccctggaaaccggcagcctgaagctggccaacggaagagtgatcgagaagacactgtacaacagaagaacccggcaggatgagcctgccctgttcgtggccctgaccttcgagcggcgggaggtcctggactcctccaatatcaaaccaatgaacctgatcggcgtggcaagaggcgaaaacatccccgccgtgatcgccctgaccgaccccgagggctgcccactgagccggtttaaggatagcctgggaaacccaacccacatcctgagaatcggcgagagctataaggagaagcagcggaccatccaggccaagaaggaggtggagcagcggagagccggcggctacagccggaagtacgccagcaaagccaagaatctggcagacgatatggtgagaaacaccgctagagatctgctgtactacgccgtgacccaggatgccatgctgatcttcgccaacctgagccggggcttcggccggcagggcaagcggaccttcatggccgagagacagtacacacggatggaggactggctgaccgccaagctggcctacgagggcctgagcaagacctacctgtccaagacactggcccagtacacctccaagacatgcagcaactgtgggtttaccatcaccagcgccgactacgacagggtgctggagaagctgaagaagacagcaacaggctggatgaccacaattaacggcaaggagctgaaggtggagggccagattacctactacaacagatacaagagacagaacgtagtcaaggacctgtccgtcgagctggatagactgagcgaagaatctgtgaacaacgacatctcctcctggacaaagggcagaagcggagaagctctgagcctcctgaagaaaagattctcccatagacccgtgcaggagaagttcgtgtgcctgaactgcggcttcgagacacacgcagccgagcaagccgccctgaacatcgccagatcctggctgttcctgcggagccaggagtacaagaaataccagacaaacaagacaaccggcaacaccgataagagagccttcgtcgagacctggcagtccttttaccggaagaagcttaaggaggtgtggaaacctgccgtgcggtctggcggatctggcggaggctccgtgacctacgaggacgtgaccgtgaccttcacccaggaggagtgggccctgctgaaccccagcgagaagaagctgtacagggacgtgatgtgggagaacctgaggaacatcttcagcaccggcaagatccagggcgacaactacaacgaggagcagcacaaccaccagggcagcaagcagagctgcagggtggtgaagatcagcggcggccagaagaggagccagaacgacgagaagcagaggatgcagagcgagggcaagagctacgagtgcgagggcggcccaagcagcggcgcccctcctcccagcggcggcagcccagccggctccccaacctctaccgaggagggcacctctgagtccgccacccccgagagcggccctggcacctccaccgagcccagcgagggcagcgcacccggcagccctgccggcagccccacctccacagaggagggaaccagcaccgagcccagcgaaggcagcgccccaggcaccagcaccgagcctagtgagcaggagattaaacggatcaacaagatcagaagaagacttgtgaaagacagcaacaccaagaaggccggcaagacaggccccatgaaaaccctgctggttagagtgatgacacccgatctgagagagcggctggaaaacctgagaaagaagcctgaaaatatcccccagcccatcagcaatacatctagagccaacctgaataagctgctgaccgattacaccgaaatgaagaaggcgatcctgcatgtgtactgggaagagttccagaaggaccctgtgggcctgatgagccgggtggcccagcctgccagcaagaagatcgatcagaacaagctgaaacctgagatggacgagaagggcaacctgaccaccgccggctttgcctgctctcagtgtggccagcccctgttcgtgtacaagctggagcaggtgtctgagaagggcaaggcttacaccaactacttcggacggtgcaatgtggccgagcacgaaaagctgatcctgctggcccagctgaagcccgagaaggatagcgacgaagccgtgacatatagcctgggaaagtttgggcagagggccctggatttctacagcattcatgtgaccaaggagtccacccaccccgtgaagcccctggcccagatcgccggaaacagatacgcctccggacctgtgggaaaggccctgagcgacgcatgtatgggcacaatcgcctccttcctgtctaagtaccaggacatcatcatcgaacaccagaaggtggtgaagggcaaccagaagagactggagagcctgcgggagctggccggcaaggaaaacctggaataccctagcgtgaccctgccacctcagcctcacaccaaggagggcgttgatgcctacaacgaagtgatcgcccgggtgcgaatgtgggtgaacctgaacctgtggcagaagctgaagctaagcagagatgatgccaagcctctgctgagactgaagggattcccttcctttcctctggtcgagagacaggccaacgaagtggactggtgggacatggtgtgtaacgtgaagaagctgatcaacgagaaaaaggaggatggcaaggtgttttggcagaatctggctggctacaagagacaggaagccctgagaccatacctgagcagcgaggaagatcggaagaagggaaagaaattcgctcggtaccagctgggcgacctgctgctgcacctggaaaagaagcacggcgaggactggggaaaggtgtacgacgaggcctgggagcggattgacaagaaagtggaaggcctgagcaagcacatcaagctggaagaggaacggagaagcgaggacgcccagagcaaggccgccctgaccgactggctgcgggctaaggccagcttcgtgatcgagggcctgaaggaggccgacaaggacgagttctgcagatgcgagctgaagctgcagaagtggtacggggacctgcggggaaagcccttcgccatcgaagccgagaacagcatcctggacatcagcggcttcagcaagcagtacaactgtgccttcatctggcagaaggacggcgtgaagaagctgaacctgtacctgatcatcaactacttcaagggcggcaagctgcggttcaagaagatcaaacctgaagccttcgaagccaacagattctacaccgtgatcaacaaaaagagcggcgagatcgtgcccatggaggtgaacttcaacttcgacgaccccaacctgatcatcctgcctctggcctttggcaagagacagggcagagaattcatctggaacgacctgctgtccctggaaaccggcagcctgaagctggccaacggaagagtgatcgagaagacactgtacaacagaagaacccggcaggatgagcctgccctgttcgtggccctgaccttcgagcggcgggaggtcctggactcctccaatatcaaaccaatgaacctgatcggcgtggcaagaggcgaaaacatccccgccgtgatcgccctgaccgaccccgagggctgcccactgagccggtttaaggatagcctgggaaacccaacccacatcctgagaatcggcgagagctataaggagaagcagcggaccatccaggccaagaaggaggtggagcagcggagagccggcggctacagccggaagtacgccagcaaagccaagaatctggcagacgatatggtgagaaacaccgctagagatctgctgtactacgccgtgacccaggatgccatgctgatcttcgccaacctgagccggggcttcggccggcagggcaagcggaccttcatggccgagagacagtacacacggatggaggactggctgaccgccaagctggcctacgagggcctgagcaagacctacctgtccaagacactggcccagtacacctccaagacatgcagcaactgtgggtttaccatcaccagcgccgactacgacagggtgctggagaagctgaagaagacagcaacaggctggatgaccacaattaacggcaaggagctgaaggtggagggccagattacctactacaacagatacaagagacagaacgtagtcaaggacctgtccgtcgagctggatagactgagcgaagaatctgtgaacaacgacatctcctcctggacaaagggcagaagcggagaagctctgagcctcctgaagaaaagattctcccatagacccgtgcaggagaagttcgtgtgcctgaactgcggcttcgagacacacgcagccgagcaagccgccctgaacatcgccagatcctggctgttcctgcggagccaggagtacaagaaataccagacaaacaagacaaccggcaacaccgataagagagccttcgtcgagacctggcagtccttttaccggaagaagcttaaggaggtgtggaaacctgccgtgcggtctggcggatctggcggaggctcctgtgacctacgaggacgtgaccgtgaccttcacccaggaggagtgggccctgctgaaccccagcgagaagaagctgtacagggacgtgatgtgggagaacctgaggaacatcttcagcaccggcaagatccagggcgacaactacaacgaggagcagcacaaccaccagggcagcaagcagagctgcagggtggtgaagatcagcggcggccagaagaggagccagaacgacgagaagcagaggatgcagagcgagggcaagagctacgagtgcgagggatctggctccggcagcggccccaagaaaaagagaaaagtctaagctgccttctgcggggcttgccttctggccatgcccttcttctctcccttgcacctgtacctcttggtctttgaataaagcctgagtaggaaggctagcaaaaaaaaaaaaaaaaaaaaaaaaaaaaaaaaaaaaaaaaaaaaaaaaaaaaaaaaaaaaaaaaaaaaaaaaaaaaaaaa

SEQ ID NO: 16174 - RNA, 9485 nt, synthetic construct
  source 1..9485: mol_type = other RNA
aggaaataagagagaaaagaagagtaagaagaaatataagagccaccatggcccctaagaagaagcgtaaagtgagccggatggaacgcctcgtctacgaggtgcggcagaagtgcagaaacatcgaggacatctgcatctcctgcggatctctgaacgtgaccctggagcacccactgttcatcggcggcatgtgccagaactgtaaaaactgttttctggagtgtgcctatcaatacgacgatgacggctaccagagctactgcaccatctgttgcggcggaagagaggtgctgatgtgtggaaataacaactgctgccggtgcttctgcgtggaatgcgtggacctgctggtgggccccggcgccgcccaggccgctattaaggaagatccttggaactgctacatgtgcggccacaagggcacatacggcctgctgagacggagagaggactggcctagcagactgcagatgttcttcgccaataaccacgaccaggagttcgacccccctaaggtgtaccctcccgtccccgccgagaagagaaagcccatccgggtcctgagcctgttcgatggcatcgccaccggtctgctggtgctgaaggacctgggcatccaggtggataggtacattgcctccgaggtgtgcgaggactccatcaccgtgggaatggtgcgtcatcagggcaagatcatgtacgtgggcgacgtgcggagcgtgacacagaagcatatccaggagtggggccctttcgacctggtgatcggcggcagcccttgcaatgacctgagcatcgtgaacccagcccggaagggcctgtacgagggaaccggcagactgttcttcgagttttacagactgctgcacgacgcccggcctaaggaaggcgacgaccggcccttcttttggctgttcgagaatgtggtggccatgggagtcagcgacaagcgggatattagccggttcctggagagcaaccccgtgatgatcgatgccaaggaagtgagcgccgcccaccgggccagatacttctggggcaatctgcctggcatgaacagacccctggccagcaccgtgaacgacaagctggagctgcaggagtgcctggagcacggccggatcgccaagttcagcaaggtgagaaccatcaccacccgaagcaacagcatcaaacaaggcaaggaccagcactttcctgtgttcatgaacgagaaggaggacatcctgtggtgtaccgagatggagagagtgttcgggttcccagtccactacacagatgtcagcaacatgtctagactggccagacagagactgctgggaagaagctggtccgtccctgtgatcagacacctgttcgcccctctgaaggagtacttcgcctgcgtgagcagcggcaacagcaacgccaacagccggggccccagcttctctagcggcctggtgccactgtccctgagagggagccacatgggccccatggagatctacaaaaccgtgagcgcctggaagcggcagcctgtgcgcgtgctgagcctgtttcggaatatcgataaagtcctgaaaagcctgggattcctggagagcggctctggctccggcggtggcaccctgaagtacgtggaggatgtgacaaacgtggtcagacgggatgtggagaagtggggccccttcgatctggtgtacggcagcacccaacccctgggcagctcttgtgaccggtgccctggctggtacatgtttcagttccaccggatcctgcagtacgccctgccgagacaggagtcccagcggccattcttttggattttcatggacaacttgctgctgaccgaggatgaccaggaaactaccactcggttcctgcagaccgaagccgtgaccctgcaggacgtgagaggccgggactaccagaacgccatgcgggtgtggtccaacatccctggactgaaaagcaagcacgcacctctgacccctaaagaagaggagtacctgcaggcccaggtgcggagcagaagcaagctggacgcccctaaggtggatctgctggtgaagaattgcctcctgcccctgagagagtacttcaagtatttcagccagaatagtctgcccctgggaggcagcggcggcggcgccctggtgacatttgaggacgtcgccgtgcggttcacccaggaggaatgggctctgctggatccttctcagaaaatcctgtaccgggacgtgatgagagagacataccggaatctgacctccgtgggcatcaactgggaatgttgggaccttgaagcctgcttcagaagcctgggaagaaacctgagagtgcaggtggtgaagagaaagtgcgagctgaccaacagcggcccctgcgccgagggcggcccaagcagcggcgcccctcctcccagcggcggcagcccagccggctccccaacctctaccgaggagggcacctctgagtccgccacccccgagagcggccctggcacctccaccgagcccagcgagggcagcgcacccggcagccctgccggcagccccacctccacagaggagggaaccagcaccgagcccagcgaaggcagcgccccaggcaccagcaccgagcctagtgagcaggagattaaacggatcaacaagatcagaagaagacttgtgaaagacagcaacaccaagaaggccggcaagacaggccccatgaaaaccctgctggttagagtgatgacacccgatctgagagagcggctggaaaacctgagaaagaagcctgaaaatatcccccagcccatcagcaatacatctagagccaacctgaataagctgctgaccgattacaccgaaatgaagaaggcgatcctgcatgtgtactgggaagagttccagaaggaccctgtgggcctgatgagccgggtggcccagcctgccagcaagaagatcgatcagaacaagctgaaacctgagatggacgagaagggcaacctgaccaccgccggctttgcctgctctcagtgtggccagcccctgttcgtgtacaagctggagcaggtgtctgagaagggcaaggcttacaccaactacttcggacggtgcaatgtggccgagcacgaaaagctgatcctgctggcccagctgaagcccgagaaggatagcgacgaagccgtgacatatagcctgggaaagtttgggcagagggccctggatttctacagcattcatgtgaccaaggagtccacccaccccgtgaagcccctggcccagatcgccggaaacagatacgcctccggacctgtgggaaaggccctgagcgacgcatgtatgggcacaatcgcctccttcctgtctaagtaccaggacatcatcatcgaacaccagaaggtggtgaagggcaaccagaagagactggagagcctgcgggagctggccggcaaggaaaacctggaataccctagcgtgaccctgccacctcagcctcacaccaaggagggcgttgatgcctacaacgaagtgatcgcccgggtgcgaatgtgggtgaacctgaacctgtggcagaagctgaagctaagcagagatgatgccaagcctctgctgagactgaagggattcccttcctttcctctggtcgagagacaggccaacgaagtggactggtgggacatggtgtgtaacgtgaagaagctgatcaacgagaaaaaggaggatggcaaggtgttttggcagaatctggctggctacaagagacaggaagccctgagaccatacctgagcagcgaggaagatcggaagaagggaaagaaattcgctcggtaccagctgggcgacctgctgctgcacctggaaaagaagcacggcgaggactggggaaaggtgtacgacgaggcctgggagcggattgacaagaaagtggaaggcctgagcaagcacatcaagctggaagaggaacggagaagcgaggacgcccagagcaaggccgccctgaccgactggctgcgggctaaggccagcttcgtgatcgagggcctgaaggaggccgacaaggacgagttctgcagatgcgagctgaagctgcagaagtggtacggggacctgcggggaaagcccttcgccatcgaagccgagaacagcatcctggacatcagcggcttcagcaagcagtacaactgtgccttcatctggcagaaggacggcgtgaagaagctgaacctgtacctgatcatcaactacttcaagggcggcaagctgcggttcaagaagatcaaacctgaagccttcgaagccaacagattctacaccgtgatcaacaaaaagagcggcgagatcgtgcccatggaggtgaacttcaacttcgacgaccccaacctgatcatcctgcctctggcctttggcaagagacagggcagagaattcatctggaacgacctgctgtccctggaaaccggcagcctgaagctggccaacggaagagtgatcgagaagacactgtacaacagaagaacccggcaggatgagcctgccctgttcgtggccctgaccttcgagcggcgggaggtcctggactcctccaatatcaaaccaatgaacctgatcggcgtggcaagaggcgaaaacatccccgccgtgatcgccctgaccgaccccgagggctgcccactgagccggtttaaggatagcctgggaaacccaacccacatcctgagaatcggcgagagctataaggagaagcagcggaccatccaggccaagaaggaggtggagcagcggagagccggcggctacagccggaagtacgccagcaaagccaagaatctggcagacgatatggtgagaaacaccgctagagatctgctgtactacgccgtgacccaggatgccatgctgatcttcgccaacctgagccggggcttcggccggcagggcaagcggaccttcatggccgagagacagtacacacggatggaggactggctgaccgccaagctggcctacgagggcctgagcaagacctacctgtccaagacactggcccagtacacctccaagacatgcagcaactgtgggtttaccatcaccagcgccgactacgacagggtgctggagaagctgaagaagacagcaacaggctggatgaccacaattaacggcaaggagctgaaggtggagggccagattacctactacaacagatacaagagacagaacgtagtcaaggacctgtccgtcgagctggatagactgagcgaagaatctgtgaacaacgacatctcctcctggacaaagggcagaagcggagaagctctgagcctcctgaagaaaagattctcccatagacccgtgcaggagaagttcgtgtgcctgaactgcggcttcgagacacacgcagccgagcaagccgccctgaacatcgccagatcctggctgttcctgcggagccaggagtacaagaaataccagacaaacaagacaaccggcaacaccgataagagagccttcgtcgagacctggcagtccttttaccggaagaagcttaaggaggtgtggaaacctgccgtgcggtctggcggatctggcggaggctccgcccaggcccccctgagcttcgaggacgtggccgtgagcttcagcagggaggagtggaggctgctggtgcccgcccagaaggacctgtacagggacgtgatgctggagaactacaggaacctggtgagcgtgggctaccaggccagcgagcccgacagcctgttccagctggagcacggcggccccctgtgggtggtggagggcgccgcccccaggcccccctgccccgaggagatctgggagggcggcccaagcagcggcgcccctcctcccagcggcggcagcccagccggctccccaacctctaccgaggagggcacctctgagtccgccacccccgagagcggccctggcacctccaccgagcccagcgagggcagcgcacccggcagccctgccggcagccccacctccacagaggagggaaccagcaccgagcccagcgaaggcagcgccccaggcaccagcaccgagcctagtgagcaggagattaaacggatcaacaagatcagaagaagacttgtgaaagacagcaacaccaagaaggccggcaagacaggccccatgaaaaccctgctggttagagtgatgacacccgatctgagagagcggctggaaaacctgagaaagaagcctgaaaatatcccccagcccatcagcaatacatctagagccaacctgaataagctgctgaccgattacaccgaaatgaagaaggcgatcctgcatgtgtactgggaagagttccagaaggaccctgtgggcctgatgagccgggtggcccagcctgccagcaagaagatcgatcagaacaagctgaaacctgagatggacgagaagggcaacctgaccaccgccggctttgcctgctctcagtgtggccagcccctgttcgtgtacaagctggagcaggtgtctgagaagggcaaggcttacaccaactacttcggacggtgcaatgtggccgagcacgaaaagctgatcctgctggcccagctgaagcccgagaaggatagcgacgaagccgtgacatatagcctgggaaagtttgggcagagggccctggatttctacagcattcatgtgaccaaggagtccacccaccccgtgaagcccctggcccagatcgccggaaacagatacgcctccggacctgtgggaaaggccctgagcgacgcatgtatgggcacaatcgcctccttcctgtctaagtaccaggacatcatcatcgaacaccagaaggtggtgaagggcaaccagaagagactggagagcctgcgggagctggccggcaaggaaaacctggaataccctagcgtgaccctgccacctcagcctcacaccaaggagggcgttgatgcctacaacgaagtgatcgcccgggtgcgaatgtgggtgaacctgaacctgtggcagaagctgaagctaagcagagatgatgccaagcctctgctgagactgaagggattcccttcctttcctctggtcgagagacaggccaacgaagtggactggtgggacatggtgtgtaacgtgaagaagctgatcaacgagaaaaaggaggatggcaaggtgttttggcagaatctggctggctacaagagacaggaagccctgagaccatacctgagcagcgaggaagatcggaagaagggaaagaaattcgctcggtaccagctgggcgacctgctgctgcacctggaaaagaagcacggcgaggactggggaaaggtgtacgacgaggcctgggagcggattgacaagaaagtggaaggcctgagcaagcacatcaagctggaagaggaacggagaagcgaggacgcccagagcaaggccgccctgaccgactggctgcgggctaaggccagcttcgtgatcgagggcctgaaggaggccgacaaggacgagttctgcagatgcgagctgaagctgcagaagtggtacggggacctgcggggaaagcccttcgccatcgaagccgagaacagcatcctggacatcagcggcttcagcaagcagtacaactgtgccttcatctggcagaaggacggcgtgaagaagctgaacctgtacctgatcatcaactacttcaagggcggcaagctgcggttcaagaagatcaaacctgaagccttcgaagccaacagattctacaccgtgatcaacaaaaagagcggcgagatcgtgcccatggaggtgaacttcaacttcgacgaccccaacctgatcatcctgcctctggcctttggcaagagacagggcagagaattcatctggaacgacctgctgtccctggaaaccggcagcctgaagctggccaacggaagagtgatcgagaagacactgtacaacagaagaacccggcaggatgagcctgccctgttcgtggccctgaccttcgagcggcgggaggtcctggactcctccaatatcaaaccaatgaacctgatcggcgtggcaagaggcgaaaacatccccgccgtgatcgccctgaccgaccccgagggctgcccactgagccggtttaaggatagcctgggaaacccaacccacatcctgagaatcggcgagagctataaggagaagcagcggaccatccaggccaagaaggaggtggagcagcggagagccggcggctacagccggaagtacgccagcaaagccaagaatctggcagacgatatggtgagaaacaccgctagagatctgctgtactacgccgtgacccaggatgccatgctgatcttcgccaacctgagccggggcttcggccggcagggcaagcggaccttcatggccgagagacagtacacacggatggaggactggctgaccgccaagctggcctacgagggcctgagcaagacctacctgtccaagacactggcccagtacacctccaagacatgcagcaactgtgggtttaccatcaccagcgccgactacgacagggtgctggagaagctgaagaagacagcaacaggctggatgaccacaattaacggcaaggagctgaaggtggagggccagattacctactacaacagatacaagagacagaacgtagtcaaggacctgtccgtcgagctggatagactgagcgaagaatctgtgaacaacgacatctcctcctggacaaagggcagaagcggagaagctctgagcctcctgaagaaaagattctcccatagacccgtgcaggagaagttcgtgtgcctgaactgcggcttcgagacacacgcagccgagcaagccgccctgaacatcgccagatcctggctgttcctgcggagccaggagtacaagaaataccagacaaacaagacaaccggcaacaccgataagagagccttcgtcgagacctggcagtccttttaccggaagaagcttaaggaggtgtggaaacctgccgtgcggtctggcggatctggcggaggctcctgcccaggcccccctgagcttcgaggacgtggccgtgagcttcagcagggaggagtggaggctgctggtgcccgcccagaaggacctgtacagggacgtgatgctggagaactacaggaacctggtgagcgtgggctaccaggccagcgagcccgacagcctgttccagctggagcacggcggccccctgtgggtggtggagggcgccgcccccaggcccccctgccccgaggagatctgggagggatctggctccggcagcggccccaagaaaaagagaaaagtctaagctgccttctgcggggcttgccttctggccatgcccttcttctctcccttgcacctgtacctcttggtctttgaataaagcctgagtaggaaggctagcaaaaaaaaaaaaaaaaaaaaaaaaaaaaaaaaaaaaaaaaaaaaaaaaaaaaaaaaaaaaaaaaaaaaaaaaaaaaaaaa

SEQ ID NO: 16175 - RNA, 9485 nt, synthetic construct
  source 1..9485: mol_type = other RNA
aggaaataagagagaaaagaagagtaagaagaaatataagagccaccatggcccctaagaagaagcgtaaagtgagccggatggaacgcctcgtctacgaggtgcggcagaagtgcagaaacatcgaggacatctgcatctcctgcggatctctgaacgtgaccctggagcacccactgttcatcggcggcatgtgccagaactgtaaaaactgttttctggagtgtgcctatcaatacgacgatgacggctaccagagctactgcaccatctgttgcggcggaagagaggtgctgatgtgtggaaataacaactgctgccggtgcttctgcgtggaatgcgtggacctgctggtgggccccggcgccgcccaggccgctattaaggaagatccttggaactgctacatgtgcggccacaagggcacatacggcctgctgagacggagagaggactggcctagcagactgcagatgttcttcgccaataaccacgaccaggagttcgacccccctaaggtgtaccctcccgtccccgccgagaagagaaagcccatccgggtcctgagcctgttcgatggcatcgccaccggtctgctggtgctgaaggacctgggcatccaggtggataggtacattgcctccgaggtgtgcgaggactccatcaccgtgggaatggtgcgtcatcagggcaagatcatgtacgtgggcgacgtgcggagcgtgacacagaagcatatccaggagtggggccctttcgacctggtgatcggcggcagcccttgcaatgacctgagcatcgtgaacccagcccggaagggcctgtacgagggaaccggcagactgttcttcgagttttacagactgctgcacgacgcccggcctaaggaaggcgacgaccggcccttcttttggctgttcgagaatgtggtggccatgggagtcagcgacaagcgggatattagccggttcctggagagcaaccccgtgatgatcgatgccaaggaagtgagcgccgcccaccgggccagatacttctggggcaatctgcctggcatgaacagacccctggccagcaccgtgaacgacaagctggagctgcaggagtgcctggagcacggccggatcgccaagttcagcaaggtgagaaccatcaccacccgaagcaacagcatcaaacaaggcaaggaccagcactttcctgtgttcatgaacgagaaggaggacatcctgtggtgtaccgagatggagagagtgttcgggttcccagtccactacacagatgtcagcaacatgtctagactggccagacagagactgctgggaagaagctggtccgtccctgtgatcagacacctgttcgcccctctgaaggagtacttcgcctgcgtgagcagcggcaacagcaacgccaacagccggggccccagcttctctagcggcctggtgccactgtccctgagagggagccacatgggccccatggagatctacaaaaccgtgagcgcctggaagcggcagcctgtgcgcgtgctgagcctgtttcggaatatcgataaagtcctgaaaagcctgggattcctggagagcggctctggctccggcggtggcaccctgaagtacgtggaggatgtgacaaacgtggtcagacgggatgtggagaagtggggccccttcgatctggtgtacggcagcacccaacccctgggcagctcttgtgaccggtgccctggctggtacatgtttcagttccaccggatcctgcagtacgccctgccgagacaggagtcccagcggccattcttttggattttcatggacaacttgctgctgaccgaggatgaccaggaaactaccactcggttcctgcagaccgaagccgtgaccctgcaggacgtgagaggccgggactaccagaacgccatgcgggtgtggtccaacatccctggactgaaaagcaagcacgcacctctgacccctaaagaagaggagtacctgcaggcccaggtgcggagcagaagcaagctggacgcccctaaggtggatctgctggtgaagaattgcctcctgcccctgagagagtacttcaagtatttcagccagaatagtctgcccctgggaggcagcggcggcggcgccctggtgacatttgaggacgtcgccgtgcggttcacccaggaggaatgggctctgctggatccttctcagaaaatcctgtaccgggacgtgatgagagagacataccggaatctgacctccgtgggcatcaactgggaatgttgggaccttgaagcctgcttcagaagcctgggaagaaacctgagagtgcaggtggtgaagagaaagtgcgagctgaccaacagcggcccctgcgccgagggcggcccaagcagcggcgcccctcctcccagcggcggcagcccagccggctccccaacctctaccgaggagggcacctctgagtccgccacccccgagagcggccctggcacctccaccgagcccagcgagggcagcgcacccggcagccctgccggcagccccacctccacagaggagggaaccagcaccgagcccagcgaaggcagcgccccaggcaccagcaccgagcctagtgagcaggagattaaacggatcaacaagatcagaagaagacttgtgaaagacagcaacaccaagaaggccggcaagacaggccccatgaaaaccctgctggttagagtgatgacacccgatctgagagagcggctggaaaacctgagaaagaagcctgaaaatatcccccagcccatcagcaatacatctagagccaacctgaataagctgctgaccgattacaccgaaatgaagaaggcgatcctgcatgtgtactgggaagagttccagaaggaccctgtgggcctgatgagccgggtggcccagcctgccagcaagaagatcgatcagaacaagctgaaacctgagatggacgagaagggcaacctgaccaccgccggctttgcctgctctcagtgtggccagcccctgttcgtgtacaagctggagcaggtgtctgagaagggcaaggcttacaccaactacttcggacggtgcaatgtggccgagcacgaaaagctgatcctgctggcccagctgaagcccgagaaggatagcgacgaagccgtgacatatagcctgggaaagtttgggcagagggccctggatttctacagcattcatgtgaccaaggagtccacccaccccgtgaagcccctggcccagatcgccggaaacagatacgcctccggacctgtgggaaaggccctgagcgacgcatgtatgggcacaatcgcctccttcctgtctaagtaccaggacatcatcatcgaacaccagaaggtggtgaagggcaaccagaagagactggagagcctgcgggagctggccggcaaggaaaacctggaataccctagcgtgaccctgccacctcagcctcacaccaaggagggcgttgatgcctacaacgaagtgatcgcccgggtgcgaatgtgggtgaacctgaacctgtggcagaagctgaagctaagcagagatgatgccaagcctctgctgagactgaagggattcccttcctttcctctggtcgagagacaggccaacgaagtggactggtgggacatggtgtgtaacgtgaagaagctgatcaacgagaaaaaggaggatggcaaggtgttttggcagaatctggctggctacaagagacaggaagccctgagaccatacctgagcagcgaggaagatcggaagaagggaaagaaattcgctcggtaccagctgggcgacctgctgctgcacctggaaaagaagcacggcgaggactggggaaaggtgtacgacgaggcctgggagcggattgacaagaaagtggaaggcctgagcaagcacatcaagctggaagaggaacggagaagcgaggacgcccagagcaaggccgccctgaccgactggctgcgggctaaggccagcttcgtgatcgagggcctgaaggaggccgacaaggacgagttctgcagatgcgagctgaagctgcagaagtggtacggggacctgcggggaaagcccttcgccatcgaagccgagaacagcatcctggacatcagcggcttcagcaagcagtacaactgtgccttcatctggcagaaggacggcgtgaagaagctgaacctgtacctgatcatcaactacttcaagggcggcaagctgcggttcaagaagatcaaacctgaagccttcgaagccaacagattctacaccgtgatcaacaaaaagagcggcgagatcgtgcccatggaggtgaacttcaacttcgacgaccccaacctgatcatcctgcctctggcctttggcaagagacagggcagagaattcatctggaacgacctgctgtccctggaaaccggcagcctgaagctggccaacggaagagtgatcgagaagacactgtacaacagaagaacccggcaggatgagcctgccctgttcgtggccctgaccttcgagcggcgggaggtcctggactcctccaatatcaaaccaatgaacctgatcggcgtggcaagaggcgaaaacatccccgccgtgatcgccctgaccgaccccgagggctgcccactgagccggtttaaggatagcctgggaaacccaacccacatcctgagaatcggcgagagctataaggagaagcagcggaccatccaggccaagaaggaggtggagcagcggagagccggcggctacagccggaagtacgccagcaaagccaagaatctggcagacgatatggtgagaaacaccgctagagatctgctgtactacgccgtgacccaggatgccatgctgatcttcgccaacctgagccggggcttcggccggcagggcaagcggaccttcatggccgagagacagtacacacggatggaggactggctgaccgccaagctggcctacgagggcctgagcaagacctacctgtccaagacactggcccagtacacctccaagacatgcagcaactgtgggtttaccatcaccagcgccgactacgacagggtgctggagaagctgaagaagacagcaacaggctggatgaccacaattaacggcaaggagctgaaggtggagggccagattacctactacaacagatacaagagacagaacgtagtcaaggacctgtccgtcgagctggatagactgagcgaagaatctgtgaacaacgacatctcctcctggacaaagggcagaagcggagaagctctgagcctcctgaagaaaagattctcccatagacccgtgcaggagaagttcgtgtgcctgaactgcggcttcgagacacacgcagccgagcaagccgccctgaacatcgccagatcctggctgttcctgcggagccaggagtacaagaaataccagacaaacaagacaaccggcaacaccgataagagagccttcgtcgagacctggcagtccttttaccggaagaagcttaaggaggtgtggaaacctgccgtgcggtctggcggatctggcggaggctccgcccagaagagcctgaccctggaggacgtggccgtggacttcagcagggaggagtggaggctgctggcccccgcccagaaggacctgtacagggacgtgatgctggagaactacaggaacctggtgagcgtgggccaccaggccagcaagcccgacgtgctggccaagctggagaggggcgaggagccctgggccatcgaggaggaggtgaggagcggcaccagccccgagaccggcaaggtgggcggcccaagcagcggcgcccctcctcccagcggcggcagcccagccggctccccaacctctaccgaggagggcacctctgagtccgccacccccgagagcggccctggcacctccaccgagcccagcgagggcagcgcacccggcagccctgccggcagccccacctccacagaggagggaaccagcaccgagcccagcgaaggcagcgccccaggcaccagcaccgagcctagtgagcaggagattaaacggatcaacaagatcagaagaagacttgtgaaagacagcaacaccaagaaggccggcaagacaggccccatgaaaaccctgctggttagagtgatgacacccgatctgagagagcggctggaaaacctgagaaagaagcctgaaaatatcccccagcccatcagcaatacatctagagccaacctgaataagctgctgaccgattacaccgaaatgaagaaggcgatcctgcatgtgtactgggaagagttccagaaggaccctgtgggcctgatgagccgggtggcccagcctgccagcaagaagatcgatcagaacaagctgaaacctgagatggacgagaagggcaacctgaccaccgccggctttgcctgctctcagtgtggccagcccctgttcgtgtacaagctggagcaggtgtctgagaagggcaaggcttacaccaactacttcggacggtgcaatgtggccgagcacgaaaagctgatcctgctggcccagctgaagcccgagaaggatagcgacgaagccgtgacatatagcctgggaaagtttgggcagagggccctggatttctacagcattcatgtgaccaaggagtccacccaccccgtgaagcccctggcccagatcgccggaaacagatacgcctccggacctgtgggaaaggccctgagcgacgcatgtatgggcacaatcgcctccttcctgtctaagtaccaggacatcatcatcgaacaccagaaggtggtgaagggcaaccagaagagactggagagcctgcgggagctggccggcaaggaaaacctggaataccctagcgtgaccctgccacctcagcctcacaccaaggagggcgttgatgcctacaacgaagtgatcgcccgggtgcgaatgtgggtgaacctgaacctgtggcagaagctgaagctaagcagagatgatgccaagcctctgctgagactgaagggattcccttcctttcctctggtcgagagacaggccaacgaagtggactggtgggacatggtgtgtaacgtgaagaagctgatcaacgagaaaaaggaggatggcaaggtgttttggcagaatctggctggctacaagagacaggaagccctgagaccatacctgagcagcgaggaagatcggaagaagggaaagaaattcgctcggtaccagctgggcgacctgctgctgcacctggaaaagaagcacggcgaggactggggaaaggtgtacgacgaggcctgggagcggattgacaagaaagtggaaggcctgagcaagcacatcaagctggaagaggaacggagaagcgaggacgcccagagcaaggccgccctgaccgactggctgcgggctaaggccagcttcgtgatcgagggcctgaaggaggccgacaaggacgagttctgcagatgcgagctgaagctgcagaagtggtacggggacctgcggggaaagcccttcgccatcgaagccgagaacagcatcctggacatcagcggcttcagcaagcagtacaactgtgccttcatctggcagaaggacggcgtgaagaagctgaacctgtacctgatcatcaactacttcaagggcggcaagctgcggttcaagaagatcaaacctgaagccttcgaagccaacagattctacaccgtgatcaacaaaaagagcggcgagatcgtgcccatggaggtgaacttcaacttcgacgaccccaacctgatcatcctgcctctggcctttggcaagagacagggcagagaattcatctggaacgacctgctgtccctggaaaccggcagcctgaagctggccaacggaagagtgatcgagaagacactgtacaacagaagaacccggcaggatgagcctgccctgttcgtggccctgaccttcgagcggcgggaggtcctggactcctccaatatcaaaccaatgaacctgatcggcgtggcaagaggcgaaaacatccccgccgtgatcgccctgaccgaccccgagggctgcccactgagccggtttaaggatagcctgggaaacccaacccacatcctgagaatcggcgagagctataaggagaagcagcggaccatccaggccaagaaggaggtggagcagcggagagccggcggctacagccggaagtacgccagcaaagccaagaatctggcagacgatatggtgagaaacaccgctagagatctgctgtactacgccgtgacccaggatgccatgctgatcttcgccaacctgagccggggcttcggccggcagggcaagcggaccttcatggccgagagacagtacacacggatggaggactggctgaccgccaagctggcctacgagggcctgagcaagacctacctgtccaagacactggcccagtacacctccaagacatgcagcaactgtgggtttaccatcaccagcgccgactacgacagggtgctggagaagctgaagaagacagcaacaggctggatgaccacaattaacggcaaggagctgaaggtggagggccagattacctactacaacagatacaagagacagaacgtagtcaaggacctgtccgtcgagctggatagactgagcgaagaatctgtgaacaacgacatctcctcctggacaaagggcagaagcggagaagctctgagcctcctgaagaaaagattctcccatagacccgtgcaggagaagttcgtgtgcctgaactgcggcttcgagacacacgcagccgagcaagccgccctgaacatcgccagatcctggctgttcctgcggagccaggagtacaagaaataccagacaaacaagacaaccggcaacaccgataagagagccttcgtcgagacctggcagtccttttaccggaagaagcttaaggaggtgtggaaacctgccgtgcggtctggcggatctggcggaggctcctgcccagaagagcctgaccctggaggacgtggccgtggacttcagcagggaggagtggaggctgctggcccccgcccagaaggacctgtacagggacgtgatgctggagaactacaggaacctggtgagcgtgggccaccaggccagcaagcccgacgtgctggccaagctggagaggggcgaggagccctgggccatcgaggaggaggtgaggagcggcaccagccccgagaccggcaaggtgggatctggctccggcagcggccccaagaaaaagagaaaagtctaagctgccttctgcggggcttgccttctggccatgcccttcttctctcccttgcacctgtacctcttggtctttgaataaagcctgagtaggaaggctagcaaaaaaaaaaaaaaaaaaaaaaaaaaaaaaaaaaaaaaaaaaaaaaaaaaaaaaaaaaaaaaaaaaaaaaaaaaaaaaaa

SEQ ID NO: 16176 - RNA, 9485 nt, synthetic construct
  source 1..9485: mol_type = other RNA
aggaaataagagagaaaagaagagtaagaagaaatataagagccaccatggcccctaagaagaagcgtaaagtgagccggatggaacgcctcgtctacgaggtgcggcagaagtgcagaaacatcgaggacatctgcatctcctgcggatctctgaacgtgaccctggagcacccactgttcatcggcggcatgtgccagaactgtaaaaactgttttctggagtgtgcctatcaatacgacgatgacggctaccagagctactgcaccatctgttgcggcggaagagaggtgctgatgtgtggaaataacaactgctgccggtgcttctgcgtggaatgcgtggacctgctggtgggccccggcgccgcccaggccgctattaaggaagatccttggaactgctacatgtgcggccacaagggcacatacggcctgctgagacggagagaggactggcctagcagactgcagatgttcttcgccaataaccacgaccaggagttcgacccccctaaggtgtaccctcccgtccccgccgagaagagaaagcccatccgggtcctgagcctgttcgatggcatcgccaccggtctgctggtgctgaaggacctgggcatccaggtggataggtacattgcctccgaggtgtgcgaggactccatcaccgtgggaatggtgcgtcatcagggcaagatcatgtacgtgggcgacgtgcggagcgtgacacagaagcatatccaggagtggggccctttcgacctggtgatcggcggcagcccttgcaatgacctgagcatcgtgaacccagcccggaagggcctgtacgagggaaccggcagactgttcttcgagttttacagactgctgcacgacgcccggcctaaggaaggcgacgaccggcccttcttttggctgttcgagaatgtggtggccatgggagtcagcgacaagcgggatattagccggttcctggagagcaaccccgtgatgatcgatgccaaggaagtgagcgccgcccaccgggccagatacttctggggcaatctgcctggcatgaacagacccctggccagcaccgtgaacgacaagctggagctgcaggagtgcctggagcacggccggatcgccaagttcagcaaggtgagaaccatcaccacccgaagcaacagcatcaaacaaggcaaggaccagcactttcctgtgttcatgaacgagaaggaggacatcctgtggtgtaccgagatggagagagtgttcgggttcccagtccactacacagatgtcagcaacatgtctagactggccagacagagactgctgggaagaagctggtccgtccctgtgatcagacacctgttcgcccctctgaaggagtacttcgcctgcgtgagcagcggcaacagcaacgccaacagccggggccccagcttctctagcggcctggtgccactgtccctgagagggagccacatgggccccatggagatctacaaaaccgtgagcgcctggaagcggcagcctgtgcgcgtgctgagcctgtttcggaatatcgataaagtcctgaaaagcctgggattcctggagagcggctctggctccggcggtggcaccctgaagtacgtggaggatgtgacaaacgtggtcagacgggatgtggagaagtggggccccttcgatctggtgtacggcagcacccaacccctgggcagctcttgtgaccggtgccctggctggtacatgtttcagttccaccggatcctgcagtacgccctgccgagacaggagtcccagcggccattcttttggattttcatggacaacttgctgctgaccgaggatgaccaggaaactaccactcggttcctgcagaccgaagccgtgaccctgcaggacgtgagaggccgggactaccagaacgccatgcgggtgtggtccaacatccctggactgaaaagcaagcacgcacctctgacccctaaagaagaggagtacctgcaggcccaggtgcggagcagaagcaagctggacgcccctaaggtggatctgctggtgaagaattgcctcctgcccctgagagagtacttcaagtatttcagccagaatagtctgcccctgggaggcagcggcggcggcgccctggtgacatttgaggacgtcgccgtgcggttcacccaggaggaatgggctctgctggatccttctcagaaaatcctgtaccgggacgtgatgagagagacataccggaatctgacctccgtgggcatcaactgggaatgttgggaccttgaagcctgcttcagaagcctgggaagaaacctgagagtgcaggtggtgaagagaaagtgcgagctgaccaacagcggcccctgcgccgagggcggcccaagcagcggcgcccctcctcccagcggcggcagcccagccggctccccaacctctaccgaggagggcacctctgagtccgccacccccgagagcggccctggcacctccaccgagcccagcgagggcagcgcacccggcagccctgccggcagccccacctccacagaggagggaaccagcaccgagcccagcgaaggcagcgccccaggcaccagcaccgagcctagtgagcaggagattaaacggatcaacaagatcagaagaagacttgtgaaagacagcaacaccaagaaggccggcaagacaggccccatgaaaaccctgctggttagagtgatgacacccgatctgagagagcggctggaaaacctgagaaagaagcctgaaaatatcccccagcccatcagcaatacatctagagccaacctgaataagctgctgaccgattacaccgaaatgaagaaggcgatcctgcatgtgtactgggaagagttccagaaggaccctgtgggcctgatgagccgggtggcccagcctgccagcaagaagatcgatcagaacaagctgaaacctgagatggacgagaagggcaacctgaccaccgccggctttgcctgctctcagtgtggccagcccctgttcgtgtacaagctggagcaggtgtctgagaagggcaaggcttacaccaactacttcggacggtgcaatgtggccgagcacgaaaagctgatcctgctggcccagctgaagcccgagaaggatagcgacgaagccgtgacatatagcctgggaaagtttgggcagagggccctggatttctacagcattcatgtgaccaaggagtccacccaccccgtgaagcccctggcccagatcgccggaaacagatacgcctccggacctgtgggaaaggccctgagcgacgcatgtatgggcacaatcgcctccttcctgtctaagtaccaggacatcatcatcgaacaccagaaggtggtgaagggcaaccagaagagactggagagcctgcgggagctggccggcaaggaaaacctggaataccctagcgtgaccctgccacctcagcctcacaccaaggagggcgttgatgcctacaacgaagtgatcgcccgggtgcgaatgtgggtgaacctgaacctgtggcagaagctgaagctaagcagagatgatgccaagcctctgctgagactgaagggattcccttcctttcctctggtcgagagacaggccaacgaagtggactggtgggacatggtgtgtaacgtgaagaagctgatcaacgagaaaaaggaggatggcaaggtgttttggcagaatctggctggctacaagagacaggaagccctgagaccatacctgagcagcgaggaagatcggaagaagggaaagaaattcgctcggtaccagctgggcgacctgctgctgcacctggaaaagaagcacggcgaggactggggaaaggtgtacgacgaggcctgggagcggattgacaagaaagtggaaggcctgagcaagcacatcaagctggaagaggaacggagaagcgaggacgcccagagcaaggccgccctgaccgactggctgcgggctaaggccagcttcgtgatcgagggcctgaaggaggccgacaaggacgagttctgcagatgcgagctgaagctgcagaagtggtacggggacctgcggggaaagcccttcgccatcgaagccgagaacagcatcctggacatcagcggcttcagcaagcagtacaactgtgccttcatctggcagaaggacggcgtgaagaagctgaacctgtacctgatcatcaactacttcaagggcggcaagctgcggttcaagaagatcaaacctgaagccttcgaagccaacagattctacaccgtgatcaacaaaaagagcggcgagatcgtgcccatggaggtgaacttcaacttcgacgaccccaacctgatcatcctgcctctggcctttggcaagagacagggcagagaattcatctggaacgacctgctgtccctggaaaccggcagcctgaagctggccaacggaagagtgatcgagaagacactgtacaacagaagaacccggcaggatgagcctgccctgttcgtggccctgaccttcgagcggcgggaggtcctggactcctccaatatcaaaccaatgaacctgatcggcgtggcaagaggcgaaaacatccccgccgtgatcgccctgaccgaccccgagggctgcccactgagccggtttaaggatagcctgggaaacccaacccacatcctgagaatcggcgagagctataaggagaagcagcggaccatccaggccaagaaggaggtggagcagcggagagccggcggctacagccggaagtacgccagcaaagccaagaatctggcagacgatatggtgagaaacaccgctagagatctgctgtactacgccgtgacccaggatgccatgctgatcttcgccaacctgagccggggcttcggccggcagggcaagcggaccttcatggccgagagacagtacacacggatggaggactggctgaccgccaagctggcctacgagggcctgagcaagacctacctgtccaagacactggcccagtacacctccaagacatgcagcaactgtgggtttaccatcaccagcgccgactacgacagggtgctggagaagctgaagaagacagcaacaggctggatgaccacaattaacggcaaggagctgaaggtggagggccagattacctactacaacagatacaagagacagaacgtagtcaaggacctgtccgtcgagctggatagactgagcgaagaatctgtgaacaacgacatctcctcctggacaaagggcagaagcggagaagctctgagcctcctgaagaaaagattctcccatagacccgtgcaggagaagttcgtgtgcctgaactgcggcttcgagacacacgcagccgagcaagccgccctgaacatcgccagatcctggctgttcctgcggagccaggagtacaagaaataccagacaaacaagacaaccggcaacaccgataagagagccttcgtcgagacctggcagtccttttaccggaagaagcttaaggaggtgtggaaacctgccgtgcggtctggcggatctggcggaggctccgcccaggagcccgtgaccttcaacgacgtggccgtggacttcacccaggaggagtggggccagctggacctggtgcagaggaccctgtacagggacgtgatgctggagacctacggccacctgctgagcgtgggcaaccagatcaccaagcccgaggtgatcagcctgctggagcagggcgaggagccctggagcatggagcccgcctaccccctgcagggcacctgccccgcccccgagatcggcggcccaagcagcggcgcccctcctcccagcggcggcagcccagccggctccccaacctctaccgaggagggcacctctgagtccgccacccccgagagcggccctggcacctccaccgagcccagcgagggcagcgcacccggcagccctgccggcagccccacctccacagaggagggaaccagcaccgagcccagcgaaggcagcgccccaggcaccagcaccgagcctagtgagcaggagattaaacggatcaacaagatcagaagaagacttgtgaaagacagcaacaccaagaaggccggcaagacaggccccatgaaaaccctgctggttagagtgatgacacccgatctgagagagcggctggaaaacctgagaaagaagcctgaaaatatcccccagcccatcagcaatacatctagagccaacctgaataagctgctgaccgattacaccgaaatgaagaaggcgatcctgcatgtgtactgggaagagttccagaaggaccctgtgggcctgatgagccgggtggcccagcctgccagcaagaagatcgatcagaacaagctgaaacctgagatggacgagaagggcaacctgaccaccgccggctttgcctgctctcagtgtggccagcccctgttcgtgtacaagctggagcaggtgtctgagaagggcaaggcttacaccaactacttcggacggtgcaatgtggccgagcacgaaaagctgatcctgctggcccagctgaagcccgagaaggatagcgacgaagccgtgacatatagcctgggaaagtttgggcagagggccctggatttctacagcattcatgtgaccaaggagtccacccaccccgtgaagcccctggcccagatcgccggaaacagatacgcctccggacctgtgggaaaggccctgagcgacgcatgtatgggcacaatcgcctccttcctgtctaagtaccaggacatcatcatcgaacaccagaaggtggtgaagggcaaccagaagagactggagagcctgcgggagctggccggcaaggaaaacctggaataccctagcgtgaccctgccacctcagcctcacaccaaggagggcgttgatgcctacaacgaagtgatcgcccgggtgcgaatgtgggtgaacctgaacctgtggcagaagctgaagctaagcagagatgatgccaagcctctgctgagactgaagggattcccttcctttcctctggtcgagagacaggccaacgaagtggactggtgggacatggtgtgtaacgtgaagaagctgatcaacgagaaaaaggaggatggcaaggtgttttggcagaatctggctggctacaagagacaggaagccctgagaccatacctgagcagcgaggaagatcggaagaagggaaagaaattcgctcggtaccagctgggcgacctgctgctgcacctggaaaagaagcacggcgaggactggggaaaggtgtacgacgaggcctgggagcggattgacaagaaagtggaaggcctgagcaagcacatcaagctggaagaggaacggagaagcgaggacgcccagagcaaggccgccctgaccgactggctgcgggctaaggccagcttcgtgatcgagggcctgaaggaggccgacaaggacgagttctgcagatgcgagctgaagctgcagaagtggtacggggacctgcggggaaagcccttcgccatcgaagccgagaacagcatcctggacatcagcggcttcagcaagcagtacaactgtgccttcatctggcagaaggacggcgtgaagaagctgaacctgtacctgatcatcaactacttcaagggcggcaagctgcggttcaagaagatcaaacctgaagccttcgaagccaacagattctacaccgtgatcaacaaaaagagcggcgagatcgtgcccatggaggtgaacttcaacttcgacgaccccaacctgatcatcctgcctctggcctttggcaagagacagggcagagaattcatctggaacgacctgctgtccctggaaaccggcagcctgaagctggccaacggaagagtgatcgagaagacactgtacaacagaagaacccggcaggatgagcctgccctgttcgtggccctgaccttcgagcggcgggaggtcctggactcctccaatatcaaaccaatgaacctgatcggcgtggcaagaggcgaaaacatccccgccgtgatcgccctgaccgaccccgagggctgcccactgagccggtttaaggatagcctgggaaacccaacccacatcctgagaatcggcgagagctataaggagaagcagcggaccatccaggccaagaaggaggtggagcagcggagagccggcggctacagccggaagtacgccagcaaagccaagaatctggcagacgatatggtgagaaacaccgctagagatctgctgtactacgccgtgacccaggatgccatgctgatcttcgccaacctgagccggggcttcggccggcagggcaagcggaccttcatggccgagagacagtacacacggatggaggactggctgaccgccaagctggcctacgagggcctgagcaagacctacctgtccaagacactggcccagtacacctccaagacatgcagcaactgtgggtttaccatcaccagcgccgactacgacagggtgctggagaagctgaagaagacagcaacaggctggatgaccacaattaacggcaaggagctgaaggtggagggccagattacctactacaacagatacaagagacagaacgtagtcaaggacctgtccgtcgagctggatagactgagcgaagaatctgtgaacaacgacatctcctcctggacaaagggcagaagcggagaagctctgagcctcctgaagaaaagattctcccatagacccgtgcaggagaagttcgtgtgcctgaactgcggcttcgagacacacgcagccgagcaagccgccctgaacatcgccagatcctggctgttcctgcggagccaggagtacaagaaataccagacaaacaagacaaccggcaacaccgataagagagccttcgtcgagacctggcagtccttttaccggaagaagcttaaggaggtgtggaaacctgccgtgcggtctggcggatctggcggaggctcctgcccaggagcccgtgaccttcaacgacgtggccgtggacttcacccaggaggagtggggccagctggacctggtgcagaggaccctgtacagggacgtgatgctggagacctacggccacctgctgagcgtgggcaaccagatcaccaagcccgaggtgatcagcctgctggagcagggcgaggagccctggagcatggagcccgcctaccccctgcagggcacctgccccgcccccgagatcggatctggctccggcagcggccccaagaaaaagagaaaagtctaagctgccttctgcggggcttgccttctggccatgcccttcttctctcccttgcacctgtacctcttggtctttgaataaagcctgagtaggaaggctagcaaaaaaaaaaaaaaaaaaaaaaaaaaaaaaaaaaaaaaaaaaaaaaaaaaaaaaaaaaaaaaaaaaaaaaaaaaaaaaaa

SEQ ID NO: 16177 - RNA, 9485 nt, synthetic construct
  source 1..9485: mol_type = other RNA
aggaaataagagagaaaagaagagtaagaagaaatataagagccaccatggcccctaagaagaagcgtaaagtgagccggatggaacgcctcgtctacgaggtgcggcagaagtgcagaaacatcgaggacatctgcatctcctgcggatctctgaacgtgaccctggagcacccactgttcatcggcggcatgtgccagaactgtaaaaactgttttctggagtgtgcctatcaatacgacgatgacggctaccagagctactgcaccatctgttgcggcggaagagaggtgctgatgtgtggaaataacaactgctgccggtgcttctgcgtggaatgcgtggacctgctggtgggccccggcgccgcccaggccgctattaaggaagatccttggaactgctacatgtgcggccacaagggcacatacggcctgctgagacggagagaggactggcctagcagactgcagatgttcttcgccaataaccacgaccaggagttcgacccccctaaggtgtaccctcccgtccccgccgagaagagaaagcccatccgggtcctgagcctgttcgatggcatcgccaccggtctgctggtgctgaaggacctgggcatccaggtggataggtacattgcctccgaggtgtgcgaggactccatcaccgtgggaatggtgcgtcatcagggcaagatcatgtacgtgggcgacgtgcggagcgtgacacagaagcatatccaggagtggggccctttcgacctggtgatcggcggcagcccttgcaatgacctgagcatcgtgaacccagcccggaagggcctgtacgagggaaccggcagactgttcttcgagttttacagactgctgcacgacgcccggcctaaggaaggcgacgaccggcccttcttttggctgttcgagaatgtggtggccatgggagtcagcgacaagcgggatattagccggttcctggagagcaaccccgtgatgatcgatgccaaggaagtgagcgccgcccaccgggccagatacttctggggcaatctgcctggcatgaacagacccctggccagcaccgtgaacgacaagctggagctgcaggagtgcctggagcacggccggatcgccaagttcagcaaggtgagaaccatcaccacccgaagcaacagcatcaaacaaggcaaggaccagcactttcctgtgttcatgaacgagaaggaggacatcctgtggtgtaccgagatggagagagtgttcgggttcccagtccactacacagatgtcagcaacatgtctagactggccagacagagactgctgggaagaagctggtccgtccctgtgatcagacacctgttcgcccctctgaaggagtacttcgcctgcgtgagcagcggcaacagcaacgccaacagccggggccccagcttctctagcggcctggtgccactgtccctgagagggagccacatgggccccatggagatctacaaaaccgtgagcgcctggaagcggcagcctgtgcgcgtgctgagcctgtttcggaatatcgataaagtcctgaaaagcctgggattcctggagagcggctctggctccggcggtggcaccctgaagtacgtggaggatgtgacaaacgtggtcagacgggatgtggagaagtggggccccttcgatctggtgtacggcagcacccaacccctgggcagctcttgtgaccggtgccctggctggtacatgtttcagttccaccggatcctgcagtacgccctgccgagacaggagtcccagcggccattcttttggattttcatggacaacttgctgctgaccgaggatgaccaggaaactaccactcggttcctgcagaccgaagccgtgaccctgcaggacgtgagaggccgggactaccagaacgccatgcgggtgtggtccaacatccctggactgaaaagcaagcacgcacctctgacccctaaagaagaggagtacctgcaggcccaggtgcggagcagaagcaagctggacgcccctaaggtggatctgctggtgaagaattgcctcctgcccctgagagagtacttcaagtatttcagccagaatagtctgcccctgggaggcagcggcggcggcgccctggtgacatttgaggacgtcgccgtgcggttcacccaggaggaatgggctctgctggatccttctcagaaaatcctgtaccgggacgtgatgagagagacataccggaatctgacctccgtgggcatcaactgggaatgttgggaccttgaagcctgcttcagaagcctgggaagaaacctgagagtgcaggtggtgaagagaaagtgcgagctgaccaacagcggcccctgcgccgagggcggcccaagcagcggcgcccctcctcccagcggcggcagcccagccggctccccaacctctaccgaggagggcacctctgagtccgccacccccgagagcggccctggcacctccaccgagcccagcgagggcagcgcacccggcagccctgccggcagccccacctccacagaggagggaaccagcaccgagcccagcgaaggcagcgccccaggcaccagcaccgagcctagtgagcaggagattaaacggatcaacaagatcagaagaagacttgtgaaagacagcaacaccaagaaggccggcaagacaggccccatgaaaaccctgctggttagagtgatgacacccgatctgagagagcggctggaaaacctgagaaagaagcctgaaaatatcccccagcccatcagcaatacatctagagccaacctgaataagctgctgaccgattacaccgaaatgaagaaggcgatcctgcatgtgtactgggaagagttccagaaggaccctgtgggcctgatgagccgggtggcccagcctgccagcaagaagatcgatcagaacaagctgaaacctgagatggacgagaagggcaacctgaccaccgccggctttgcctgctctcagtgtggccagcccctgttcgtgtacaagctggagcaggtgtctgagaagggcaaggcttacaccaactacttcggacggtgcaatgtggccgagcacgaaaagctgatcctgctggcccagctgaagcccgagaaggatagcgacgaagccgtgacatatagcctgggaaagtttgggcagagggccctggatttctacagcattcatgtgaccaaggagtccacccaccccgtgaagcccctggcccagatcgccggaaacagatacgcctccggacctgtgggaaaggccctgagcgacgcatgtatgggcacaatcgcctccttcctgtctaagtaccaggacatcatcatcgaacaccagaaggtggtgaagggcaaccagaagagactggagagcctgcgggagctggccggcaaggaaaacctggaataccctagcgtgaccctgccacctcagcctcacaccaaggagggcgttgatgcctacaacgaagtgatcgcccgggtgcgaatgtgggtgaacctgaacctgtggcagaagctgaagctaagcagagatgatgccaagcctctgctgagactgaagggattcccttcctttcctctggtcgagagacaggccaacgaagtggactggtgggacatggtgtgtaacgtgaagaagctgatcaacgagaaaaaggaggatggcaaggtgttttggcagaatctggctggctacaagagacaggaagccctgagaccatacctgagcagcgaggaagatcggaagaagggaaagaaattcgctcggtaccagctgggcgacctgctgctgcacctggaaaagaagcacggcgaggactggggaaaggtgtacgacgaggcctgggagcggattgacaagaaagtggaaggcctgagcaagcacatcaagctggaagaggaacggagaagcgaggacgcccagagcaaggccgccctgaccgactggctgcgggctaaggccagcttcgtgatcgagggcctgaaggaggccgacaaggacgagttctgcagatgcgagctgaagctgcagaagtggtacggggacctgcggggaaagcccttcgccatcgaagccgagaacagcatcctggacatcagcggcttcagcaagcagtacaactgtgccttcatctggcagaaggacggcgtgaagaagctgaacctgtacctgatcatcaactacttcaagggcggcaagctgcggttcaagaagatcaaacctgaagccttcgaagccaacagattctacaccgtgatcaacaaaaagagcggcgagatcgtgcccatggaggtgaacttcaacttcgacgaccccaacctgatcatcctgcctctggcctttggcaagagacagggcagagaattcatctggaacgacctgctgtccctggaaaccggcagcctgaagctggccaacggaagagtgatcgagaagacactgtacaacagaagaacccggcaggatgagcctgccctgttcgtggccctgaccttcgagcggcgggaggtcctggactcctccaatatcaaaccaatgaacctgatcggcgtggcaagaggcgaaaacatccccgccgtgatcgccctgaccgaccccgagggctgcccactgagccggtttaaggatagcctgggaaacccaacccacatcctgagaatcggcgagagctataaggagaagcagcggaccatccaggccaagaaggaggtggagcagcggagagccggcggctacagccggaagtacgccagcaaagccaagaatctggcagacgatatggtgagaaacaccgctagagatctgctgtactacgccgtgacccaggatgccatgctgatcttcgccaacctgagccggggcttcggccggcagggcaagcggaccttcatggccgagagacagtacacacggatggaggactggctgaccgccaagctggcctacgagggcctgagcaagacctacctgtccaagacactggcccagtacacctccaagacatgcagcaactgtgggtttaccatcaccagcgccgactacgacagggtgctggagaagctgaagaagacagcaacaggctggatgaccacaattaacggcaaggagctgaaggtggagggccagattacctactacaacagatacaagagacagaacgtagtcaaggacctgtccgtcgagctggatagactgagcgaagaatctgtgaacaacgacatctcctcctggacaaagggcagaagcggagaagctctgagcctcctgaagaaaagattctcccatagacccgtgcaggagaagttcgtgtgcctgaactgcggcttcgagacacacgcagccgagcaagccgccctgaacatcgccagatcctggctgttcctgcggagccaggagtacaagaaataccagacaaacaagacaaccggcaacaccgataagagagccttcgtcgagacctggcagtccttttaccggaagaagcttaaggaggtgtggaaacctgccgtgcggtctggcggatctggcggaggctccaggcccagggccctgaagttcgccgacgtggccgtgtacttcagccccgaggagtggggctgcctgaggcccgcccagaggaccctgtacagggacgtgatgagggagacctacggccacctgggcgccctgggctgcgccggccccaagcccgccctgatcagctggctggagaggaacaccgacgactgggagcccgccgccctggacccccaggagtaccccaggggcgtgaccgtgcagggcggcccaagcagcggcgcccctcctcccagcggcggcagcccagccggctccccaacctctaccgaggagggcacctctgagtccgccacccccgagagcggccctggcacctccaccgagcccagcgagggcagcgcacccggcagccctgccggcagccccacctccacagaggagggaaccagcaccgagcccagcgaaggcagcgccccaggcaccagcaccgagcctagtgagcaggagattaaacggatcaacaagatcagaagaagacttgtgaaagacagcaacaccaagaaggccggcaagacaggccccatgaaaaccctgctggttagagtgatgacacccgatctgagagagcggctggaaaacctgagaaagaagcctgaaaatatcccccagcccatcagcaatacatctagagccaacctgaataagctgctgaccgattacaccgaaatgaagaaggcgatcctgcatgtgtactgggaagagttccagaaggaccctgtgggcctgatgagccgggtggcccagcctgccagcaagaagatcgatcagaacaagctgaaacctgagatggacgagaagggcaacctgaccaccgccggctttgcctgctctcagtgtggccagcccctgttcgtgtacaagctggagcaggtgtctgagaagggcaaggcttacaccaactacttcggacggtgcaatgtggccgagcacgaaaagctgatcctgctggcccagctgaagcccgagaaggatagcgacgaagccgtgacatatagcctgggaaagtttgggcagagggccctggatttctacagcattcatgtgaccaaggagtccacccaccccgtgaagcccctggcccagatcgccggaaacagatacgcctccggacctgtgggaaaggccctgagcgacgcatgtatgggcacaatcgcctccttcctgtctaagtaccaggacatcatcatcgaacaccagaaggtggtgaagggcaaccagaagagactggagagcctgcgggagctggccggcaaggaaaacctggaataccctagcgtgaccctgccacctcagcctcacaccaaggagggcgttgatgcctacaacgaagtgatcgcccgggtgcgaatgtgggtgaacctgaacctgtggcagaagctgaagctaagcagagatgatgccaagcctctgctgagactgaagggattcccttcctttcctctggtcgagagacaggccaacgaagtggactggtgggacatggtgtgtaacgtgaagaagctgatcaacgagaaaaaggaggatggcaaggtgttttggcagaatctggctggctacaagagacaggaagccctgagaccatacctgagcagcgaggaagatcggaagaagggaaagaaattcgctcggtaccagctgggcgacctgctgctgcacctggaaaagaagcacggcgaggactggggaaaggtgtacgacgaggcctgggagcggattgacaagaaagtggaaggcctgagcaagcacatcaagctggaagaggaacggagaagcgaggacgcccagagcaaggccgccctgaccgactggctgcgggctaaggccagcttcgtgatcgagggcctgaaggaggccgacaaggacgagttctgcagatgcgagctgaagctgcagaagtggtacggggacctgcggggaaagcccttcgccatcgaagccgagaacagcatcctggacatcagcggcttcagcaagcagtacaactgtgccttcatctggcagaaggacggcgtgaagaagctgaacctgtacctgatcatcaactacttcaagggcggcaagctgcggttcaagaagatcaaacctgaagccttcgaagccaacagattctacaccgtgatcaacaaaaagagcggcgagatcgtgcccatggaggtgaacttcaacttcgacgaccccaacctgatcatcctgcctctggcctttggcaagagacagggcagagaattcatctggaacgacctgctgtccctggaaaccggcagcctgaagctggccaacggaagagtgatcgagaagacactgtacaacagaagaacccggcaggatgagcctgccctgttcgtggccctgaccttcgagcggcgggaggtcctggactcctccaatatcaaaccaatgaacctgatcggcgtggcaagaggcgaaaacatccccgccgtgatcgccctgaccgaccccgagggctgcccactgagccggtttaaggatagcctgggaaacccaacccacatcctgagaatcggcgagagctataaggagaagcagcggaccatccaggccaagaaggaggtggagcagcggagagccggcggctacagccggaagtacgccagcaaagccaagaatctggcagacgatatggtgagaaacaccgctagagatctgctgtactacgccgtgacccaggatgccatgctgatcttcgccaacctgagccggggcttcggccggcagggcaagcggaccttcatggccgagagacagtacacacggatggaggactggctgaccgccaagctggcctacgagggcctgagcaagacctacctgtccaagacactggcccagtacacctccaagacatgcagcaactgtgggtttaccatcaccagcgccgactacgacagggtgctggagaagctgaagaagacagcaacaggctggatgaccacaattaacggcaaggagctgaaggtggagggccagattacctactacaacagatacaagagacagaacgtagtcaaggacctgtccgtcgagctggatagactgagcgaagaatctgtgaacaacgacatctcctcctggacaaagggcagaagcggagaagctctgagcctcctgaagaaaagattctcccatagacccgtgcaggagaagttcgtgtgcctgaactgcggcttcgagacacacgcagccgagcaagccgccctgaacatcgccagatcctggctgttcctgcggagccaggagtacaagaaataccagacaaacaagacaaccggcaacaccgataagagagccttcgtcgagacctggcagtccttttaccggaagaagcttaaggaggtgtggaaacctgccgtgcggtctggcggatctggcggaggctcctaggcccagggccctgaagttcgccgacgtggccgtgtacttcagccccgaggagtggggctgcctgaggcccgcccagaggaccctgtacagggacgtgatgagggagacctacggccacctgggcgccctgggctgcgccggccccaagcccgccctgatcagctggctggagaggaacaccgacgactgggagcccgccgccctggacccccaggagtaccccaggggcgtgaccgtgcagggatctggctccggcagcggccccaagaaaaagagaaaagtctaagctgccttctgcggggcttgccttctggccatgcccttcttctctcccttgcacctgtacctcttggtctttgaataaagcctgagtaggaaggctagcaaaaaaaaaaaaaaaaaaaaaaaaaaaaaaaaaaaaaaaaaaaaaaaaaaaaaaaaaaaaaaaaaaaaaaaaaaaaaaaa

SEQ ID NO: 16178 - RNA, 9485 nt, synthetic construct
  source 1..9485: mol_type = other RNA
aggaaataagagagaaaagaagagtaagaagaaatataagagccaccatggcccctaagaagaagcgtaaagtgagccggatggaacgcctcgtctacgaggtgcggcagaagtgcagaaacatcgaggacatctgcatctcctgcggatctctgaacgtgaccctggagcacccactgttcatcggcggcatgtgccagaactgtaaaaactgttttctggagtgtgcctatcaatacgacgatgacggctaccagagctactgcaccatctgttgcggcggaagagaggtgctgatgtgtggaaataacaactgctgccggtgcttctgcgtggaatgcgtggacctgctggtgggccccggcgccgcccaggccgctattaaggaagatccttggaactgctacatgtgcggccacaagggcacatacggcctgctgagacggagagaggactggcctagcagactgcagatgttcttcgccaataaccacgaccaggagttcgacccccctaaggtgtaccctcccgtccccgccgagaagagaaagcccatccgggtcctgagcctgttcgatggcatcgccaccggtctgctggtgctgaaggacctgggcatccaggtggataggtacattgcctccgaggtgtgcgaggactccatcaccgtgggaatggtgcgtcatcagggcaagatcatgtacgtgggcgacgtgcggagcgtgacacagaagcatatccaggagtggggccctttcgacctggtgatcggcggcagcccttgcaatgacctgagcatcgtgaacccagcccggaagggcctgtacgagggaaccggcagactgttcttcgagttttacagactgctgcacgacgcccggcctaaggaaggcgacgaccggcccttcttttggctgttcgagaatgtggtggccatgggagtcagcgacaagcgggatattagccggttcctggagagcaaccccgtgatgatcgatgccaaggaagtgagcgccgcccaccgggccagatacttctggggcaatctgcctggcatgaacagacccctggccagcaccgtgaacgacaagctggagctgcaggagtgcctggagcacggccggatcgccaagttcagcaaggtgagaaccatcaccacccgaagcaacagcatcaaacaaggcaaggaccagcactttcctgtgttcatgaacgagaaggaggacatcctgtggtgtaccgagatggagagagtgttcgggttcccagtccactacacagatgtcagcaacatgtctagactggccagacagagactgctgggaagaagctggtccgtccctgtgatcagacacctgttcgcccctctgaaggagtacttcgcctgcgtgagcagcggcaacagcaacgccaacagccggggccccagcttctctagcggcctggtgccactgtccctgagagggagccacatgggccccatggagatctacaaaaccgtgagcgcctggaagcggcagcctgtgcgcgtgctgagcctgtttcggaatatcgataaagtcctgaaaagcctgggattcctggagagcggctctggctccggcggtggcaccctgaagtacgtggaggatgtgacaaacgtggtcagacgggatgtggagaagtggggccccttcgatctggtgtacggcagcacccaacccctgggcagctcttgtgaccggtgccctggctggtacatgtttcagttccaccggatcctgcagtacgccctgccgagacaggagtcccagcggccattcttttggattttcatggacaacttgctgctgaccgaggatgaccaggaaactaccactcggttcctgcagaccgaagccgtgaccctgcaggacgtgagaggccgggactaccagaacgccatgcgggtgtggtccaacatccctggactgaaaagcaagcacgcacctctgacccctaaagaagaggagtacctgcaggcccaggtgcggagcagaagcaagctggacgcccctaaggtggatctgctggtgaagaattgcctcctgcccctgagagagtacttcaagtatttcagccagaatagtctgcccctgggaggcagcggcggcggcgccctggtgacatttgaggacgtcgccgtgcggttcacccaggaggaatgggctctgctggatccttctcagaaaatcctgtaccgggacgtgatgagagagacataccggaatctgacctccgtgggcatcaactgggaatgttgggaccttgaagcctgcttcagaagcctgggaagaaacctgagagtgcaggtggtgaagagaaagtgcgagctgaccaacagcggcccctgcgccgagggcggcccaagcagcggcgcccctcctcccagcggcggcagcccagccggctccccaacctctaccgaggagggcacctctgagtccgccacccccgagagcggccctggcacctccaccgagcccagcgagggcagcgcacccggcagccctgccggcagccccacctccacagaggagggaaccagcaccgagcccagcgaaggcagcgccccaggcaccagcaccgagcctagtgagcaggagattaaacggatcaacaagatcagaagaagacttgtgaaagacagcaacaccaagaaggccggcaagacaggccccatgaaaaccctgctggttagagtgatgacacccgatctgagagagcggctggaaaacctgagaaagaagcctgaaaatatcccccagcccatcagcaatacatctagagccaacctgaataagctgctgaccgattacaccgaaatgaagaaggcgatcctgcatgtgtactgggaagagttccagaaggaccctgtgggcctgatgagccgggtggcccagcctgccagcaagaagatcgatcagaacaagctgaaacctgagatggacgagaagggcaacctgaccaccgccggctttgcctgctctcagtgtggccagcccctgttcgtgtacaagctggagcaggtgtctgagaagggcaaggcttacaccaactacttcggacggtgcaatgtggccgagcacgaaaagctgatcctgctggcccagctgaagcccgagaaggatagcgacgaagccgtgacatatagcctgggaaagtttgggcagagggccctggatttctacagcattcatgtgaccaaggagtccacccaccccgtgaagcccctggcccagatcgccggaaacagatacgcctccggacctgtgggaaaggccctgagcgacgcatgtatgggcacaatcgcctccttcctgtctaagtaccaggacatcatcatcgaacaccagaaggtggtgaagggcaaccagaagagactggagagcctgcgggagctggccggcaaggaaaacctggaataccctagcgtgaccctgccacctcagcctcacaccaaggagggcgttgatgcctacaacgaagtgatcgcccgggtgcgaatgtgggtgaacctgaacctgtggcagaagctgaagctaagcagagatgatgccaagcctctgctgagactgaagggattcccttcctttcctctggtcgagagacaggccaacgaagtggactggtgggacatggtgtgtaacgtgaagaagctgatcaacgagaaaaaggaggatggcaaggtgttttggcagaatctggctggctacaagagacaggaagccctgagaccatacctgagcagcgaggaagatcggaagaagggaaagaaattcgctcggtaccagctgggcgacctgctgctgcacctggaaaagaagcacggcgaggactggggaaaggtgtacgacgaggcctgggagcggattgacaagaaagtggaaggcctgagcaagcacatcaagctggaagaggaacggagaagcgaggacgcccagagcaaggccgccctgaccgactggctgcgggctaaggccagcttcgtgatcgagggcctgaaggaggccgacaaggacgagttctgcagatgcgagctgaagctgcagaagtggtacggggacctgcggggaaagcccttcgccatcgaagccgagaacagcatcctggacatcagcggcttcagcaagcagtacaactgtgccttcatctggcagaaggacggcgtgaagaagctgaacctgtacctgatcatcaactacttcaagggcggcaagctgcggttcaagaagatcaaacctgaagccttcgaagccaacagattctacaccgtgatcaacaaaaagagcggcgagatcgtgcccatggaggtgaacttcaacttcgacgaccccaacctgatcatcctgcctctggcctttggcaagagacagggcagagaattcatctggaacgacctgctgtccctggaaaccggcagcctgaagctggccaacggaagagtgatcgagaagacactgtacaacagaagaacccggcaggatgagcctgccctgttcgtggccctgaccttcgagcggcgggaggtcctggactcctccaatatcaaaccaatgaacctgatcggcgtggcaagaggcgaaaacatccccgccgtgatcgccctgaccgaccccgagggctgcccactgagccggtttaaggatagcctgggaaacccaacccacatcctgagaatcggcgagagctataaggagaagcagcggaccatccaggccaagaaggaggtggagcagcggagagccggcggctacagccggaagtacgccagcaaagccaagaatctggcagacgatatggtgagaaacaccgctagagatctgctgtactacgccgtgacccaggatgccatgctgatcttcgccaacctgagccggggcttcggccggcagggcaagcggaccttcatggccgagagacagtacacacggatggaggactggctgaccgccaagctggcctacgagggcctgagcaagacctacctgtccaagacactggcccagtacacctccaagacatgcagcaactgtgggtttaccatcaccagcgccgactacgacagggtgctggagaagctgaagaagacagcaacaggctggatgaccacaattaacggcaaggagctgaaggtggagggccagattacctactacaacagatacaagagacagaacgtagtcaaggacctgtccgtcgagctggatagactgagcgaagaatctgtgaacaacgacatctcctcctggacaaagggcagaagcggagaagctctgagcctcctgaagaaaagattctcccatagacccgtgcaggagaagttcgtgtgcctgaactgcggcttcgagacacacgcagccgagcaagccgccctgaacatcgccagatcctggctgttcctgcggagccaggagtacaagaaataccagacaaacaagacaaccggcaacaccgataagagagccttcgtcgagacctggcagtccttttaccggaagaagcttaaggaggtgtggaaacctgccgtgcggtctggcggatctggcggaggctccagccaggtgagcgtgaccttcgaggacgtggccgtgctgttcaccagggacgagtggaggaagctggcccccccccagaggaacctgtaccaggacgtgatgctggagaactacagcaacctggtgagcctgggcctgctgttccccaagcccaaggtgatcagcctgctgcagcagggcgaggacccctggaaggtggagaaggagaacctgggcggcagcagcctgggctggaagaacagcggcggcccaagcagcggcgcccctcctcccagcggcggcagcccagccggctccccaacctctaccgaggagggcacctctgagtccgccacccccgagagcggccctggcacctccaccgagcccagcgagggcagcgcacccggcagccctgccggcagccccacctccacagaggagggaaccagcaccgagcccagcgaaggcagcgccccaggcaccagcaccgagcctagtgagcaggagattaaacggatcaacaagatcagaagaagacttgtgaaagacagcaacaccaagaaggccggcaagacaggccccatgaaaaccctgctggttagagtgatgacacccgatctgagagagcggctggaaaacctgagaaagaagcctgaaaatatcccccagcccatcagcaatacatctagagccaacctgaataagctgctgaccgattacaccgaaatgaagaaggcgatcctgcatgtgtactgggaagagttccagaaggaccctgtgggcctgatgagccgggtggcccagcctgccagcaagaagatcgatcagaacaagctgaaacctgagatggacgagaagggcaacctgaccaccgccggctttgcctgctctcagtgtggccagcccctgttcgtgtacaagctggagcaggtgtctgagaagggcaaggcttacaccaactacttcggacggtgcaatgtggccgagcacgaaaagctgatcctgctggcccagctgaagcccgagaaggatagcgacgaagccgtgacatatagcctgggaaagtttgggcagagggccctggatttctacagcattcatgtgaccaaggagtccacccaccccgtgaagcccctggcccagatcgccggaaacagatacgcctccggacctgtgggaaaggccctgagcgacgcatgtatgggcacaatcgcctccttcctgtctaagtaccaggacatcatcatcgaacaccagaaggtggtgaagggcaaccagaagagactggagagcctgcgggagctggccggcaaggaaaacctggaataccctagcgtgaccctgccacctcagcctcacaccaaggagggcgttgatgcctacaacgaagtgatcgcccgggtgcgaatgtgggtgaacctgaacctgtggcagaagctgaagctaagcagagatgatgccaagcctctgctgagactgaagggattcccttcctttcctctggtcgagagacaggccaacgaagtggactggtgggacatggtgtgtaacgtgaagaagctgatcaacgagaaaaaggaggatggcaaggtgttttggcagaatctggctggctacaagagacaggaagccctgagaccatacctgagcagcgaggaagatcggaagaagggaaagaaattcgctcggtaccagctgggcgacctgctgctgcacctggaaaagaagcacggcgaggactggggaaaggtgtacgacgaggcctgggagcggattgacaagaaagtggaaggcctgagcaagcacatcaagctggaagaggaacggagaagcgaggacgcccagagcaaggccgccctgaccgactggctgcgggctaaggccagcttcgtgatcgagggcctgaaggaggccgacaaggacgagttctgcagatgcgagctgaagctgcagaagtggtacggggacctgcggggaaagcccttcgccatcgaagccgagaacagcatcctggacatcagcggcttcagcaagcagtacaactgtgccttcatctggcagaaggacggcgtgaagaagctgaacctgtacctgatcatcaactacttcaagggcggcaagctgcggttcaagaagatcaaacctgaagccttcgaagccaacagattctacaccgtgatcaacaaaaagagcggcgagatcgtgcccatggaggtgaacttcaacttcgacgaccccaacctgatcatcctgcctctggcctttggcaagagacagggcagagaattcatctggaacgacctgctgtccctggaaaccggcagcctgaagctggccaacggaagagtgatcgagaagacactgtacaacagaagaacccggcaggatgagcctgccctgttcgtggccctgaccttcgagcggcgggaggtcctggactcctccaatatcaaaccaatgaacctgatcggcgtggcaagaggcgaaaacatccccgccgtgatcgccctgaccgaccccgagggctgcccactgagccggtttaaggatagcctgggaaacccaacccacatcctgagaatcggcgagagctataaggagaagcagcggaccatccaggccaagaaggaggtggagcagcggagagccggcggctacagccggaagtacgccagcaaagccaagaatctggcagacgatatggtgagaaacaccgctagagatctgctgtactacgccgtgacccaggatgccatgctgatcttcgccaacctgagccggggcttcggccggcagggcaagcggaccttcatggccgagagacagtacacacggatggaggactggctgaccgccaagctggcctacgagggcctgagcaagacctacctgtccaagacactggcccagtacacctccaagacatgcagcaactgtgggtttaccatcaccagcgccgactacgacagggtgctggagaagctgaagaagacagcaacaggctggatgaccacaattaacggcaaggagctgaaggtggagggccagattacctactacaacagatacaagagacagaacgtagtcaaggacctgtccgtcgagctggatagactgagcgaagaatctgtgaacaacgacatctcctcctggacaaagggcagaagcggagaagctctgagcctcctgaagaaaagattctcccatagacccgtgcaggagaagttcgtgtgcctgaactgcggcttcgagacacacgcagccgagcaagccgccctgaacatcgccagatcctggctgttcctgcggagccaggagtacaagaaataccagacaaacaagacaaccggcaacaccgataagagagccttcgtcgagacctggcagtccttttaccggaagaagcttaaggaggtgtggaaacctgccgtgcggtctggcggatctggcggaggctcctagccaggtgagcgtgaccttcgaggacgtggccgtgctgttcaccagggacgagtggaggaagctggcccccccccagaggaacctgtaccaggacgtgatgctggagaactacagcaacctggtgagcctgggcctgctgttccccaagcccaaggtgatcagcctgctgcagcagggcgaggacccctggaaggtggagaaggagaacctgggcggcagcagcctgggctggaagaacagcggatctggctccggcagcggccccaagaaaaagagaaaagtctaagctgccttctgcggggcttgccttctggccatgcccttcttctctcccttgcacctgtacctcttggtctttgaataaagcctgagtaggaaggctagcaaaaaaaaaaaaaaaaaaaaaaaaaaaaaaaaaaaaaaaaaaaaaaaaaaaaaaaaaaaaaaaaaaaaaaaaaaaaaaaa

SEQ ID NO: 16179 - RNA, 9485 nt, synthetic construct
  source 1..9485: mol_type = other RNA
aggaaataagagagaaaagaagagtaagaagaaatataagagccaccatggcccctaagaagaagcgtaaagtgagccggatggaacgcctcgtctacgaggtgcggcagaagtgcagaaacatcgaggacatctgcatctcctgcggatctctgaacgtgaccctggagcacccactgttcatcggcggcatgtgccagaactgtaaaaactgttttctggagtgtgcctatcaatacgacgatgacggctaccagagctactgcaccatctgttgcggcggaagagaggtgctgatgtgtggaaataacaactgctgccggtgcttctgcgtggaatgcgtggacctgctggtgggccccggcgccgcccaggccgctattaaggaagatccttggaactgctacatgtgcggccacaagggcacatacggcctgctgagacggagagaggactggcctagcagactgcagatgttcttcgccaataaccacgaccaggagttcgacccccctaaggtgtaccctcccgtccccgccgagaagagaaagcccatccgggtcctgagcctgttcgatggcatcgccaccggtctgctggtgctgaaggacctgggcatccaggtggataggtacattgcctccgaggtgtgcgaggactccatcaccgtgggaatggtgcgtcatcagggcaagatcatgtacgtgggcgacgtgcggagcgtgacacagaagcatatccaggagtggggccctttcgacctggtgatcggcggcagcccttgcaatgacctgagcatcgtgaacccagcccggaagggcctgtacgagggaaccggcagactgttcttcgagttttacagactgctgcacgacgcccggcctaaggaaggcgacgaccggcccttcttttggctgttcgagaatgtggtggccatgggagtcagcgacaagcgggatattagccggttcctggagagcaaccccgtgatgatcgatgccaaggaagtgagcgccgcccaccgggccagatacttctggggcaatctgcctggcatgaacagacccctggccagcaccgtgaacgacaagctggagctgcaggagtgcctggagcacggccggatcgccaagttcagcaaggtgagaaccatcaccacccgaagcaacagcatcaaacaaggcaaggaccagcactttcctgtgttcatgaacgagaaggaggacatcctgtggtgtaccgagatggagagagtgttcgggttcccagtccactacacagatgtcagcaacatgtctagactggccagacagagactgctgggaagaagctggtccgtccctgtgatcagacacctgttcgcccctctgaaggagtacttcgcctgcgtgagcagcggcaacagcaacgccaacagccggggccccagcttctctagcggcctggtgccactgtccctgagagggagccacatgggccccatggagatctacaaaaccgtgagcgcctggaagcggcagcctgtgcgcgtgctgagcctgtttcggaatatcgataaagtcctgaaaagcctgggattcctggagagcggctctggctccggcggtggcaccctgaagtacgtggaggatgtgacaaacgtggtcagacgggatgtggagaagtggggccccttcgatctggtgtacggcagcacccaacccctgggcagctcttgtgaccggtgccctggctggtacatgtttcagttccaccggatcctgcagtacgccctgccgagacaggagtcccagcggccattcttttggattttcatggacaacttgctgctgaccgaggatgaccaggaaactaccactcggttcctgcagaccgaagccgtgaccctgcaggacgtgagaggccgggactaccagaacgccatgcgggtgtggtccaacatccctggactgaaaagcaagcacgcacctctgacccctaaagaagaggagtacctgcaggcccaggtgcggagcagaagcaagctggacgcccctaaggtggatctgctggtgaagaattgcctcctgcccctgagagagtacttcaagtatttcagccagaatagtctgcccctgggaggcagcggcggcggcgccctggtgacatttgaggacgtcgccgtgcggttcacccaggaggaatgggctctgctggatccttctcagaaaatcctgtaccgggacgtgatgagagagacataccggaatctgacctccgtgggcatcaactgggaatgttgggaccttgaagcctgcttcagaagcctgggaagaaacctgagagtgcaggtggtgaagagaaagtgcgagctgaccaacagcggcccctgcgccgagggcggcccaagcagcggcgcccctcctcccagcggcggcagcccagccggctccccaacctctaccgaggagggcacctctgagtccgccacccccgagagcggccctggcacctccaccgagcccagcgagggcagcgcacccggcagccctgccggcagccccacctccacagaggagggaaccagcaccgagcccagcgaaggcagcgccccaggcaccagcaccgagcctagtgagcaggagattaaacggatcaacaagatcagaagaagacttgtgaaagacagcaacaccaagaaggccggcaagacaggccccatgaaaaccctgctggttagagtgatgacacccgatctgagagagcggctggaaaacctgagaaagaagcctgaaaatatcccccagcccatcagcaatacatctagagccaacctgaataagctgctgaccgattacaccgaaatgaagaaggcgatcctgcatgtgtactgggaagagttccagaaggaccctgtgggcctgatgagccgggtggcccagcctgccagcaagaagatcgatcagaacaagctgaaacctgagatggacgagaagggcaacctgaccaccgccggctttgcctgctctcagtgtggccagcccctgttcgtgtacaagctggagcaggtgtctgagaagggcaaggcttacaccaactacttcggacggtgcaatgtggccgagcacgaaaagctgatcctgctggcccagctgaagcccgagaaggatagcgacgaagccgtgacatatagcctgggaaagtttgggcagagggccctggatttctacagcattcatgtgaccaaggagtccacccaccccgtgaagcccctggcccagatcgccggaaacagatacgcctccggacctgtgggaaaggccctgagcgacgcatgtatgggcacaatcgcctccttcctgtctaagtaccaggacatcatcatcgaacaccagaaggtggtgaagggcaaccagaagagactggagagcctgcgggagctggccggcaaggaaaacctggaataccctagcgtgaccctgccacctcagcctcacaccaaggagggcgttgatgcctacaacgaagtgatcgcccgggtgcgaatgtgggtgaacctgaacctgtggcagaagctgaagctaagcagagatgatgccaagcctctgctgagactgaagggattcccttcctttcctctggtcgagagacaggccaacgaagtggactggtgggacatggtgtgtaacgtgaagaagctgatcaacgagaaaaaggaggatggcaaggtgttttggcagaatctggctggctacaagagacaggaagccctgagaccatacctgagcagcgaggaagatcggaagaagggaaagaaattcgctcggtaccagctgggcgacctgctgctgcacctggaaaagaagcacggcgaggactggggaaaggtgtacgacgaggcctgggagcggattgacaagaaagtggaaggcctgagcaagcacatcaagctggaagaggaacggagaagcgaggacgcccagagcaaggccgccctgaccgactggctgcgggctaaggccagcttcgtgatcgagggcctgaaggaggccgacaaggacgagttctgcagatgcgagctgaagctgcagaagtggtacggggacctgcggggaaagcccttcgccatcgaagccgagaacagcatcctggacatcagcggcttcagcaagcagtacaactgtgccttcatctggcagaaggacggcgtgaagaagctgaacctgtacctgatcatcaactacttcaagggcggcaagctgcggttcaagaagatcaaacctgaagccttcgaagccaacagattctacaccgtgatcaacaaaaagagcggcgagatcgtgcccatggaggtgaacttcaacttcgacgaccccaacctgatcatcctgcctctggcctttggcaagagacagggcagagaattcatctggaacgacctgctgtccctggaaaccggcagcctgaagctggccaacggaagagtgatcgagaagacactgtacaacagaagaacccggcaggatgagcctgccctgttcgtggccctgaccttcgagcggcgggaggtcctggactcctccaatatcaaaccaatgaacctgatcggcgtggcaagaggcgaaaacatccccgccgtgatcgccctgaccgaccccgagggctgcccactgagccggtttaaggatagcctgggaaacccaacccacatcctgagaatcggcgagagctataaggagaagcagcggaccatccaggccaagaaggaggtggagcagcggagagccggcggctacagccggaagtacgccagcaaagccaagaatctggcagacgatatggtgagaaacaccgctagagatctgctgtactacgccgtgacccaggatgccatgctgatcttcgccaacctgagccggggcttcggccggcagggcaagcggaccttcatggccgagagacagtacacacggatggaggactggctgaccgccaagctggcctacgagggcctgagcaagacctacctgtccaagacactggcccagtacacctccaagacatgcagcaactgtgggtttaccatcaccagcgccgactacgacagggtgctggagaagctgaagaagacagcaacaggctggatgaccacaattaacggcaaggagctgaaggtggagggccagattacctactacaacagatacaagagacagaacgtagtcaaggacctgtccgtcgagctggatagactgagcgaagaatctgtgaacaacgacatctcctcctggacaaagggcagaagcggagaagctctgagcctcctgaagaaaagattctcccatagacccgtgcaggagaagttcgtgtgcctgaactgcggcttcgagacacacgcagccgagcaagccgccctgaacatcgccagatcctggctgttcctgcggagccaggagtacaagaaataccagacaaacaagacaaccggcaacaccgataagagagccttcgtcgagacctggcagtccttttaccggaagaagcttaaggaggtgtggaaacctgccgtgcggtctggcggatctggcggaggctccatggaggagatgctgagcttcagggacgtggccatcgacttcagcgccgaggagtgggagtgcctggacctggcccagtggaacctgtacagggacgtgatgctggagaactacagcaacctggtgttcctgggcctggccagctgcaagccctacctggtgaccttcctggagcagaggcagggccccagcgacgtgaagaggcaggccgccgcccccgtgcaccccggcggcaccccctacggcggcccaagcagcggcgcccctcctcccagcggcggcagcccagccggctccccaacctctaccgaggagggcacctctgagtccgccacccccgagagcggccctggcacctccaccgagcccagcgagggcagcgcacccggcagccctgccggcagccccacctccacagaggagggaaccagcaccgagcccagcgaaggcagcgccccaggcaccagcaccgagcctagtgagcaggagattaaacggatcaacaagatcagaagaagacttgtgaaagacagcaacaccaagaaggccggcaagacaggccccatgaaaaccctgctggttagagtgatgacacccgatctgagagagcggctggaaaacctgagaaagaagcctgaaaatatcccccagcccatcagcaatacatctagagccaacctgaataagctgctgaccgattacaccgaaatgaagaaggcgatcctgcatgtgtactgggaagagttccagaaggaccctgtgggcctgatgagccgggtggcccagcctgccagcaagaagatcgatcagaacaagctgaaacctgagatggacgagaagggcaacctgaccaccgccggctttgcctgctctcagtgtggccagcccctgttcgtgtacaagctggagcaggtgtctgagaagggcaaggcttacaccaactacttcggacggtgcaatgtggccgagcacgaaaagctgatcctgctggcccagctgaagcccgagaaggatagcgacgaagccgtgacatatagcctgggaaagtttgggcagagggccctggatttctacagcattcatgtgaccaaggagtccacccaccccgtgaagcccctggcccagatcgccggaaacagatacgcctccggacctgtgggaaaggccctgagcgacgcatgtatgggcacaatcgcctccttcctgtctaagtaccaggacatcatcatcgaacaccagaaggtggtgaagggcaaccagaagagactggagagcctgcgggagctggccggcaaggaaaacctggaataccctagcgtgaccctgccacctcagcctcacaccaaggagggcgttgatgcctacaacgaagtgatcgcccgggtgcgaatgtgggtgaacctgaacctgtggcagaagctgaagctaagcagagatgatgccaagcctctgctgagactgaagggattcccttcctttcctctggtcgagagacaggccaacgaagtggactggtgggacatggtgtgtaacgtgaagaagctgatcaacgagaaaaaggaggatggcaaggtgttttggcagaatctggctggctacaagagacaggaagccctgagaccatacctgagcagcgaggaagatcggaagaagggaaagaaattcgctcggtaccagctgggcgacctgctgctgcacctggaaaagaagcacggcgaggactggggaaaggtgtacgacgaggcctgggagcggattgacaagaaagtggaaggcctgagcaagcacatcaagctggaagaggaacggagaagcgaggacgcccagagcaaggccgccctgaccgactggctgcgggctaaggccagcttcgtgatcgagggcctgaaggaggccgacaaggacgagttctgcagatgcgagctgaagctgcagaagtggtacggggacctgcggggaaagcccttcgccatcgaagccgagaacagcatcctggacatcagcggcttcagcaagcagtacaactgtgccttcatctggcagaaggacggcgtgaagaagctgaacctgtacctgatcatcaactacttcaagggcggcaagctgcggttcaagaagatcaaacctgaagccttcgaagccaacagattctacaccgtgatcaacaaaaagagcggcgagatcgtgcccatggaggtgaacttcaacttcgacgaccccaacctgatcatcctgcctctggcctttggcaagagacagggcagagaattcatctggaacgacctgctgtccctggaaaccggcagcctgaagctggccaacggaagagtgatcgagaagacactgtacaacagaagaacccggcaggatgagcctgccctgttcgtggccctgaccttcgagcggcgggaggtcctggactcctccaatatcaaaccaatgaacctgatcggcgtggcaagaggcgaaaacatccccgccgtgatcgccctgaccgaccccgagggctgcccactgagccggtttaaggatagcctgggaaacccaacccacatcctgagaatcggcgagagctataaggagaagcagcggaccatccaggccaagaaggaggtggagcagcggagagccggcggctacagccggaagtacgccagcaaagccaagaatctggcagacgatatggtgagaaacaccgctagagatctgctgtactacgccgtgacccaggatgccatgctgatcttcgccaacctgagccggggcttcggccggcagggcaagcggaccttcatggccgagagacagtacacacggatggaggactggctgaccgccaagctggcctacgagggcctgagcaagacctacctgtccaagacactggcccagtacacctccaagacatgcagcaactgtgggtttaccatcaccagcgccgactacgacagggtgctggagaagctgaagaagacagcaacaggctggatgaccacaattaacggcaaggagctgaaggtggagggccagattacctactacaacagatacaagagacagaacgtagtcaaggacctgtccgtcgagctggatagactgagcgaagaatctgtgaacaacgacatctcctcctggacaaagggcagaagcggagaagctctgagcctcctgaagaaaagattctcccatagacccgtgcaggagaagttcgtgtgcctgaactgcggcttcgagacacacgcagccgagcaagccgccctgaacatcgccagatcctggctgttcctgcggagccaggagtacaagaaataccagacaaacaagacaaccggcaacaccgataagagagccttcgtcgagacctggcagtccttttaccggaagaagcttaaggaggtgtggaaacctgccgtgcggtctggcggatctggcggaggctcctatggaggagatgctgagcttcagggacgtggccatcgacttcagcgccgaggagtgggagtgcctggacctggcccagtggaacctgtacagggacgtgatgctggagaactacagcaacctggtgttcctgggcctggccagctgcaagccctacctggtgaccttcctggagcagaggcagggccccagcgacgtgaagaggcaggccgccgcccccgtgcaccccggcggcaccccctacggatctggctccggcagcggccccaagaaaaagagaaaagtctaagctgccttctgcggggcttgccttctggccatgcccttcttctctcccttgcacctgtacctcttggtctttgaataaagcctgagtaggaaggctagcaaaaaaaaaaaaaaaaaaaaaaaaaaaaaaaaaaaaaaaaaaaaaaaaaaaaaaaaaaaaaaaaaaaaaaaaaaaaaaaa

SEQ ID NO: 16180 - RNA, 9485 nt, synthetic construct
  source 1..9485: mol_type = other RNA
aggaaataagagagaaaagaagagtaagaagaaatataagagccaccatggcccctaagaagaagcgtaaagtgagccggatggaacgcctcgtctacgaggtgcggcagaagtgcagaaacatcgaggacatctgcatctcctgcggatctctgaacgtgaccctggagcacccactgttcatcggcggcatgtgccagaactgtaaaaactgttttctggagtgtgcctatcaatacgacgatgacggctaccagagctactgcaccatctgttgcggcggaagagaggtgctgatgtgtggaaataacaactgctgccggtgcttctgcgtggaatgcgtggacctgctggtgggccccggcgccgcccaggccgctattaaggaagatccttggaactgctacatgtgcggccacaagggcacatacggcctgctgagacggagagaggactggcctagcagactgcagatgttcttcgccaataaccacgaccaggagttcgacccccctaaggtgtaccctcccgtccccgccgagaagagaaagcccatccgggtcctgagcctgttcgatggcatcgccaccggtctgctggtgctgaaggacctgggcatccaggtggataggtacattgcctccgaggtgtgcgaggactccatcaccgtgggaatggtgcgtcatcagggcaagatcatgtacgtgggcgacgtgcggagcgtgacacagaagcatatccaggagtggggccctttcgacctggtgatcggcggcagcccttgcaatgacctgagcatcgtgaacccagcccggaagggcctgtacgagggaaccggcagactgttcttcgagttttacagactgctgcacgacgcccggcctaaggaaggcgacgaccggcccttcttttggctgttcgagaatgtggtggccatgggagtcagcgacaagcgggatattagccggttcctggagagcaaccccgtgatgatcgatgccaaggaagtgagcgccgcccaccgggccagatacttctggggcaatctgcctggcatgaacagacccctggccagcaccgtgaacgacaagctggagctgcaggagtgcctggagcacggccggatcgccaagttcagcaaggtgagaaccatcaccacccgaagcaacagcatcaaacaaggcaaggaccagcactttcctgtgttcatgaacgagaaggaggacatcctgtggtgtaccgagatggagagagtgttcgggttcccagtccactacacagatgtcagcaacatgtctagactggccagacagagactgctgggaagaagctggtccgtccctgtgatcagacacctgttcgcccctctgaaggagtacttcgcctgcgtgagcagcggcaacagcaacgccaacagccggggccccagcttctctagcggcctggtgccactgtccctgagagggagccacatgggccccatggagatctacaaaaccgtgagcgcctggaagcggcagcctgtgcgcgtgctgagcctgtttcggaatatcgataaagtcctgaaaagcctgggattcctggagagcggctctggctccggcggtggcaccctgaagtacgtggaggatgtgacaaacgtggtcagacgggatgtggagaagtggggccccttcgatctggtgtacggcagcacccaacccctgggcagctcttgtgaccggtgccctggctggtacatgtttcagttccaccggatcctgcagtacgccctgccgagacaggagtcccagcggccattcttttggattttcatggacaacttgctgctgaccgaggatgaccaggaaactaccactcggttcctgcagaccgaagccgtgaccctgcaggacgtgagaggccgggactaccagaacgccatgcgggtgtggtccaacatccctggactgaaaagcaagcacgcacctctgacccctaaagaagaggagtacctgcaggcccaggtgcggagcagaagcaagctggacgcccctaaggtggatctgctggtgaagaattgcctcctgcccctgagagagtacttcaagtatttcagccagaatagtctgcccctgggaggcagcggcggcggcgccctggtgacatttgaggacgtcgccgtgcggttcacccaggaggaatgggctctgctggatccttctcagaaaatcctgtaccgggacgtgatgagagagacataccggaatctgacctccgtgggcatcaactgggaatgttgggaccttgaagcctgcttcagaagcctgggaagaaacctgagagtgcaggtggtgaagagaaagtgcgagctgaccaacagcggcccctgcgccgagggcggcccaagcagcggcgcccctcctcccagcggcggcagcccagccggctccccaacctctaccgaggagggcacctctgagtccgccacccccgagagcggccctggcacctccaccgagcccagcgagggcagcgcacccggcagccctgccggcagccccacctccacagaggagggaaccagcaccgagcccagcgaaggcagcgccccaggcaccagcaccgagcctagtgagcaggagattaaacggatcaacaagatcagaagaagacttgtgaaagacagcaacaccaagaaggccggcaagacaggccccatgaaaaccctgctggttagagtgatgacacccgatctgagagagcggctggaaaacctgagaaagaagcctgaaaatatcccccagcccatcagcaatacatctagagccaacctgaataagctgctgaccgattacaccgaaatgaagaaggcgatcctgcatgtgtactgggaagagttccagaaggaccctgtgggcctgatgagccgggtggcccagcctgccagcaagaagatcgatcagaacaagctgaaacctgagatggacgagaagggcaacctgaccaccgccggctttgcctgctctcagtgtggccagcccctgttcgtgtacaagctggagcaggtgtctgagaagggcaaggcttacaccaactacttcggacggtgcaatgtggccgagcacgaaaagctgatcctgctggcccagctgaagcccgagaaggatagcgacgaagccgtgacatatagcctgggaaagtttgggcagagggccctggatttctacagcattcatgtgaccaaggagtccacccaccccgtgaagcccctggcccagatcgccggaaacagatacgcctccggacctgtgggaaaggccctgagcgacgcatgtatgggcacaatcgcctccttcctgtctaagtaccaggacatcatcatcgaacaccagaaggtggtgaagggcaaccagaagagactggagagcctgcgggagctggccggcaaggaaaacctggaataccctagcgtgaccctgccacctcagcctcacaccaaggagggcgttgatgcctacaacgaagtgatcgcccgggtgcgaatgtgggtgaacctgaacctgtggcagaagctgaagctaagcagagatgatgccaagcctctgctgagactgaagggattcccttcctttcctctggtcgagagacaggccaacgaagtggactggtgggacatggtgtgtaacgtgaagaagctgatcaacgagaaaaaggaggatggcaaggtgttttggcagaatctggctggctacaagagacaggaagccctgagaccatacctgagcagcgaggaagatcggaagaagggaaagaaattcgctcggtaccagctgggcgacctgctgctgcacctggaaaagaagcacggcgaggactggggaaaggtgtacgacgaggcctgggagcggattgacaagaaagtggaaggcctgagcaagcacatcaagctggaagaggaacggagaagcgaggacgcccagagcaaggccgccctgaccgactggctgcgggctaaggccagcttcgtgatcgagggcctgaaggaggccgacaaggacgagttctgcagatgcgagctgaagctgcagaagtggtacggggacctgcggggaaagcccttcgccatcgaagccgagaacagcatcctggacatcagcggcttcagcaagcagtacaactgtgccttcatctggcagaaggacggcgtgaagaagctgaacctgtacctgatcatcaactacttcaagggcggcaagctgcggttcaagaagatcaaacctgaagccttcgaagccaacagattctacaccgtgatcaacaaaaagagcggcgagatcgtgcccatggaggtgaacttcaacttcgacgaccccaacctgatcatcctgcctctggcctttggcaagagacagggcagagaattcatctggaacgacctgctgtccctggaaaccggcagcctgaagctggccaacggaagagtgatcgagaagacactgtacaacagaagaacccggcaggatgagcctgccctgttcgtggccctgaccttcgagcggcgggaggtcctggactcctccaatatcaaaccaatgaacctgatcggcgtggcaagaggcgaaaacatccccgccgtgatcgccctgaccgaccccgagggctgcccactgagccggtttaaggatagcctgggaaacccaacccacatcctgagaatcggcgagagctataaggagaagcagcggaccatccaggccaagaaggaggtggagcagcggagagccggcggctacagccggaagtacgccagcaaagccaagaatctggcagacgatatggtgagaaacaccgctagagatctgctgtactacgccgtgacccaggatgccatgctgatcttcgccaacctgagccggggcttcggccggcagggcaagcggaccttcatggccgagagacagtacacacggatggaggactggctgaccgccaagctggcctacgagggcctgagcaagacctacctgtccaagacactggcccagtacacctccaagacatgcagcaactgtgggtttaccatcaccagcgccgactacgacagggtgctggagaagctgaagaagacagcaacaggctggatgaccacaattaacggcaaggagctgaaggtggagggccagattacctactacaacagatacaagagacagaacgtagtcaaggacctgtccgtcgagctggatagactgagcgaagaatctgtgaacaacgacatctcctcctggacaaagggcagaagcggagaagctctgagcctcctgaagaaaagattctcccatagacccgtgcaggagaagttcgtgtgcctgaactgcggcttcgagacacacgcagccgagcaagccgccctgaacatcgccagatcctggctgttcctgcggagccaggagtacaagaaataccagacaaacaagacaaccggcaacaccgataagagagccttcgtcgagacctggcagtccttttaccggaagaagcttaaggaggtgtggaaacctgccgtgcggtctggcggatctggcggaggctccgcccagggctacgtgaccttcgaggacgtggccgtgtacttcagccaggaggagtggaggctgctggacgaggcccagaagctgctgtacaggaacgtgatgctggagaacttcagcctgctggccagcctgggcctggccagcagcaagacccacgagatcacccagctggagagctgggaggagcccttcatgcccgcctgggaggtggtgaccagcgccacccccaggggcacctggtggggcggcccaagcagcggcgcccctcctcccagcggcggcagcccagccggctccccaacctctaccgaggagggcacctctgagtccgccacccccgagagcggccctggcacctccaccgagcccagcgagggcagcgcacccggcagccctgccggcagccccacctccacagaggagggaaccagcaccgagcccagcgaaggcagcgccccaggcaccagcaccgagcctagtgagcaggagattaaacggatcaacaagatcagaagaagacttgtgaaagacagcaacaccaagaaggccggcaagacaggccccatgaaaaccctgctggttagagtgatgacacccgatctgagagagcggctggaaaacctgagaaagaagcctgaaaatatcccccagcccatcagcaatacatctagagccaacctgaataagctgctgaccgattacaccgaaatgaagaaggcgatcctgcatgtgtactgggaagagttccagaaggaccctgtgggcctgatgagccgggtggcccagcctgccagcaagaagatcgatcagaacaagctgaaacctgagatggacgagaagggcaacctgaccaccgccggctttgcctgctctcagtgtggccagcccctgttcgtgtacaagctggagcaggtgtctgagaagggcaaggcttacaccaactacttcggacggtgcaatgtggccgagcacgaaaagctgatcctgctggcccagctgaagcccgagaaggatagcgacgaagccgtgacatatagcctgggaaagtttgggcagagggccctggatttctacagcattcatgtgaccaaggagtccacccaccccgtgaagcccctggcccagatcgccggaaacagatacgcctccggacctgtgggaaaggccctgagcgacgcatgtatgggcacaatcgcctccttcctgtctaagtaccaggacatcatcatcgaacaccagaaggtggtgaagggcaaccagaagagactggagagcctgcgggagctggccggcaaggaaaacctggaataccctagcgtgaccctgccacctcagcctcacaccaaggagggcgttgatgcctacaacgaagtgatcgcccgggtgcgaatgtgggtgaacctgaacctgtggcagaagctgaagctaagcagagatgatgccaagcctctgctgagactgaagggattcccttcctttcctctggtcgagagacaggccaacgaagtggactggtgggacatggtgtgtaacgtgaagaagctgatcaacgagaaaaaggaggatggcaaggtgttttggcagaatctggctggctacaagagacaggaagccctgagaccatacctgagcagcgaggaagatcggaagaagggaaagaaattcgctcggtaccagctgggcgacctgctgctgcacctggaaaagaagcacggcgaggactggggaaaggtgtacgacgaggcctgggagcggattgacaagaaagtggaaggcctgagcaagcacatcaagctggaagaggaacggagaagcgaggacgcccagagcaaggccgccctgaccgactggctgcgggctaaggccagcttcgtgatcgagggcctgaaggaggccgacaaggacgagttctgcagatgcgagctgaagctgcagaagtggtacggggacctgcggggaaagcccttcgccatcgaagccgagaacagcatcctggacatcagcggcttcagcaagcagtacaactgtgccttcatctggcagaaggacggcgtgaagaagctgaacctgtacctgatcatcaactacttcaagggcggcaagctgcggttcaagaagatcaaacctgaagccttcgaagccaacagattctacaccgtgatcaacaaaaagagcggcgagatcgtgcccatggaggtgaacttcaacttcgacgaccccaacctgatcatcctgcctctggcctttggcaagagacagggcagagaattcatctggaacgacctgctgtccctggaaaccggcagcctgaagctggccaacggaagagtgatcgagaagacactgtacaacagaagaacccggcaggatgagcctgccctgttcgtggccctgaccttcgagcggcgggaggtcctggactcctccaatatcaaaccaatgaacctgatcggcgtggcaagaggcgaaaacatccccgccgtgatcgccctgaccgaccccgagggctgcccactgagccggtttaaggatagcctgggaaacccaacccacatcctgagaatcggcgagagctataaggagaagcagcggaccatccaggccaagaaggaggtggagcagcggagagccggcggctacagccggaagtacgccagcaaagccaagaatctggcagacgatatggtgagaaacaccgctagagatctgctgtactacgccgtgacccaggatgccatgctgatcttcgccaacctgagccggggcttcggccggcagggcaagcggaccttcatggccgagagacagtacacacggatggaggactggctgaccgccaagctggcctacgagggcctgagcaagacctacctgtccaagacactggcccagtacacctccaagacatgcagcaactgtgggtttaccatcaccagcgccgactacgacagggtgctggagaagctgaagaagacagcaacaggctggatgaccacaattaacggcaaggagctgaaggtggagggccagattacctactacaacagatacaagagacagaacgtagtcaaggacctgtccgtcgagctggatagactgagcgaagaatctgtgaacaacgacatctcctcctggacaaagggcagaagcggagaagctctgagcctcctgaagaaaagattctcccatagacccgtgcaggagaagttcgtgtgcctgaactgcggcttcgagacacacgcagccgagcaagccgccctgaacatcgccagatcctggctgttcctgcggagccaggagtacaagaaataccagacaaacaagacaaccggcaacaccgataagagagccttcgtcgagacctggcagtccttttaccggaagaagcttaaggaggtgtggaaacctgccgtgcggtctggcggatctggcggaggctcctgcccagggctacgtgaccttcgaggacgtggccgtgtacttcagccaggaggagtggaggctgctggacgaggcccagaagctgctgtacaggaacgtgatgctggagaacttcagcctgctggccagcctgggcctggccagcagcaagacccacgagatcacccagctggagagctgggaggagcccttcatgcccgcctgggaggtggtgaccagcgccacccccaggggcacctggtggggatctggctccggcagcggccccaagaaaaagagaaaagtctaagctgccttctgcggggcttgccttctggccatgcccttcttctctcccttgcacctgtacctcttggtctttgaataaagcctgagtaggaaggctagcaaaaaaaaaaaaaaaaaaaaaaaaaaaaaaaaaaaaaaaaaaaaaaaaaaaaaaaaaaaaaaaaaaaaaaaaaaaaaaaa

SEQ ID NO: 16181 - RNA, 9485 nt, synthetic construct
  source 1..9485: mol_type = other RNA
aggaaataagagagaaaagaagagtaagaagaaatataagagccaccatggcccctaagaagaagcgtaaagtgagccggatggaacgcctcgtctacgaggtgcggcagaagtgcagaaacatcgaggacatctgcatctcctgcggatctctgaacgtgaccctggagcacccactgttcatcggcggcatgtgccagaactgtaaaaactgttttctggagtgtgcctatcaatacgacgatgacggctaccagagctactgcaccatctgttgcggcggaagagaggtgctgatgtgtggaaataacaactgctgccggtgcttctgcgtggaatgcgtggacctgctggtgggccccggcgccgcccaggccgctattaaggaagatccttggaactgctacatgtgcggccacaagggcacatacggcctgctgagacggagagaggactggcctagcagactgcagatgttcttcgccaataaccacgaccaggagttcgacccccctaaggtgtaccctcccgtccccgccgagaagagaaagcccatccgggtcctgagcctgttcgatggcatcgccaccggtctgctggtgctgaaggacctgggcatccaggtggataggtacattgcctccgaggtgtgcgaggactccatcaccgtgggaatggtgcgtcatcagggcaagatcatgtacgtgggcgacgtgcggagcgtgacacagaagcatatccaggagtggggccctttcgacctggtgatcggcggcagcccttgcaatgacctgagcatcgtgaacccagcccggaagggcctgtacgagggaaccggcagactgttcttcgagttttacagactgctgcacgacgcccggcctaaggaaggcgacgaccggcccttcttttggctgttcgagaatgtggtggccatgggagtcagcgacaagcgggatattagccggttcctggagagcaaccccgtgatgatcgatgccaaggaagtgagcgccgcccaccgggccagatacttctggggcaatctgcctggcatgaacagacccctggccagcaccgtgaacgacaagctggagctgcaggagtgcctggagcacggccggatcgccaagttcagcaaggtgagaaccatcaccacccgaagcaacagcatcaaacaaggcaaggaccagcactttcctgtgttcatgaacgagaaggaggacatcctgtggtgtaccgagatggagagagtgttcgggttcccagtccactacacagatgtcagcaacatgtctagactggccagacagagactgctgggaagaagctggtccgtccctgtgatcagacacctgttcgcccctctgaaggagtacttcgcctgcgtgagcagcggcaacagcaacgccaacagccggggccccagcttctctagcggcctggtgccactgtccctgagagggagccacatgggccccatggagatctacaaaaccgtgagcgcctggaagcggcagcctgtgcgcgtgctgagcctgtttcggaatatcgataaagtcctgaaaagcctgggattcctggagagcggctctggctccggcggtggcaccctgaagtacgtggaggatgtgacaaacgtggtcagacgggatgtggagaagtggggccccttcgatctggtgtacggcagcacccaacccctgggcagctcttgtgaccggtgccctggctggtacatgtttcagttccaccggatcctgcagtacgccctgccgagacaggagtcccagcggccattcttttggattttcatggacaacttgctgctgaccgaggatgaccaggaaactaccactcggttcctgcagaccgaagccgtgaccctgcaggacgtgagaggccgggactaccagaacgccatgcgggtgtggtccaacatccctggactgaaaagcaagcacgcacctctgacccctaaagaagaggagtacctgcaggcccaggtgcggagcagaagcaagctggacgcccctaaggtggatctgctggtgaagaattgcctcctgcccctgagagagtacttcaagtatttcagccagaatagtctgcccctgggaggcagcggcggcggcgccctggtgacatttgaggacgtcgccgtgcggttcacccaggaggaatgggctctgctggatccttctcagaaaatcctgtaccgggacgtgatgagagagacataccggaatctgacctccgtgggcatcaactgggaatgttgggaccttgaagcctgcttcagaagcctgggaagaaacctgagagtgcaggtggtgaagagaaagtgcgagctgaccaacagcggcccctgcgccgagggcggcccaagcagcggcgcccctcctcccagcggcggcagcccagccggctccccaacctctaccgaggagggcacctctgagtccgccacccccgagagcggccctggcacctccaccgagcccagcgagggcagcgcacccggcagccctgccggcagccccacctccacagaggagggaaccagcaccgagcccagcgaaggcagcgccccaggcaccagcaccgagcctagtgagcaggagattaaacggatcaacaagatcagaagaagacttgtgaaagacagcaacaccaagaaggccggcaagacaggccccatgaaaaccctgctggttagagtgatgacacccgatctgagagagcggctggaaaacctgagaaagaagcctgaaaatatcccccagcccatcagcaatacatctagagccaacctgaataagctgctgaccgattacaccgaaatgaagaaggcgatcctgcatgtgtactgggaagagttccagaaggaccctgtgggcctgatgagccgggtggcccagcctgccagcaagaagatcgatcagaacaagctgaaacctgagatggacgagaagggcaacctgaccaccgccggctttgcctgctctcagtgtggccagcccctgttcgtgtacaagctggagcaggtgtctgagaagggcaaggcttacaccaactacttcggacggtgcaatgtggccgagcacgaaaagctgatcctgctggcccagctgaagcccgagaaggatagcgacgaagccgtgacatatagcctgggaaagtttgggcagagggccctggatttctacagcattcatgtgaccaaggagtccacccaccccgtgaagcccctggcccagatcgccggaaacagatacgcctccggacctgtgggaaaggccctgagcgacgcatgtatgggcacaatcgcctccttcctgtctaagtaccaggacatcatcatcgaacaccagaaggtggtgaagggcaaccagaagagactggagagcctgcgggagctggccggcaaggaaaacctggaataccctagcgtgaccctgccacctcagcctcacaccaaggagggcgttgatgcctacaacgaagtgatcgcccgggtgcgaatgtgggtgaacctgaacctgtggcagaagctgaagctaagcagagatgatgccaagcctctgctgagactgaagggattcccttcctttcctctggtcgagagacaggccaacgaagtggactggtgggacatggtgtgtaacgtgaagaagctgatcaacgagaaaaaggaggatggcaaggtgttttggcagaatctggctggctacaagagacaggaagccctgagaccatacctgagcagcgaggaagatcggaagaagggaaagaaattcgctcggtaccagctgggcgacctgctgctgcacctggaaaagaagcacggcgaggactggggaaaggtgtacgacgaggcctgggagcggattgacaagaaagtggaaggcctgagcaagcacatcaagctggaagaggaacggagaagcgaggacgcccagagcaaggccgccctgaccgactggctgcgggctaaggccagcttcgtgatcgagggcctgaaggaggccgacaaggacgagttctgcagatgcgagctgaagctgcagaagtggtacggggacctgcggggaaagcccttcgccatcgaagccgagaacagcatcctggacatcagcggcttcagcaagcagtacaactgtgccttcatctggcagaaggacggcgtgaagaagctgaacctgtacctgatcatcaactacttcaagggcggcaagctgcggttcaagaagatcaaacctgaagccttcgaagccaacagattctacaccgtgatcaacaaaaagagcggcgagatcgtgcccatggaggtgaacttcaacttcgacgaccccaacctgatcatcctgcctctggcctttggcaagagacagggcagagaattcatctggaacgacctgctgtccctggaaaccggcagcctgaagctggccaacggaagagtgatcgagaagacactgtacaacagaagaacccggcaggatgagcctgccctgttcgtggccctgaccttcgagcggcgggaggtcctggactcctccaatatcaaaccaatgaacctgatcggcgtggcaagaggcgaaaacatccccgccgtgatcgccctgaccgaccccgagggctgcccactgagccggtttaaggatagcctgggaaacccaacccacatcctgagaatcggcgagagctataaggagaagcagcggaccatccaggccaagaaggaggtggagcagcggagagccggcggctacagccggaagtacgccagcaaagccaagaatctggcagacgatatggtgagaaacaccgctagagatctgctgtactacgccgtgacccaggatgccatgctgatcttcgccaacctgagccggggcttcggccggcagggcaagcggaccttcatggccgagagacagtacacacggatggaggactggctgaccgccaagctggcctacgagggcctgagcaagacctacctgtccaagacactggcccagtacacctccaagacatgcagcaactgtgggtttaccatcaccagcgccgactacgacagggtgctggagaagctgaagaagacagcaacaggctggatgaccacaattaacggcaaggagctgaaggtggagggccagattacctactacaacagatacaagagacagaacgtagtcaaggacctgtccgtcgagctggatagactgagcgaagaatctgtgaacaacgacatctcctcctggacaaagggcagaagcggagaagctctgagcctcctgaagaaaagattctcccatagacccgtgcaggagaagttcgtgtgcctgaactgcggcttcgagacacacgcagccgagcaagccgccctgaacatcgccagatcctggctgttcctgcggagccaggagtacaagaaataccagacaaacaagacaaccggcaacaccgataagagagccttcgtcgagacctggcagtccttttaccggaagaagcttaaggaggtgtggaaacctgccgtgcggtctggcggatctggcggaggctccgagcccgtgagcttcgccgaggtggccgtgtacttcagcagggaggagtgggccctgctggaccccgcccagagggccctgtacagggacgtgatgctggagacctaccagtgcgtggccagcctggtgaccgagacccccgtgcccgcccccaagcccgtgctgatcagcctgctggagggcaggaaggagccctggatccccgacatgaggagccccgaggccatgcccggcgacctgagcggcggcccaagcagcggcgcccctcctcccagcggcggcagcccagccggctccccaacctctaccgaggagggcacctctgagtccgccacccccgagagcggccctggcacctccaccgagcccagcgagggcagcgcacccggcagccctgccggcagccccacctccacagaggagggaaccagcaccgagcccagcgaaggcagcgccccaggcaccagcaccgagcctagtgagcaggagattaaacggatcaacaagatcagaagaagacttgtgaaagacagcaacaccaagaaggccggcaagacaggccccatgaaaaccctgctggttagagtgatgacacccgatctgagagagcggctggaaaacctgagaaagaagcctgaaaatatcccccagcccatcagcaatacatctagagccaacctgaataagctgctgaccgattacaccgaaatgaagaaggcgatcctgcatgtgtactgggaagagttccagaaggaccctgtgggcctgatgagccgggtggcccagcctgccagcaagaagatcgatcagaacaagctgaaacctgagatggacgagaagggcaacctgaccaccgccggctttgcctgctctcagtgtggccagcccctgttcgtgtacaagctggagcaggtgtctgagaagggcaaggcttacaccaactacttcggacggtgcaatgtggccgagcacgaaaagctgatcctgctggcccagctgaagcccgagaaggatagcgacgaagccgtgacatatagcctgggaaagtttgggcagagggccctggatttctacagcattcatgtgaccaaggagtccacccaccccgtgaagcccctggcccagatcgccggaaacagatacgcctccggacctgtgggaaaggccctgagcgacgcatgtatgggcacaatcgcctccttcctgtctaagtaccaggacatcatcatcgaacaccagaaggtggtgaagggcaaccagaagagactggagagcctgcgggagctggccggcaaggaaaacctggaataccctagcgtgaccctgccacctcagcctcacaccaaggagggcgttgatgcctacaacgaagtgatcgcccgggtgcgaatgtgggtgaacctgaacctgtggcagaagctgaagctaagcagagatgatgccaagcctctgctgagactgaagggattcccttcctttcctctggtcgagagacaggccaacgaagtggactggtgggacatggtgtgtaacgtgaagaagctgatcaacgagaaaaaggaggatggcaaggtgttttggcagaatctggctggctacaagagacaggaagccctgagaccatacctgagcagcgaggaagatcggaagaagggaaagaaattcgctcggtaccagctgggcgacctgctgctgcacctggaaaagaagcacggcgaggactggggaaaggtgtacgacgaggcctgggagcggattgacaagaaagtggaaggcctgagcaagcacatcaagctggaagaggaacggagaagcgaggacgcccagagcaaggccgccctgaccgactggctgcgggctaaggccagcttcgtgatcgagggcctgaaggaggccgacaaggacgagttctgcagatgcgagctgaagctgcagaagtggtacggggacctgcggggaaagcccttcgccatcgaagccgagaacagcatcctggacatcagcggcttcagcaagcagtacaactgtgccttcatctggcagaaggacggcgtgaagaagctgaacctgtacctgatcatcaactacttcaagggcggcaagctgcggttcaagaagatcaaacctgaagccttcgaagccaacagattctacaccgtgatcaacaaaaagagcggcgagatcgtgcccatggaggtgaacttcaacttcgacgaccccaacctgatcatcctgcctctggcctttggcaagagacagggcagagaattcatctggaacgacctgctgtccctggaaaccggcagcctgaagctggccaacggaagagtgatcgagaagacactgtacaacagaagaacccggcaggatgagcctgccctgttcgtggccctgaccttcgagcggcgggaggtcctggactcctccaatatcaaaccaatgaacctgatcggcgtggcaagaggcgaaaacatccccgccgtgatcgccctgaccgaccccgagggctgcccactgagccggtttaaggatagcctgggaaacccaacccacatcctgagaatcggcgagagctataaggagaagcagcggaccatccaggccaagaaggaggtggagcagcggagagccggcggctacagccggaagtacgccagcaaagccaagaatctggcagacgatatggtgagaaacaccgctagagatctgctgtactacgccgtgacccaggatgccatgctgatcttcgccaacctgagccggggcttcggccggcagggcaagcggaccttcatggccgagagacagtacacacggatggaggactggctgaccgccaagctggcctacgagggcctgagcaagacctacctgtccaagacactggcccagtacacctccaagacatgcagcaactgtgggtttaccatcaccagcgccgactacgacagggtgctggagaagctgaagaagacagcaacaggctggatgaccacaattaacggcaaggagctgaaggtggagggccagattacctactacaacagatacaagagacagaacgtagtcaaggacctgtccgtcgagctggatagactgagcgaagaatctgtgaacaacgacatctcctcctggacaaagggcagaagcggagaagctctgagcctcctgaagaaaagattctcccatagacccgtgcaggagaagttcgtgtgcctgaactgcggcttcgagacacacgcagccgagcaagccgccctgaacatcgccagatcctggctgttcctgcggagccaggagtacaagaaataccagacaaacaagacaaccggcaacaccgataagagagccttcgtcgagacctggcagtccttttaccggaagaagcttaaggaggtgtggaaacctgccgtgcggtctggcggatctggcggaggctcctgagcccgtgagcttcgccgaggtggccgtgtacttcagcagggaggagtgggccctgctggaccccgcccagagggccctgtacagggacgtgatgctggagacctaccagtgcgtggccagcctggtgaccgagacccccgtgcccgcccccaagcccgtgctgatcagcctgctggagggcaggaaggagccctggatccccgacatgaggagccccgaggccatgcccggcgacctgagcggatctggctccggcagcggccccaagaaaaagagaaaagtctaagctgccttctgcggggcttgccttctggccatgcccttcttctctcccttgcacctgtacctcttggtctttgaataaagcctgagtaggaaggctagcaaaaaaaaaaaaaaaaaaaaaaaaaaaaaaaaaaaaaaaaaaaaaaaaaaaaaaaaaaaaaaaaaaaaaaaaaaaaaaaa

SEQ ID NO: 16182 - RNA, 9485 nt, synthetic construct
  source 1..9485: mol_type = other RNA
aggaaataagagagaaaagaagagtaagaagaaatataagagccaccatggcccctaagaagaagcgtaaagtgagccggatggaacgcctcgtctacgaggtgcggcagaagtgcagaaacatcgaggacatctgcatctcctgcggatctctgaacgtgaccctggagcacccactgttcatcggcggcatgtgccagaactgtaaaaactgttttctggagtgtgcctatcaatacgacgatgacggctaccagagctactgcaccatctgttgcggcggaagagaggtgctgatgtgtggaaataacaactgctgccggtgcttctgcgtggaatgcgtggacctgctggtgggccccggcgccgcccaggccgctattaaggaagatccttggaactgctacatgtgcggccacaagggcacatacggcctgctgagacggagagaggactggcctagcagactgcagatgttcttcgccaataaccacgaccaggagttcgacccccctaaggtgtaccctcccgtccccgccgagaagagaaagcccatccgggtcctgagcctgttcgatggcatcgccaccggtctgctggtgctgaaggacctgggcatccaggtggataggtacattgcctccgaggtgtgcgaggactccatcaccgtgggaatggtgcgtcatcagggcaagatcatgtacgtgggcgacgtgcggagcgtgacacagaagcatatccaggagtggggccctttcgacctggtgatcggcggcagcccttgcaatgacctgagcatcgtgaacccagcccggaagggcctgtacgagggaaccggcagactgttcttcgagttttacagactgctgcacgacgcccggcctaaggaaggcgacgaccggcccttcttttggctgttcgagaatgtggtggccatgggagtcagcgacaagcgggatattagccggttcctggagagcaaccccgtgatgatcgatgccaaggaagtgagcgccgcccaccgggccagatacttctggggcaatctgcctggcatgaacagacccctggccagcaccgtgaacgacaagctggagctgcaggagtgcctggagcacggccggatcgccaagttcagcaaggtgagaaccatcaccacccgaagcaacagcatcaaacaaggcaaggaccagcactttcctgtgttcatgaacgagaaggaggacatcctgtggtgtaccgagatggagagagtgttcgggttcccagtccactacacagatgtcagcaacatgtctagactggccagacagagactgctgggaagaagctggtccgtccctgtgatcagacacctgttcgcccctctgaaggagtacttcgcctgcgtgagcagcggcaacagcaacgccaacagccggggccccagcttctctagcggcctggtgccactgtccctgagagggagccacatgggccccatggagatctacaaaaccgtgagcgcctggaagcggcagcctgtgcgcgtgctgagcctgtttcggaatatcgataaagtcctgaaaagcctgggattcctggagagcggctctggctccggcggtggcaccctgaagtacgtggaggatgtgacaaacgtggtcagacgggatgtggagaagtggggccccttcgatctggtgtacggcagcacccaacccctgggcagctcttgtgaccggtgccctggctggtacatgtttcagttccaccggatcctgcagtacgccctgccgagacaggagtcccagcggccattcttttggattttcatggacaacttgctgctgaccgaggatgaccaggaaactaccactcggttcctgcagaccgaagccgtgaccctgcaggacgtgagaggccgggactaccagaacgccatgcgggtgtggtccaacatccctggactgaaaagcaagcacgcacctctgacccctaaagaagaggagtacctgcaggcccaggtgcggagcagaagcaagctggacgcccctaaggtggatctgctggtgaagaattgcctcctgcccctgagagagtacttcaagtatttcagccagaatagtctgcccctgggaggcagcggcggcggcgccctggtgacatttgaggacgtcgccgtgcggttcacccaggaggaatgggctctgctggatccttctcagaaaatcctgtaccgggacgtgatgagagagacataccggaatctgacctccgtgggcatcaactgggaatgttgggaccttgaagcctgcttcagaagcctgggaagaaacctgagagtgcaggtggtgaagagaaagtgcgagctgaccaacagcggcccctgcgccgagggcggcccaagcagcggcgcccctcctcccagcggcggcagcccagccggctccccaacctctaccgaggagggcacctctgagtccgccacccccgagagcggccctggcacctccaccgagcccagcgagggcagcgcacccggcagccctgccggcagccccacctccacagaggagggaaccagcaccgagcccagcgaaggcagcgccccaggcaccagcaccgagcctagtgagcaggagattaaacggatcaacaagatcagaagaagacttgtgaaagacagcaacaccaagaaggccggcaagacaggccccatgaaaaccctgctggttagagtgatgacacccgatctgagagagcggctggaaaacctgagaaagaagcctgaaaatatcccccagcccatcagcaatacatctagagccaacctgaataagctgctgaccgattacaccgaaatgaagaaggcgatcctgcatgtgtactgggaagagttccagaaggaccctgtgggcctgatgagccgggtggcccagcctgccagcaagaagatcgatcagaacaagctgaaacctgagatggacgagaagggcaacctgaccaccgccggctttgcctgctctcagtgtggccagcccctgttcgtgtacaagctggagcaggtgtctgagaagggcaaggcttacaccaactacttcggacggtgcaatgtggccgagcacgaaaagctgatcctgctggcccagctgaagcccgagaaggatagcgacgaagccgtgacatatagcctgggaaagtttgggcagagggccctggatttctacagcattcatgtgaccaaggagtccacccaccccgtgaagcccctggcccagatcgccggaaacagatacgcctccggacctgtgggaaaggccctgagcgacgcatgtatgggcacaatcgcctccttcctgtctaagtaccaggacatcatcatcgaacaccagaaggtggtgaagggcaaccagaagagactggagagcctgcgggagctggccggcaaggaaaacctggaataccctagcgtgaccctgccacctcagcctcacaccaaggagggcgttgatgcctacaacgaagtgatcgcccgggtgcgaatgtgggtgaacctgaacctgtggcagaagctgaagctaagcagagatgatgccaagcctctgctgagactgaagggattcccttcctttcctctggtcgagagacaggccaacgaagtggactggtgggacatggtgtgtaacgtgaagaagctgatcaacgagaaaaaggaggatggcaaggtgttttggcagaatctggctggctacaagagacaggaagccctgagaccatacctgagcagcgaggaagatcggaagaagggaaagaaattcgctcggtaccagctgggcgacctgctgctgcacctggaaaagaagcacggcgaggactggggaaaggtgtacgacgaggcctgggagcggattgacaagaaagtggaaggcctgagcaagcacatcaagctggaagaggaacggagaagcgaggacgcccagagcaaggccgccctgaccgactggctgcgggctaaggccagcttcgtgatcgagggcctgaaggaggccgacaaggacgagttctgcagatgcgagctgaagctgcagaagtggtacggggacctgcggggaaagcccttcgccatcgaagccgagaacagcatcctggacatcagcggcttcagcaagcagtacaactgtgccttcatctggcagaaggacggcgtgaagaagctgaacctgtacctgatcatcaactacttcaagggcggcaagctgcggttcaagaagatcaaacctgaagccttcgaagccaacagattctacaccgtgatcaacaaaaagagcggcgagatcgtgcccatggaggtgaacttcaacttcgacgaccccaacctgatcatcctgcctctggcctttggcaagagacagggcagagaattcatctggaacgacctgctgtccctggaaaccggcagcctgaagctggccaacggaagagtgatcgagaagacactgtacaacagaagaacccggcaggatgagcctgccctgttcgtggccctgaccttcgagcggcgggaggtcctggactcctccaatatcaaaccaatgaacctgatcggcgtggcaagaggcgaaaacatccccgccgtgatcgccctgaccgaccccgagggctgcccactgagccggtttaaggatagcctgggaaacccaacccacatcctgagaatcggcgagagctataaggagaagcagcggaccatccaggccaagaaggaggtggagcagcggagagccggcggctacagccggaagtacgccagcaaagccaagaatctggcagacgatatggtgagaaacaccgctagagatctgctgtactacgccgtgacccaggatgccatgctgatcttcgccaacctgagccggggcttcggccggcagggcaagcggaccttcatggccgagagacagtacacacggatggaggactggctgaccgccaagctggcctacgagggcctgagcaagacctacctgtccaagacactggcccagtacacctccaagacatgcagcaactgtgggtttaccatcaccagcgccgactacgacagggtgctggagaagctgaagaagacagcaacaggctggatgaccacaattaacggcaaggagctgaaggtggagggccagattacctactacaacagatacaagagacagaacgtagtcaaggacctgtccgtcgagctggatagactgagcgaagaatctgtgaacaacgacatctcctcctggacaaagggcagaagcggagaagctctgagcctcctgaagaaaagattctcccatagacccgtgcaggagaagttcgtgtgcctgaactgcggcttcgagacacacgcagccgagcaagccgccctgaacatcgccagatcctggctgttcctgcggagccaggagtacaagaaataccagacaaacaagacaaccggcaacaccgataagagagccttcgtcgagacctggcagtccttttaccggaagaagcttaaggaggtgtggaaacctgccgtgcggtctggcggatctggcggaggctccgtggccaggatgcagaccagggtgaccttcgacgacatcgccgtgagcttcagccaggaggagtgggagtacctggacgagggccagaaggagctgtacagggaggtgatggaggagaacctggagctgctgaccagcctgggcagcctggtggcccagcccgagcagatggaggagctgtacatgatggaccaccacgacatgggcctgaggggcaccctgctgagcctgtgcaccgaggacggcggcccaagcagcggcgcccctcctcccagcggcggcagcccagccggctccccaacctctaccgaggagggcacctctgagtccgccacccccgagagcggccctggcacctccaccgagcccagcgagggcagcgcacccggcagccctgccggcagccccacctccacagaggagggaaccagcaccgagcccagcgaaggcagcgccccaggcaccagcaccgagcctagtgagcaggagattaaacggatcaacaagatcagaagaagacttgtgaaagacagcaacaccaagaaggccggcaagacaggccccatgaaaaccctgctggttagagtgatgacacccgatctgagagagcggctggaaaacctgagaaagaagcctgaaaatatcccccagcccatcagcaatacatctagagccaacctgaataagctgctgaccgattacaccgaaatgaagaaggcgatcctgcatgtgtactgggaagagttccagaaggaccctgtgggcctgatgagccgggtggcccagcctgccagcaagaagatcgatcagaacaagctgaaacctgagatggacgagaagggcaacctgaccaccgccggctttgcctgctctcagtgtggccagcccctgttcgtgtacaagctggagcaggtgtctgagaagggcaaggcttacaccaactacttcggacggtgcaatgtggccgagcacgaaaagctgatcctgctggcccagctgaagcccgagaaggatagcgacgaagccgtgacatatagcctgggaaagtttgggcagagggccctggatttctacagcattcatgtgaccaaggagtccacccaccccgtgaagcccctggcccagatcgccggaaacagatacgcctccggacctgtgggaaaggccctgagcgacgcatgtatgggcacaatcgcctccttcctgtctaagtaccaggacatcatcatcgaacaccagaaggtggtgaagggcaaccagaagagactggagagcctgcgggagctggccggcaaggaaaacctggaataccctagcgtgaccctgccacctcagcctcacaccaaggagggcgttgatgcctacaacgaagtgatcgcccgggtgcgaatgtgggtgaacctgaacctgtggcagaagctgaagctaagcagagatgatgccaagcctctgctgagactgaagggattcccttcctttcctctggtcgagagacaggccaacgaagtggactggtgggacatggtgtgtaacgtgaagaagctgatcaacgagaaaaaggaggatggcaaggtgttttggcagaatctggctggctacaagagacaggaagccctgagaccatacctgagcagcgaggaagatcggaagaagggaaagaaattcgctcggtaccagctgggcgacctgctgctgcacctggaaaagaagcacggcgaggactggggaaaggtgtacgacgaggcctgggagcggattgacaagaaagtggaaggcctgagcaagcacatcaagctggaagaggaacggagaagcgaggacgcccagagcaaggccgccctgaccgactggctgcgggctaaggccagcttcgtgatcgagggcctgaaggaggccgacaaggacgagttctgcagatgcgagctgaagctgcagaagtggtacggggacctgcggggaaagcccttcgccatcgaagccgagaacagcatcctggacatcagcggcttcagcaagcagtacaactgtgccttcatctggcagaaggacggcgtgaagaagctgaacctgtacctgatcatcaactacttcaagggcggcaagctgcggttcaagaagatcaaacctgaagccttcgaagccaacagattctacaccgtgatcaacaaaaagagcggcgagatcgtgcccatggaggtgaacttcaacttcgacgaccccaacctgatcatcctgcctctggcctttggcaagagacagggcagagaattcatctggaacgacctgctgtccctggaaaccggcagcctgaagctggccaacggaagagtgatcgagaagacactgtacaacagaagaacccggcaggatgagcctgccctgttcgtggccctgaccttcgagcggcgggaggtcctggactcctccaatatcaaaccaatgaacctgatcggcgtggcaagaggcgaaaacatccccgccgtgatcgccctgaccgaccccgagggctgcccactgagccggtttaaggatagcctgggaaacccaacccacatcctgagaatcggcgagagctataaggagaagcagcggaccatccaggccaagaaggaggtggagcagcggagagccggcggctacagccggaagtacgccagcaaagccaagaatctggcagacgatatggtgagaaacaccgctagagatctgctgtactacgccgtgacccaggatgccatgctgatcttcgccaacctgagccggggcttcggccggcagggcaagcggaccttcatggccgagagacagtacacacggatggaggactggctgaccgccaagctggcctacgagggcctgagcaagacctacctgtccaagacactggcccagtacacctccaagacatgcagcaactgtgggtttaccatcaccagcgccgactacgacagggtgctggagaagctgaagaagacagcaacaggctggatgaccacaattaacggcaaggagctgaaggtggagggccagattacctactacaacagatacaagagacagaacgtagtcaaggacctgtccgtcgagctggatagactgagcgaagaatctgtgaacaacgacatctcctcctggacaaagggcagaagcggagaagctctgagcctcctgaagaaaagattctcccatagacccgtgcaggagaagttcgtgtgcctgaactgcggcttcgagacacacgcagccgagcaagccgccctgaacatcgccagatcctggctgttcctgcggagccaggagtacaagaaataccagacaaacaagacaaccggcaacaccgataagagagccttcgtcgagacctggcagtccttttaccggaagaagcttaaggaggtgtggaaacctgccgtgcggtctggcggatctggcggaggctcctgtggccaggatgcagaccagggtgaccttcgacgacatcgccgtgagcttcagccaggaggagtgggagtacctggacgagggccagaaggagctgtacagggaggtgatggaggagaacctggagctgctgaccagcctgggcagcctggtggcccagcccgagcagatggaggagctgtacatgatggaccaccacgacatgggcctgaggggcaccctgctgagcctgtgcaccgaggacggatctggctccggcagcggccccaagaaaaagagaaaagtctaagctgccttctgcggggcttgccttctggccatgcccttcttctctcccttgcacctgtacctcttggtctttgaataaagcctgagtaggaaggctagcaaaaaaaaaaaaaaaaaaaaaaaaaaaaaaaaaaaaaaaaaaaaaaaaaaaaaaaaaaaaaaaaaaaaaaaaaaaaaaaa

SEQ ID NO: 16183 - RNA, 9485 nt, synthetic construct
  source 1..9485: mol_type = other RNA
aggaaataagagagaaaagaagagtaagaagaaatataagagccaccatggcccctaagaagaagcgtaaagtgagccggatggaacgcctcgtctacgaggtgcggcagaagtgcagaaacatcgaggacatctgcatctcctgcggatctctgaacgtgaccctggagcacccactgttcatcggcggcatgtgccagaactgtaaaaactgttttctggagtgtgcctatcaatacgacgatgacggctaccagagctactgcaccatctgttgcggcggaagagaggtgctgatgtgtggaaataacaactgctgccggtgcttctgcgtggaatgcgtggacctgctggtgggccccggcgccgcccaggccgctattaaggaagatccttggaactgctacatgtgcggccacaagggcacatacggcctgctgagacggagagaggactggcctagcagactgcagatgttcttcgccaataaccacgaccaggagttcgacccccctaaggtgtaccctcccgtccccgccgagaagagaaagcccatccgggtcctgagcctgttcgatggcatcgccaccggtctgctggtgctgaaggacctgggcatccaggtggataggtacattgcctccgaggtgtgcgaggactccatcaccgtgggaatggtgcgtcatcagggcaagatcatgtacgtgggcgacgtgcggagcgtgacacagaagcatatccaggagtggggccctttcgacctggtgatcggcggcagcccttgcaatgacctgagcatcgtgaacccagcccggaagggcctgtacgagggaaccggcagactgttcttcgagttttacagactgctgcacgacgcccggcctaaggaaggcgacgaccggcccttcttttggctgttcgagaatgtggtggccatgggagtcagcgacaagcgggatattagccggttcctggagagcaaccccgtgatgatcgatgccaaggaagtgagcgccgcccaccgggccagatacttctggggcaatctgcctggcatgaacagacccctggccagcaccgtgaacgacaagctggagctgcaggagtgcctggagcacggccggatcgccaagttcagcaaggtgagaaccatcaccacccgaagcaacagcatcaaacaaggcaaggaccagcactttcctgtgttcatgaacgagaaggaggacatcctgtggtgtaccgagatggagagagtgttcgggttcccagtccactacacagatgtcagcaacatgtctagactggccagacagagactgctgggaagaagctggtccgtccctgtgatcagacacctgttcgcccctctgaaggagtacttcgcctgcgtgagcagcggcaacagcaacgccaacagccggggccccagcttctctagcggcctggtgccactgtccctgagagggagccacatgggccccatggagatctacaaaaccgtgagcgcctggaagcggcagcctgtgcgcgtgctgagcctgtttcggaatatcgataaagtcctgaaaagcctgggattcctggagagcggctctggctccggcggtggcaccctgaagtacgtggaggatgtgacaaacgtggtcagacgggatgtggagaagtggggccccttcgatctggtgtacggcagcacccaacccctgggcagctcttgtgaccggtgccctggctggtacatgtttcagttccaccggatcctgcagtacgccctgccgagacaggagtcccagcggccattcttttggattttcatggacaacttgctgctgaccgaggatgaccaggaaactaccactcggttcctgcagaccgaagccgtgaccctgcaggacgtgagaggccgggactaccagaacgccatgcgggtgtggtccaacatccctggactgaaaagcaagcacgcacctctgacccctaaagaagaggagtacctgcaggcccaggtgcggagcagaagcaagctggacgcccctaaggtggatctgctggtgaagaattgcctcctgcccctgagagagtacttcaagtatttcagccagaatagtctgcccctgggaggcagcggcggcggcgccctggtgacatttgaggacgtcgccgtgcggttcacccaggaggaatgggctctgctggatccttctcagaaaatcctgtaccgggacgtgatgagagagacataccggaatctgacctccgtgggcatcaactgggaatgttgggaccttgaagcctgcttcagaagcctgggaagaaacctgagagtgcaggtggtgaagagaaagtgcgagctgaccaacagcggcccctgcgccgagggcggcccaagcagcggcgcccctcctcccagcggcggcagcccagccggctccccaacctctaccgaggagggcacctctgagtccgccacccccgagagcggccctggcacctccaccgagcccagcgagggcagcgcacccggcagccctgccggcagccccacctccacagaggagggaaccagcaccgagcccagcgaaggcagcgccccaggcaccagcaccgagcctagtgagcaggagattaaacggatcaacaagatcagaagaagacttgtgaaagacagcaacaccaagaaggccggcaagacaggccccatgaaaaccctgctggttagagtgatgacacccgatctgagagagcggctggaaaacctgagaaagaagcctgaaaatatcccccagcccatcagcaatacatctagagccaacctgaataagctgctgaccgattacaccgaaatgaagaaggcgatcctgcatgtgtactgggaagagttccagaaggaccctgtgggcctgatgagccgggtggcccagcctgccagcaagaagatcgatcagaacaagctgaaacctgagatggacgagaagggcaacctgaccaccgccggctttgcctgctctcagtgtggccagcccctgttcgtgtacaagctggagcaggtgtctgagaagggcaaggcttacaccaactacttcggacggtgcaatgtggccgagcacgaaaagctgatcctgctggcccagctgaagcccgagaaggatagcgacgaagccgtgacatatagcctgggaaagtttgggcagagggccctggatttctacagcattcatgtgaccaaggagtccacccaccccgtgaagcccctggcccagatcgccggaaacagatacgcctccggacctgtgggaaaggccctgagcgacgcatgtatgggcacaatcgcctccttcctgtctaagtaccaggacatcatcatcgaacaccagaaggtggtgaagggcaaccagaagagactggagagcctgcgggagctggccggcaaggaaaacctggaataccctagcgtgaccctgccacctcagcctcacaccaaggagggcgttgatgcctacaacgaagtgatcgcccgggtgcgaatgtgggtgaacctgaacctgtggcagaagctgaagctaagcagagatgatgccaagcctctgctgagactgaagggattcccttcctttcctctggtcgagagacaggccaacgaagtggactggtgggacatggtgtgtaacgtgaagaagctgatcaacgagaaaaaggaggatggcaaggtgttttggcagaatctggctggctacaagagacaggaagccctgagaccatacctgagcagcgaggaagatcggaagaagggaaagaaattcgctcggtaccagctgggcgacctgctgctgcacctggaaaagaagcacggcgaggactggggaaaggtgtacgacgaggcctgggagcggattgacaagaaagtggaaggcctgagcaagcacatcaagctggaagaggaacggagaagcgaggacgcccagagcaaggccgccctgaccgactggctgcgggctaaggccagcttcgtgatcgagggcctgaaggaggccgacaaggacgagttctgcagatgcgagctgaagctgcagaagtggtacggggacctgcggggaaagcccttcgccatcgaagccgagaacagcatcctggacatcagcggcttcagcaagcagtacaactgtgccttcatctggcagaaggacggcgtgaagaagctgaacctgtacctgatcatcaactacttcaagggcggcaagctgcggttcaagaagatcaaacctgaagccttcgaagccaacagattctacaccgtgatcaacaaaaagagcggcgagatcgtgcccatggaggtgaacttcaacttcgacgaccccaacctgatcatcctgcctctggcctttggcaagagacagggcagagaattcatctggaacgacctgctgtccctggaaaccggcagcctgaagctggccaacggaagagtgatcgagaagacactgtacaacagaagaacccggcaggatgagcctgccctgttcgtggccctgaccttcgagcggcgggaggtcctggactcctccaatatcaaaccaatgaacctgatcggcgtggcaagaggcgaaaacatccccgccgtgatcgccctgaccgaccccgagggctgcccactgagccggtttaaggatagcctgggaaacccaacccacatcctgagaatcggcgagagctataaggagaagcagcggaccatccaggccaagaaggaggtggagcagcggagagccggcggctacagccggaagtacgccagcaaagccaagaatctggcagacgatatggtgagaaacaccgctagagatctgctgtactacgccgtgacccaggatgccatgctgatcttcgccaacctgagccggggcttcggccggcagggcaagcggaccttcatggccgagagacagtacacacggatggaggactggctgaccgccaagctggcctacgagggcctgagcaagacctacctgtccaagacactggcccagtacacctccaagacatgcagcaactgtgggtttaccatcaccagcgccgactacgacagggtgctggagaagctgaagaagacagcaacaggctggatgaccacaattaacggcaaggagctgaaggtggagggccagattacctactacaacagatacaagagacagaacgtagtcaaggacctgtccgtcgagctggatagactgagcgaagaatctgtgaacaacgacatctcctcctggacaaagggcagaagcggagaagctctgagcctcctgaagaaaagattctcccatagacccgtgcaggagaagttcgtgtgcctgaactgcggcttcgagacacacgcagccgagcaagccgccctgaacatcgccagatcctggctgttcctgcggagccaggagtacaagaaataccagacaaacaagacaaccggcaacaccgataagagagccttcgtcgagacctggcagtccttttaccggaagaagcttaaggaggtgtggaaacctgccgtgcggtctggcggatctggcggaggctccttccaggaggccgtgaccttcaaggacgtggccgtggccttcaccgaggaggagctgggcctgctggacagcgcccagaggaagctgtacagggacgtgatgctggagaacttcaggaacctggtgagcgtgggcaggcagagcttcaagcccgacatgatcagccagctggagagggaggagaagctgtggatgaaggagttccagacccagaggggcaggcacagcggcgacaggaaccagggcggcccaagcagcggcgcccctcctcccagcggcggcagcccagccggctccccaacctctaccgaggagggcacctctgagtccgccacccccgagagcggccctggcacctccaccgagcccagcgagggcagcgcacccggcagccctgccggcagccccacctccacagaggagggaaccagcaccgagcccagcgaaggcagcgccccaggcaccagcaccgagcctagtgagcaggagattaaacggatcaacaagatcagaagaagacttgtgaaagacagcaacaccaagaaggccggcaagacaggccccatgaaaaccctgctggttagagtgatgacacccgatctgagagagcggctggaaaacctgagaaagaagcctgaaaatatcccccagcccatcagcaatacatctagagccaacctgaataagctgctgaccgattacaccgaaatgaagaaggcgatcctgcatgtgtactgggaagagttccagaaggaccctgtgggcctgatgagccgggtggcccagcctgccagcaagaagatcgatcagaacaagctgaaacctgagatggacgagaagggcaacctgaccaccgccggctttgcctgctctcagtgtggccagcccctgttcgtgtacaagctggagcaggtgtctgagaagggcaaggcttacaccaactacttcggacggtgcaatgtggccgagcacgaaaagctgatcctgctggcccagctgaagcccgagaaggatagcgacgaagccgtgacatatagcctgggaaagtttgggcagagggccctggatttctacagcattcatgtgaccaaggagtccacccaccccgtgaagcccctggcccagatcgccggaaacagatacgcctccggacctgtgggaaaggccctgagcgacgcatgtatgggcacaatcgcctccttcctgtctaagtaccaggacatcatcatcgaacaccagaaggtggtgaagggcaaccagaagagactggagagcctgcgggagctggccggcaaggaaaacctggaataccctagcgtgaccctgccacctcagcctcacaccaaggagggcgttgatgcctacaacgaagtgatcgcccgggtgcgaatgtgggtgaacctgaacctgtggcagaagctgaagctaagcagagatgatgccaagcctctgctgagactgaagggattcccttcctttcctctggtcgagagacaggccaacgaagtggactggtgggacatggtgtgtaacgtgaagaagctgatcaacgagaaaaaggaggatggcaaggtgttttggcagaatctggctggctacaagagacaggaagccctgagaccatacctgagcagcgaggaagatcggaagaagggaaagaaattcgctcggtaccagctgggcgacctgctgctgcacctggaaaagaagcacggcgaggactggggaaaggtgtacgacgaggcctgggagcggattgacaagaaagtggaaggcctgagcaagcacatcaagctggaagaggaacggagaagcgaggacgcccagagcaaggccgccctgaccgactggctgcgggctaaggccagcttcgtgatcgagggcctgaaggaggccgacaaggacgagttctgcagatgcgagctgaagctgcagaagtggtacggggacctgcggggaaagcccttcgccatcgaagccgagaacagcatcctggacatcagcggcttcagcaagcagtacaactgtgccttcatctggcagaaggacggcgtgaagaagctgaacctgtacctgatcatcaactacttcaagggcggcaagctgcggttcaagaagatcaaacctgaagccttcgaagccaacagattctacaccgtgatcaacaaaaagagcggcgagatcgtgcccatggaggtgaacttcaacttcgacgaccccaacctgatcatcctgcctctggcctttggcaagagacagggcagagaattcatctggaacgacctgctgtccctggaaaccggcagcctgaagctggccaacggaagagtgatcgagaagacactgtacaacagaagaacccggcaggatgagcctgccctgttcgtggccctgaccttcgagcggcgggaggtcctggactcctccaatatcaaaccaatgaacctgatcggcgtggcaagaggcgaaaacatccccgccgtgatcgccctgaccgaccccgagggctgcccactgagccggtttaaggatagcctgggaaacccaacccacatcctgagaatcggcgagagctataaggagaagcagcggaccatccaggccaagaaggaggtggagcagcggagagccggcggctacagccggaagtacgccagcaaagccaagaatctggcagacgatatggtgagaaacaccgctagagatctgctgtactacgccgtgacccaggatgccatgctgatcttcgccaacctgagccggggcttcggccggcagggcaagcggaccttcatggccgagagacagtacacacggatggaggactggctgaccgccaagctggcctacgagggcctgagcaagacctacctgtccaagacactggcccagtacacctccaagacatgcagcaactgtgggtttaccatcaccagcgccgactacgacagggtgctggagaagctgaagaagacagcaacaggctggatgaccacaattaacggcaaggagctgaaggtggagggccagattacctactacaacagatacaagagacagaacgtagtcaaggacctgtccgtcgagctggatagactgagcgaagaatctgtgaacaacgacatctcctcctggacaaagggcagaagcggagaagctctgagcctcctgaagaaaagattctcccatagacccgtgcaggagaagttcgtgtgcctgaactgcggcttcgagacacacgcagccgagcaagccgccctgaacatcgccagatcctggctgttcctgcggagccaggagtacaagaaataccagacaaacaagacaaccggcaacaccgataagagagccttcgtcgagacctggcagtccttttaccggaagaagcttaaggaggtgtggaaacctgccgtgcggtctggcggatctggcggaggctcctttccaggaggccgtgaccttcaaggacgtggccgtggccttcaccgaggaggagctgggcctgctggacagcgcccagaggaagctgtacagggacgtgatgctggagaacttcaggaacctggtgagcgtgggcaggcagagcttcaagcccgacatgatcagccagctggagagggaggagaagctgtggatgaaggagttccagacccagaggggcaggcacagcggcgacaggaaccagggatctggctccggcagcggccccaagaaaaagagaaaagtctaagctgccttctgcggggcttgccttctggccatgcccttcttctctcccttgcacctgtacctcttggtctttgaataaagcctgagtaggaaggctagcaaaaaaaaaaaaaaaaaaaaaaaaaaaaaaaaaaaaaaaaaaaaaaaaaaaaaaaaaaaaaaaaaaaaaaaaaaaaaaaa

SEQ ID NO: 16184 - RNA, 9485 nt, synthetic construct
  source 1..9485: mol_type = other RNA
aggaaataagagagaaaagaagagtaagaagaaatataagagccaccatggcccctaagaagaagcgtaaagtgagccggatggaacgcctcgtctacgaggtgcggcagaagtgcagaaacatcgaggacatctgcatctcctgcggatctctgaacgtgaccctggagcacccactgttcatcggcggcatgtgccagaactgtaaaaactgttttctggagtgtgcctatcaatacgacgatgacggctaccagagctactgcaccatctgttgcggcggaagagaggtgctgatgtgtggaaataacaactgctgccggtgcttctgcgtggaatgcgtggacctgctggtgggccccggcgccgcccaggccgctattaaggaagatccttggaactgctacatgtgcggccacaagggcacatacggcctgctgagacggagagaggactggcctagcagactgcagatgttcttcgccaataaccacgaccaggagttcgacccccctaaggtgtaccctcccgtccccgccgagaagagaaagcccatccgggtcctgagcctgttcgatggcatcgccaccggtctgctggtgctgaaggacctgggcatccaggtggataggtacattgcctccgaggtgtgcgaggactccatcaccgtgggaatggtgcgtcatcagggcaagatcatgtacgtgggcgacgtgcggagcgtgacacagaagcatatccaggagtggggccctttcgacctggtgatcggcggcagcccttgcaatgacctgagcatcgtgaacccagcccggaagggcctgtacgagggaaccggcagactgttcttcgagttttacagactgctgcacgacgcccggcctaaggaaggcgacgaccggcccttcttttggctgttcgagaatgtggtggccatgggagtcagcgacaagcgggatattagccggttcctggagagcaaccccgtgatgatcgatgccaaggaagtgagcgccgcccaccgggccagatacttctggggcaatctgcctggcatgaacagacccctggccagcaccgtgaacgacaagctggagctgcaggagtgcctggagcacggccggatcgccaagttcagcaaggtgagaaccatcaccacccgaagcaacagcatcaaacaaggcaaggaccagcactttcctgtgttcatgaacgagaaggaggacatcctgtggtgtaccgagatggagagagtgttcgggttcccagtccactacacagatgtcagcaacatgtctagactggccagacagagactgctgggaagaagctggtccgtccctgtgatcagacacctgttcgcccctctgaaggagtacttcgcctgcgtgagcagcggcaacagcaacgccaacagccggggccccagcttctctagcggcctggtgccactgtccctgagagggagccacatgggccccatggagatctacaaaaccgtgagcgcctggaagcggcagcctgtgcgcgtgctgagcctgtttcggaatatcgataaagtcctgaaaagcctgggattcctggagagcggctctggctccggcggtggcaccctgaagtacgtggaggatgtgacaaacgtggtcagacgggatgtggagaagtggggccccttcgatctggtgtacggcagcacccaacccctgggcagctcttgtgaccggtgccctggctggtacatgtttcagttccaccggatcctgcagtacgccctgccgagacaggagtcccagcggccattcttttggattttcatggacaacttgctgctgaccgaggatgaccaggaaactaccactcggttcctgcagaccgaagccgtgaccctgcaggacgtgagaggccgggactaccagaacgccatgcgggtgtggtccaacatccctggactgaaaagcaagcacgcacctctgacccctaaagaagaggagtacctgcaggcccaggtgcggagcagaagcaagctggacgcccctaaggtggatctgctggtgaagaattgcctcctgcccctgagagagtacttcaagtatttcagccagaatagtctgcccctgggaggcagcggcggcggcgccctggtgacatttgaggacgtcgccgtgcggttcacccaggaggaatgggctctgctggatccttctcagaaaatcctgtaccgggacgtgatgagagagacataccggaatctgacctccgtgggcatcaactgggaatgttgggaccttgaagcctgcttcagaagcctgggaagaaacctgagagtgcaggtggtgaagagaaagtgcgagctgaccaacagcggcccctgcgccgagggcggcccaagcagcggcgcccctcctcccagcggcggcagcccagccggctccccaacctctaccgaggagggcacctctgagtccgccacccccgagagcggccctggcacctccaccgagcccagcgagggcagcgcacccggcagccctgccggcagccccacctccacagaggagggaaccagcaccgagcccagcgaaggcagcgccccaggcaccagcaccgagcctagtgagcaggagattaaacggatcaacaagatcagaagaagacttgtgaaagacagcaacaccaagaaggccggcaagacaggccccatgaaaaccctgctggttagagtgatgacacccgatctgagagagcggctggaaaacctgagaaagaagcctgaaaatatcccccagcccatcagcaatacatctagagccaacctgaataagctgctgaccgattacaccgaaatgaagaaggcgatcctgcatgtgtactgggaagagttccagaaggaccctgtgggcctgatgagccgggtggcccagcctgccagcaagaagatcgatcagaacaagctgaaacctgagatggacgagaagggcaacctgaccaccgccggctttgcctgctctcagtgtggccagcccctgttcgtgtacaagctggagcaggtgtctgagaagggcaaggcttacaccaactacttcggacggtgcaatgtggccgagcacgaaaagctgatcctgctggcccagctgaagcccgagaaggatagcgacgaagccgtgacatatagcctgggaaagtttgggcagagggccctggatttctacagcattcatgtgaccaaggagtccacccaccccgtgaagcccctggcccagatcgccggaaacagatacgcctccggacctgtgggaaaggccctgagcgacgcatgtatgggcacaatcgcctccttcctgtctaagtaccaggacatcatcatcgaacaccagaaggtggtgaagggcaaccagaagagactggagagcctgcgggagctggccggcaaggaaaacctggaataccctagcgtgaccctgccacctcagcctcacaccaaggagggcgttgatgcctacaacgaagtgatcgcccgggtgcgaatgtgggtgaacctgaacctgtggcagaagctgaagctaagcagagatgatgccaagcctctgctgagactgaagggattcccttcctttcctctggtcgagagacaggccaacgaagtggactggtgggacatggtgtgtaacgtgaagaagctgatcaacgagaaaaaggaggatggcaaggtgttttggcagaatctggctggctacaagagacaggaagccctgagaccatacctgagcagcgaggaagatcggaagaagggaaagaaattcgctcggtaccagctgggcgacctgctgctgcacctggaaaagaagcacggcgaggactggggaaaggtgtacgacgaggcctgggagcggattgacaagaaagtggaaggcctgagcaagcacatcaagctggaagaggaacggagaagcgaggacgcccagagcaaggccgccctgaccgactggctgcgggctaaggccagcttcgtgatcgagggcctgaaggaggccgacaaggacgagttctgcagatgcgagctgaagctgcagaagtggtacggggacctgcggggaaagcccttcgccatcgaagccgagaacagcatcctggacatcagcggcttcagcaagcagtacaactgtgccttcatctggcagaaggacggcgtgaagaagctgaacctgtacctgatcatcaactacttcaagggcggcaagctgcggttcaagaagatcaaacctgaagccttcgaagccaacagattctacaccgtgatcaacaaaaagagcggcgagatcgtgcccatggaggtgaacttcaacttcgacgaccccaacctgatcatcctgcctctggcctttggcaagagacagggcagagaattcatctggaacgacctgctgtccctggaaaccggcagcctgaagctggccaacggaagagtgatcgagaagacactgtacaacagaagaacccggcaggatgagcctgccctgttcgtggccctgaccttcgagcggcgggaggtcctggactcctccaatatcaaaccaatgaacctgatcggcgtggcaagaggcgaaaacatccccgccgtgatcgccctgaccgaccccgagggctgcccactgagccggtttaaggatagcctgggaaacccaacccacatcctgagaatcggcgagagctataaggagaagcagcggaccatccaggccaagaaggaggtggagcagcggagagccggcggctacagccggaagtacgccagcaaagccaagaatctggcagacgatatggtgagaaacaccgctagagatctgctgtactacgccgtgacccaggatgccatgctgatcttcgccaacctgagccggggcttcggccggcagggcaagcggaccttcatggccgagagacagtacacacggatggaggactggctgaccgccaagctggcctacgagggcctgagcaagacctacctgtccaagacactggcccagtacacctccaagacatgcagcaactgtgggtttaccatcaccagcgccgactacgacagggtgctggagaagctgaagaagacagcaacaggctggatgaccacaattaacggcaaggagctgaaggtggagggccagattacctactacaacagatacaagagacagaacgtagtcaaggacctgtccgtcgagctggatagactgagcgaagaatctgtgaacaacgacatctcctcctggacaaagggcagaagcggagaagctctgagcctcctgaagaaaagattctcccatagacccgtgcaggagaagttcgtgtgcctgaactgcggcttcgagacacacgcagccgagcaagccgccctgaacatcgccagatcctggctgttcctgcggagccaggagtacaagaaataccagacaaacaagacaaccggcaacaccgataagagagccttcgtcgagacctggcagtccttttaccggaagaagcttaaggaggtgtggaaacctgccgtgcggtctggcggatctggcggaggctccagcaagctgcccgaggccttcgaggacgtggccgtgtacttcaccaggaaggagtgggagctgctggaggccggcgacaagggcctgtaccaggaccagatgctgaggaactaccaggccctggtgagcctgggcctgcagggccccgcccccgacctgatctgcaggatgcagctgggcgagatggagctgtgggtgtgcgacgacgaggaggccggcgagagcagcctgagcgaggacttcggcggcccaagcagcggcgcccctcctcccagcggcggcagcccagccggctccccaacctctaccgaggagggcacctctgagtccgccacccccgagagcggccctggcacctccaccgagcccagcgagggcagcgcacccggcagccctgccggcagccccacctccacagaggagggaaccagcaccgagcccagcgaaggcagcgccccaggcaccagcaccgagcctagtgagcaggagattaaacggatcaacaagatcagaagaagacttgtgaaagacagcaacaccaagaaggccggcaagacaggccccatgaaaaccctgctggttagagtgatgacacccgatctgagagagcggctggaaaacctgagaaagaagcctgaaaatatcccccagcccatcagcaatacatctagagccaacctgaataagctgctgaccgattacaccgaaatgaagaaggcgatcctgcatgtgtactgggaagagttccagaaggaccctgtgggcctgatgagccgggtggcccagcctgccagcaagaagatcgatcagaacaagctgaaacctgagatggacgagaagggcaacctgaccaccgccggctttgcctgctctcagtgtggccagcccctgttcgtgtacaagctggagcaggtgtctgagaagggcaaggcttacaccaactacttcggacggtgcaatgtggccgagcacgaaaagctgatcctgctggcccagctgaagcccgagaaggatagcgacgaagccgtgacatatagcctgggaaagtttgggcagagggccctggatttctacagcattcatgtgaccaaggagtccacccaccccgtgaagcccctggcccagatcgccggaaacagatacgcctccggacctgtgggaaaggccctgagcgacgcatgtatgggcacaatcgcctccttcctgtctaagtaccaggacatcatcatcgaacaccagaaggtggtgaagggcaaccagaagagactggagagcctgcgggagctggccggcaaggaaaacctggaataccctagcgtgaccctgccacctcagcctcacaccaaggagggcgttgatgcctacaacgaagtgatcgcccgggtgcgaatgtgggtgaacctgaacctgtggcagaagctgaagctaagcagagatgatgccaagcctctgctgagactgaagggattcccttcctttcctctggtcgagagacaggccaacgaagtggactggtgggacatggtgtgtaacgtgaagaagctgatcaacgagaaaaaggaggatggcaaggtgttttggcagaatctggctggctacaagagacaggaagccctgagaccatacctgagcagcgaggaagatcggaagaagggaaagaaattcgctcggtaccagctgggcgacctgctgctgcacctggaaaagaagcacggcgaggactggggaaaggtgtacgacgaggcctgggagcggattgacaagaaagtggaaggcctgagcaagcacatcaagctggaagaggaacggagaagcgaggacgcccagagcaaggccgccctgaccgactggctgcgggctaaggccagcttcgtgatcgagggcctgaaggaggccgacaaggacgagttctgcagatgcgagctgaagctgcagaagtggtacggggacctgcggggaaagcccttcgccatcgaagccgagaacagcatcctggacatcagcggcttcagcaagcagtacaactgtgccttcatctggcagaaggacggcgtgaagaagctgaacctgtacctgatcatcaactacttcaagggcggcaagctgcggttcaagaagatcaaacctgaagccttcgaagccaacagattctacaccgtgatcaacaaaaagagcggcgagatcgtgcccatggaggtgaacttcaacttcgacgaccccaacctgatcatcctgcctctggcctttggcaagagacagggcagagaattcatctggaacgacctgctgtccctggaaaccggcagcctgaagctggccaacggaagagtgatcgagaagacactgtacaacagaagaacccggcaggatgagcctgccctgttcgtggccctgaccttcgagcggcgggaggtcctggactcctccaatatcaaaccaatgaacctgatcggcgtggcaagaggcgaaaacatccccgccgtgatcgccctgaccgaccccgagggctgcccactgagccggtttaaggatagcctgggaaacccaacccacatcctgagaatcggcgagagctataaggagaagcagcggaccatccaggccaagaaggaggtggagcagcggagagccggcggctacagccggaagtacgccagcaaagccaagaatctggcagacgatatggtgagaaacaccgctagagatctgctgtactacgccgtgacccaggatgccatgctgatcttcgccaacctgagccggggcttcggccggcagggcaagcggaccttcatggccgagagacagtacacacggatggaggactggctgaccgccaagctggcctacgagggcctgagcaagacctacctgtccaagacactggcccagtacacctccaagacatgcagcaactgtgggtttaccatcaccagcgccgactacgacagggtgctggagaagctgaagaagacagcaacaggctggatgaccacaattaacggcaaggagctgaaggtggagggccagattacctactacaacagatacaagagacagaacgtagtcaaggacctgtccgtcgagctggatagactgagcgaagaatctgtgaacaacgacatctcctcctggacaaagggcagaagcggagaagctctgagcctcctgaagaaaagattctcccatagacccgtgcaggagaagttcgtgtgcctgaactgcggcttcgagacacacgcagccgagcaagccgccctgaacatcgccagatcctggctgttcctgcggagccaggagtacaagaaataccagacaaacaagacaaccggcaacaccgataagagagccttcgtcgagacctggcagtccttttaccggaagaagcttaaggaggtgtggaaacctgccgtgcggtctggcggatctggcggaggctcctagcaagctgcccgaggccttcgaggacgtggccgtgtacttcaccaggaaggagtgggagctgctggaggccggcgacaagggcctgtaccaggaccagatgctgaggaactaccaggccctggtgagcctgggcctgcagggccccgcccccgacctgatctgcaggatgcagctgggcgagatggagctgtgggtgtgcgacgacgaggaggccggcgagagcagcctgagcgaggacttcggatctggctccggcagcggccccaagaaaaagagaaaagtctaagctgccttctgcggggcttgccttctggccatgcccttcttctctcccttgcacctgtacctcttggtctttgaataaagcctgagtaggaaggctagcaaaaaaaaaaaaaaaaaaaaaaaaaaaaaaaaaaaaaaaaaaaaaaaaaaaaaaaaaaaaaaaaaaaaaaaaaaaaaaaa

SEQ ID NO: 16185 - RNA, 9485 nt, synthetic construct
  source 1..9485: mol_type = other RNA
aggaaataagagagaaaagaagagtaagaagaaatataagagccaccatggcccctaagaagaagcgtaaagtgagccggatggaacgcctcgtctacgaggtgcggcagaagtgcagaaacatcgaggacatctgcatctcctgcggatctctgaacgtgaccctggagcacccactgttcatcggcggcatgtgccagaactgtaaaaactgttttctggagtgtgcctatcaatacgacgatgacggctaccagagctactgcaccatctgttgcggcggaagagaggtgctgatgtgtggaaataacaactgctgccggtgcttctgcgtggaatgcgtggacctgctggtgggccccggcgccgcccaggccgctattaaggaagatccttggaactgctacatgtgcggccacaagggcacatacggcctgctgagacggagagaggactggcctagcagactgcagatgttcttcgccaataaccacgaccaggagttcgacccccctaaggtgtaccctcccgtccccgccgagaagagaaagcccatccgggtcctgagcctgttcgatggcatcgccaccggtctgctggtgctgaaggacctgggcatccaggtggataggtacattgcctccgaggtgtgcgaggactccatcaccgtgggaatggtgcgtcatcagggcaagatcatgtacgtgggcgacgtgcggagcgtgacacagaagcatatccaggagtggggccctttcgacctggtgatcggcggcagcccttgcaatgacctgagcatcgtgaacccagcccggaagggcctgtacgagggaaccggcagactgttcttcgagttttacagactgctgcacgacgcccggcctaaggaaggcgacgaccggcccttcttttggctgttcgagaatgtggtggccatgggagtcagcgacaagcgggatattagccggttcctggagagcaaccccgtgatgatcgatgccaaggaagtgagcgccgcccaccgggccagatacttctggggcaatctgcctggcatgaacagacccctggccagcaccgtgaacgacaagctggagctgcaggagtgcctggagcacggccggatcgccaagttcagcaaggtgagaaccatcaccacccgaagcaacagcatcaaacaaggcaaggaccagcactttcctgtgttcatgaacgagaaggaggacatcctgtggtgtaccgagatggagagagtgttcgggttcccagtccactacacagatgtcagcaacatgtctagactggccagacagagactgctgggaagaagctggtccgtccctgtgatcagacacctgttcgcccctctgaaggagtacttcgcctgcgtgagcagcggcaacagcaacgccaacagccggggccccagcttctctagcggcctggtgccactgtccctgagagggagccacatgggccccatggagatctacaaaaccgtgagcgcctggaagcggcagcctgtgcgcgtgctgagcctgtttcggaatatcgataaagtcctgaaaagcctgggattcctggagagcggctctggctccggcggtggcaccctgaagtacgtggaggatgtgacaaacgtggtcagacgggatgtggagaagtggggccccttcgatctggtgtacggcagcacccaacccctgggcagctcttgtgaccggtgccctggctggtacatgtttcagttccaccggatcctgcagtacgccctgccgagacaggagtcccagcggccattcttttggattttcatggacaacttgctgctgaccgaggatgaccaggaaactaccactcggttcctgcagaccgaagccgtgaccctgcaggacgtgagaggccgggactaccagaacgccatgcgggtgtggtccaacatccctggactgaaaagcaagcacgcacctctgacccctaaagaagaggagtacctgcaggcccaggtgcggagcagaagcaagctggacgcccctaaggtggatctgctggtgaagaattgcctcctgcccctgagagagtacttcaagtatttcagccagaatagtctgcccctgggaggcagcggcggcggcgccctggtgacatttgaggacgtcgccgtgcggttcacccaggaggaatgggctctgctggatccttctcagaaaatcctgtaccgggacgtgatgagagagacataccggaatctgacctccgtgggcatcaactgggaatgttgggaccttgaagcctgcttcagaagcctgggaagaaacctgagagtgcaggtggtgaagagaaagtgcgagctgaccaacagcggcccctgcgccgagggcggcccaagcagcggcgcccctcctcccagcggcggcagcccagccggctccccaacctctaccgaggagggcacctctgagtccgccacccccgagagcggccctggcacctccaccgagcccagcgagggcagcgcacccggcagccctgccggcagccccacctccacagaggagggaaccagcaccgagcccagcgaaggcagcgccccaggcaccagcaccgagcctagtgagcaggagattaaacggatcaacaagatcagaagaagacttgtgaaagacagcaacaccaagaaggccggcaagacaggccccatgaaaaccctgctggttagagtgatgacacccgatctgagagagcggctggaaaacctgagaaagaagcctgaaaatatcccccagcccatcagcaatacatctagagccaacctgaataagctgctgaccgattacaccgaaatgaagaaggcgatcctgcatgtgtactgggaagagttccagaaggaccctgtgggcctgatgagccgggtggcccagcctgccagcaagaagatcgatcagaacaagctgaaacctgagatggacgagaagggcaacctgaccaccgccggctttgcctgctctcagtgtggccagcccctgttcgtgtacaagctggagcaggtgtctgagaagggcaaggcttacaccaactacttcggacggtgcaatgtggccgagcacgaaaagctgatcctgctggcccagctgaagcccgagaaggatagcgacgaagccgtgacatatagcctgggaaagtttgggcagagggccctggatttctacagcattcatgtgaccaaggagtccacccaccccgtgaagcccctggcccagatcgccggaaacagatacgcctccggacctgtgggaaaggccctgagcgacgcatgtatgggcacaatcgcctccttcctgtctaagtaccaggacatcatcatcgaacaccagaaggtggtgaagggcaaccagaagagactggagagcctgcgggagctggccggcaaggaaaacctggaataccctagcgtgaccctgccacctcagcctcacaccaaggagggcgttgatgcctacaacgaagtgatcgcccgggtgcgaatgtgggtgaacctgaacctgtggcagaagctgaagctaagcagagatgatgccaagcctctgctgagactgaagggattcccttcctttcctctggtcgagagacaggccaacgaagtggactggtgggacatggtgtgtaacgtgaagaagctgatcaacgagaaaaaggaggatggcaaggtgttttggcagaatctggctggctacaagagacaggaagccctgagaccatacctgagcagcgaggaagatcggaagaagggaaagaaattcgctcggtaccagctgggcgacctgctgctgcacctggaaaagaagcacggcgaggactggggaaaggtgtacgacgaggcctgggagcggattgacaagaaagtggaaggcctgagcaagcacatcaagctggaagaggaacggagaagcgaggacgcccagagcaaggccgccctgaccgactggctgcgggctaaggccagcttcgtgatcgagggcctgaaggaggccgacaaggacgagttctgcagatgcgagctgaagctgcagaagtggtacggggacctgcggggaaagcccttcgccatcgaagccgagaacagcatcctggacatcagcggcttcagcaagcagtacaactgtgccttcatctggcagaaggacggcgtgaagaagctgaacctgtacctgatcatcaactacttcaagggcggcaagctgcggttcaagaagatcaaacctgaagccttcgaagccaacagattctacaccgtgatcaacaaaaagagcggcgagatcgtgcccatggaggtgaacttcaacttcgacgaccccaacctgatcatcctgcctctggcctttggcaagagacagggcagagaattcatctggaacgacctgctgtccctggaaaccggcagcctgaagctggccaacggaagagtgatcgagaagacactgtacaacagaagaacccggcaggatgagcctgccctgttcgtggccctgaccttcgagcggcgggaggtcctggactcctccaatatcaaaccaatgaacctgatcggcgtggcaagaggcgaaaacatccccgccgtgatcgccctgaccgaccccgagggctgcccactgagccggtttaaggatagcctgggaaacccaacccacatcctgagaatcggcgagagctataaggagaagcagcggaccatccaggccaagaaggaggtggagcagcggagagccggcggctacagccggaagtacgccagcaaagccaagaatctggcagacgatatggtgagaaacaccgctagagatctgctgtactacgccgtgacccaggatgccatgctgatcttcgccaacctgagccggggcttcggccggcagggcaagcggaccttcatggccgagagacagtacacacggatggaggactggctgaccgccaagctggcctacgagggcctgagcaagacctacctgtccaagacactggcccagtacacctccaagacatgcagcaactgtgggtttaccatcaccagcgccgactacgacagggtgctggagaagctgaagaagacagcaacaggctggatgaccacaattaacggcaaggagctgaaggtggagggccagattacctactacaacagatacaagagacagaacgtagtcaaggacctgtccgtcgagctggatagactgagcgaagaatctgtgaacaacgacatctcctcctggacaaagggcagaagcggagaagctctgagcctcctgaagaaaagattctcccatagacccgtgcaggagaagttcgtgtgcctgaactgcggcttcgagacacacgcagccgagcaagccgccctgaacatcgccagatcctggctgttcctgcggagccaggagtacaagaaataccagacaaacaagacaaccggcaacaccgataagagagccttcgtcgagacctggcagtccttttaccggaagaagcttaaggaggtgtggaaacctgccgtgcggtctggcggatctggcggaggctccttccaggagcccgtgaccttcaaggacgtggccgtggagttcacctgggaggagtggaggcagctggaccccacccagagggccctgttcagggacgtgatgctggagaactacaggaacctggtgagcctgggcctggccgtgaccaagcccgacgtgatcttccagctggagagcggcgaggtgccctggatgctggagagggaggtgcccaggagcagccccaccgagtgcctgaacctgggcggcccaagcagcggcgcccctcctcccagcggcggcagcccagccggctccccaacctctaccgaggagggcacctctgagtccgccacccccgagagcggccctggcacctccaccgagcccagcgagggcagcgcacccggcagccctgccggcagccccacctccacagaggagggaaccagcaccgagcccagcgaaggcagcgccccaggcaccagcaccgagcctagtgagcaggagattaaacggatcaacaagatcagaagaagacttgtgaaagacagcaacaccaagaaggccggcaagacaggccccatgaaaaccctgctggttagagtgatgacacccgatctgagagagcggctggaaaacctgagaaagaagcctgaaaatatcccccagcccatcagcaatacatctagagccaacctgaataagctgctgaccgattacaccgaaatgaagaaggcgatcctgcatgtgtactgggaagagttccagaaggaccctgtgggcctgatgagccgggtggcccagcctgccagcaagaagatcgatcagaacaagctgaaacctgagatggacgagaagggcaacctgaccaccgccggctttgcctgctctcagtgtggccagcccctgttcgtgtacaagctggagcaggtgtctgagaagggcaaggcttacaccaactacttcggacggtgcaatgtggccgagcacgaaaagctgatcctgctggcccagctgaagcccgagaaggatagcgacgaagccgtgacatatagcctgggaaagtttgggcagagggccctggatttctacagcattcatgtgaccaaggagtccacccaccccgtgaagcccctggcccagatcgccggaaacagatacgcctccggacctgtgggaaaggccctgagcgacgcatgtatgggcacaatcgcctccttcctgtctaagtaccaggacatcatcatcgaacaccagaaggtggtgaagggcaaccagaagagactggagagcctgcgggagctggccggcaaggaaaacctggaataccctagcgtgaccctgccacctcagcctcacaccaaggagggcgttgatgcctacaacgaagtgatcgcccgggtgcgaatgtgggtgaacctgaacctgtggcagaagctgaagctaagcagagatgatgccaagcctctgctgagactgaagggattcccttcctttcctctggtcgagagacaggccaacgaagtggactggtgggacatggtgtgtaacgtgaagaagctgatcaacgagaaaaaggaggatggcaaggtgttttggcagaatctggctggctacaagagacaggaagccctgagaccatacctgagcagcgaggaagatcggaagaagggaaagaaattcgctcggtaccagctgggcgacctgctgctgcacctggaaaagaagcacggcgaggactggggaaaggtgtacgacgaggcctgggagcggattgacaagaaagtggaaggcctgagcaagcacatcaagctggaagaggaacggagaagcgaggacgcccagagcaaggccgccctgaccgactggctgcgggctaaggccagcttcgtgatcgagggcctgaaggaggccgacaaggacgagttctgcagatgcgagctgaagctgcagaagtggtacggggacctgcggggaaagcccttcgccatcgaagccgagaacagcatcctggacatcagcggcttcagcaagcagtacaactgtgccttcatctggcagaaggacggcgtgaagaagctgaacctgtacctgatcatcaactacttcaagggcggcaagctgcggttcaagaagatcaaacctgaagccttcgaagccaacagattctacaccgtgatcaacaaaaagagcggcgagatcgtgcccatggaggtgaacttcaacttcgacgaccccaacctgatcatcctgcctctggcctttggcaagagacagggcagagaattcatctggaacgacctgctgtccctggaaaccggcagcctgaagctggccaacggaagagtgatcgagaagacactgtacaacagaagaacccggcaggatgagcctgccctgttcgtggccctgaccttcgagcggcgggaggtcctggactcctccaatatcaaaccaatgaacctgatcggcgtggcaagaggcgaaaacatccccgccgtgatcgccctgaccgaccccgagggctgcccactgagccggtttaaggatagcctgggaaacccaacccacatcctgagaatcggcgagagctataaggagaagcagcggaccatccaggccaagaaggaggtggagcagcggagagccggcggctacagccggaagtacgccagcaaagccaagaatctggcagacgatatggtgagaaacaccgctagagatctgctgtactacgccgtgacccaggatgccatgctgatcttcgccaacctgagccggggcttcggccggcagggcaagcggaccttcatggccgagagacagtacacacggatggaggactggctgaccgccaagctggcctacgagggcctgagcaagacctacctgtccaagacactggcccagtacacctccaagacatgcagcaactgtgggtttaccatcaccagcgccgactacgacagggtgctggagaagctgaagaagacagcaacaggctggatgaccacaattaacggcaaggagctgaaggtggagggccagattacctactacaacagatacaagagacagaacgtagtcaaggacctgtccgtcgagctggatagactgagcgaagaatctgtgaacaacgacatctcctcctggacaaagggcagaagcggagaagctctgagcctcctgaagaaaagattctcccatagacccgtgcaggagaagttcgtgtgcctgaactgcggcttcgagacacacgcagccgagcaagccgccctgaacatcgccagatcctggctgttcctgcggagccaggagtacaagaaataccagacaaacaagacaaccggcaacaccgataagagagccttcgtcgagacctggcagtccttttaccggaagaagcttaaggaggtgtggaaacctgccgtgcggtctggcggatctggcggaggctcctttccaggagcccgtgaccttcaaggacgtggccgtggagttcacctgggaggagtggaggcagctggaccccacccagagggccctgttcagggacgtgatgctggagaactacaggaacctggtgagcctgggcctggccgtgaccaagcccgacgtgatcttccagctggagagcggcgaggtgccctggatgctggagagggaggtgcccaggagcagccccaccgagtgcctgaacctgggatctggctccggcagcggccccaagaaaaagagaaaagtctaagctgccttctgcggggcttgccttctggccatgcccttcttctctcccttgcacctgtacctcttggtctttgaataaagcctgagtaggaaggctagcaaaaaaaaaaaaaaaaaaaaaaaaaaaaaaaaaaaaaaaaaaaaaaaaaaaaaaaaaaaaaaaaaaaaaaaaaaaaaaaa

SEQ ID NO: 16186 - RNA, 9485 nt, synthetic construct
  source 1..9485: mol_type = other RNA
aggaaataagagagaaaagaagagtaagaagaaatataagagccaccatggcccctaagaagaagcgtaaagtgagccggatggaacgcctcgtctacgaggtgcggcagaagtgcagaaacatcgaggacatctgcatctcctgcggatctctgaacgtgaccctggagcacccactgttcatcggcggcatgtgccagaactgtaaaaactgttttctggagtgtgcctatcaatacgacgatgacggctaccagagctactgcaccatctgttgcggcggaagagaggtgctgatgtgtggaaataacaactgctgccggtgcttctgcgtggaatgcgtggacctgctggtgggccccggcgccgcccaggccgctattaaggaagatccttggaactgctacatgtgcggccacaagggcacatacggcctgctgagacggagagaggactggcctagcagactgcagatgttcttcgccaataaccacgaccaggagttcgacccccctaaggtgtaccctcccgtccccgccgagaagagaaagcccatccgggtcctgagcctgttcgatggcatcgccaccggtctgctggtgctgaaggacctgggcatccaggtggataggtacattgcctccgaggtgtgcgaggactccatcaccgtgggaatggtgcgtcatcagggcaagatcatgtacgtgggcgacgtgcggagcgtgacacagaagcatatccaggagtggggccctttcgacctggtgatcggcggcagcccttgcaatgacctgagcatcgtgaacccagcccggaagggcctgtacgagggaaccggcagactgttcttcgagttttacagactgctgcacgacgcccggcctaaggaaggcgacgaccggcccttcttttggctgttcgagaatgtggtggccatgggagtcagcgacaagcgggatattagccggttcctggagagcaaccccgtgatgatcgatgccaaggaagtgagcgccgcccaccgggccagatacttctggggcaatctgcctggcatgaacagacccctggccagcaccgtgaacgacaagctggagctgcaggagtgcctggagcacggccggatcgccaagttcagcaaggtgagaaccatcaccacccgaagcaacagcatcaaacaaggcaaggaccagcactttcctgtgttcatgaacgagaaggaggacatcctgtggtgtaccgagatggagagagtgttcgggttcccagtccactacacagatgtcagcaacatgtctagactggccagacagagactgctgggaagaagctggtccgtccctgtgatcagacacctgttcgcccctctgaaggagtacttcgcctgcgtgagcagcggcaacagcaacgccaacagccggggccccagcttctctagcggcctggtgccactgtccctgagagggagccacatgggccccatggagatctacaaaaccgtgagcgcctggaagcggcagcctgtgcgcgtgctgagcctgtttcggaatatcgataaagtcctgaaaagcctgggattcctggagagcggctctggctccggcggtggcaccctgaagtacgtggaggatgtgacaaacgtggtcagacgggatgtggagaagtggggccccttcgatctggtgtacggcagcacccaacccctgggcagctcttgtgaccggtgccctggctggtacatgtttcagttccaccggatcctgcagtacgccctgccgagacaggagtcccagcggccattcttttggattttcatggacaacttgctgctgaccgaggatgaccaggaaactaccactcggttcctgcagaccgaagccgtgaccctgcaggacgtgagaggccgggactaccagaacgccatgcgggtgtggtccaacatccctggactgaaaagcaagcacgcacctctgacccctaaagaagaggagtacctgcaggcccaggtgcggagcagaagcaagctggacgcccctaaggtggatctgctggtgaagaattgcctcctgcccctgagagagtacttcaagtatttcagccagaatagtctgcccctgggaggcagcggcggcggcgccctggtgacatttgaggacgtcgccgtgcggttcacccaggaggaatgggctctgctggatccttctcagaaaatcctgtaccgggacgtgatgagagagacataccggaatctgacctccgtgggcatcaactgggaatgttgggaccttgaagcctgcttcagaagcctgggaagaaacctgagagtgcaggtggtgaagagaaagtgcgagctgaccaacagcggcccctgcgccgagggcggcccaagcagcggcgcccctcctcccagcggcggcagcccagccggctccccaacctctaccgaggagggcacctctgagtccgccacccccgagagcggccctggcacctccaccgagcccagcgagggcagcgcacccggcagccctgccggcagccccacctccacagaggagggaaccagcaccgagcccagcgaaggcagcgccccaggcaccagcaccgagcctagtgagcaggagattaaacggatcaacaagatcagaagaagacttgtgaaagacagcaacaccaagaaggccggcaagacaggccccatgaaaaccctgctggttagagtgatgacacccgatctgagagagcggctggaaaacctgagaaagaagcctgaaaatatcccccagcccatcagcaatacatctagagccaacctgaataagctgctgaccgattacaccgaaatgaagaaggcgatcctgcatgtgtactgggaagagttccagaaggaccctgtgggcctgatgagccgggtggcccagcctgccagcaagaagatcgatcagaacaagctgaaacctgagatggacgagaagggcaacctgaccaccgccggctttgcctgctctcagtgtggccagcccctgttcgtgtacaagctggagcaggtgtctgagaagggcaaggcttacaccaactacttcggacggtgcaatgtggccgagcacgaaaagctgatcctgctggcccagctgaagcccgagaaggatagcgacgaagccgtgacatatagcctgggaaagtttgggcagagggccctggatttctacagcattcatgtgaccaaggagtccacccaccccgtgaagcccctggcccagatcgccggaaacagatacgcctccggacctgtgggaaaggccctgagcgacgcatgtatgggcacaatcgcctccttcctgtctaagtaccaggacatcatcatcgaacaccagaaggtggtgaagggcaaccagaagagactggagagcctgcgggagctggccggcaaggaaaacctggaataccctagcgtgaccctgccacctcagcctcacaccaaggagggcgttgatgcctacaacgaagtgatcgcccgggtgcgaatgtgggtgaacctgaacctgtggcagaagctgaagctaagcagagatgatgccaagcctctgctgagactgaagggattcccttcctttcctctggtcgagagacaggccaacgaagtggactggtgggacatggtgtgtaacgtgaagaagctgatcaacgagaaaaaggaggatggcaaggtgttttggcagaatctggctggctacaagagacaggaagccctgagaccatacctgagcagcgaggaagatcggaagaagggaaagaaattcgctcggtaccagctgggcgacctgctgctgcacctggaaaagaagcacggcgaggactggggaaaggtgtacgacgaggcctgggagcggattgacaagaaagtggaaggcctgagcaagcacatcaagctggaagaggaacggagaagcgaggacgcccagagcaaggccgccctgaccgactggctgcgggctaaggccagcttcgtgatcgagggcctgaaggaggccgacaaggacgagttctgcagatgcgagctgaagctgcagaagtggtacggggacctgcggggaaagcccttcgccatcgaagccgagaacagcatcctggacatcagcggcttcagcaagcagtacaactgtgccttcatctggcagaaggacggcgtgaagaagctgaacctgtacctgatcatcaactacttcaagggcggcaagctgcggttcaagaagatcaaacctgaagccttcgaagccaacagattctacaccgtgatcaacaaaaagagcggcgagatcgtgcccatggaggtgaacttcaacttcgacgaccccaacctgatcatcctgcctctggcctttggcaagagacagggcagagaattcatctggaacgacctgctgtccctggaaaccggcagcctgaagctggccaacggaagagtgatcgagaagacactgtacaacagaagaacccggcaggatgagcctgccctgttcgtggccctgaccttcgagcggcgggaggtcctggactcctccaatatcaaaccaatgaacctgatcggcgtggcaagaggcgaaaacatccccgccgtgatcgccctgaccgaccccgagggctgcccactgagccggtttaaggatagcctgggaaacccaacccacatcctgagaatcggcgagagctataaggagaagcagcggaccatccaggccaagaaggaggtggagcagcggagagccggcggctacagccggaagtacgccagcaaagccaagaatctggcagacgatatggtgagaaacaccgctagagatctgctgtactacgccgtgacccaggatgccatgctgatcttcgccaacctgagccggggcttcggccggcagggcaagcggaccttcatggccgagagacagtacacacggatggaggactggctgaccgccaagctggcctacgagggcctgagcaagacctacctgtccaagacactggcccagtacacctccaagacatgcagcaactgtgggtttaccatcaccagcgccgactacgacagggtgctggagaagctgaagaagacagcaacaggctggatgaccacaattaacggcaaggagctgaaggtggagggccagattacctactacaacagatacaagagacagaacgtagtcaaggacctgtccgtcgagctggatagactgagcgaagaatctgtgaacaacgacatctcctcctggacaaagggcagaagcggagaagctctgagcctcctgaagaaaagattctcccatagacccgtgcaggagaagttcgtgtgcctgaactgcggcttcgagacacacgcagccgagcaagccgccctgaacatcgccagatcctggctgttcctgcggagccaggagtacaagaaataccagacaaacaagacaaccggcaacaccgataagagagccttcgtcgagacctggcagtccttttaccggaagaagcttaaggaggtgtggaaacctgccgtgcggtctggcggatctggcggaggctccagccagggcctggtgagcttcaaggacgtggccgtggacttcacccaggaggagtggcagcagctggaccccgcccagaggaccctgtacagggacgtgatgctggagaacttcagccacgtgatcagcctgggctaccccgtgagcaagcccgacgtgatcagcaagctggagcagggcgaggacccctggatcatcaagagggacgtgagcaactggatctacaccgacgagaaccaggccggcggcccaagcagcggcgcccctcctcccagcggcggcagcccagccggctccccaacctctaccgaggagggcacctctgagtccgccacccccgagagcggccctggcacctccaccgagcccagcgagggcagcgcacccggcagccctgccggcagccccacctccacagaggagggaaccagcaccgagcccagcgaaggcagcgccccaggcaccagcaccgagcctagtgagcaggagattaaacggatcaacaagatcagaagaagacttgtgaaagacagcaacaccaagaaggccggcaagacaggccccatgaaaaccctgctggttagagtgatgacacccgatctgagagagcggctggaaaacctgagaaagaagcctgaaaatatcccccagcccatcagcaatacatctagagccaacctgaataagctgctgaccgattacaccgaaatgaagaaggcgatcctgcatgtgtactgggaagagttccagaaggaccctgtgggcctgatgagccgggtggcccagcctgccagcaagaagatcgatcagaacaagctgaaacctgagatggacgagaagggcaacctgaccaccgccggctttgcctgctctcagtgtggccagcccctgttcgtgtacaagctggagcaggtgtctgagaagggcaaggcttacaccaactacttcggacggtgcaatgtggccgagcacgaaaagctgatcctgctggcccagctgaagcccgagaaggatagcgacgaagccgtgacatatagcctgggaaagtttgggcagagggccctggatttctacagcattcatgtgaccaaggagtccacccaccccgtgaagcccctggcccagatcgccggaaacagatacgcctccggacctgtgggaaaggccctgagcgacgcatgtatgggcacaatcgcctccttcctgtctaagtaccaggacatcatcatcgaacaccagaaggtggtgaagggcaaccagaagagactggagagcctgcgggagctggccggcaaggaaaacctggaataccctagcgtgaccctgccacctcagcctcacaccaaggagggcgttgatgcctacaacgaagtgatcgcccgggtgcgaatgtgggtgaacctgaacctgtggcagaagctgaagctaagcagagatgatgccaagcctctgctgagactgaagggattcccttcctttcctctggtcgagagacaggccaacgaagtggactggtgggacatggtgtgtaacgtgaagaagctgatcaacgagaaaaaggaggatggcaaggtgttttggcagaatctggctggctacaagagacaggaagccctgagaccatacctgagcagcgaggaagatcggaagaagggaaagaaattcgctcggtaccagctgggcgacctgctgctgcacctggaaaagaagcacggcgaggactggggaaaggtgtacgacgaggcctgggagcggattgacaagaaagtggaaggcctgagcaagcacatcaagctggaagaggaacggagaagcgaggacgcccagagcaaggccgccctgaccgactggctgcgggctaaggccagcttcgtgatcgagggcctgaaggaggccgacaaggacgagttctgcagatgcgagctgaagctgcagaagtggtacggggacctgcggggaaagcccttcgccatcgaagccgagaacagcatcctggacatcagcggcttcagcaagcagtacaactgtgccttcatctggcagaaggacggcgtgaagaagctgaacctgtacctgatcatcaactacttcaagggcggcaagctgcggttcaagaagatcaaacctgaagccttcgaagccaacagattctacaccgtgatcaacaaaaagagcggcgagatcgtgcccatggaggtgaacttcaacttcgacgaccccaacctgatcatcctgcctctggcctttggcaagagacagggcagagaattcatctggaacgacctgctgtccctggaaaccggcagcctgaagctggccaacggaagagtgatcgagaagacactgtacaacagaagaacccggcaggatgagcctgccctgttcgtggccctgaccttcgagcggcgggaggtcctggactcctccaatatcaaaccaatgaacctgatcggcgtggcaagaggcgaaaacatccccgccgtgatcgccctgaccgaccccgagggctgcccactgagccggtttaaggatagcctgggaaacccaacccacatcctgagaatcggcgagagctataaggagaagcagcggaccatccaggccaagaaggaggtggagcagcggagagccggcggctacagccggaagtacgccagcaaagccaagaatctggcagacgatatggtgagaaacaccgctagagatctgctgtactacgccgtgacccaggatgccatgctgatcttcgccaacctgagccggggcttcggccggcagggcaagcggaccttcatggccgagagacagtacacacggatggaggactggctgaccgccaagctggcctacgagggcctgagcaagacctacctgtccaagacactggcccagtacacctccaagacatgcagcaactgtgggtttaccatcaccagcgccgactacgacagggtgctggagaagctgaagaagacagcaacaggctggatgaccacaattaacggcaaggagctgaaggtggagggccagattacctactacaacagatacaagagacagaacgtagtcaaggacctgtccgtcgagctggatagactgagcgaagaatctgtgaacaacgacatctcctcctggacaaagggcagaagcggagaagctctgagcctcctgaagaaaagattctcccatagacccgtgcaggagaagttcgtgtgcctgaactgcggcttcgagacacacgcagccgagcaagccgccctgaacatcgccagatcctggctgttcctgcggagccaggagtacaagaaataccagacaaacaagacaaccggcaacaccgataagagagccttcgtcgagacctggcagtccttttaccggaagaagcttaaggaggtgtggaaacctgccgtgcggtctggcggatctggcggaggctcctagccagggcctggtgagcttcaaggacgtggccgtggacttcacccaggaggagtggcagcagctggaccccgcccagaggaccctgtacagggacgtgatgctggagaacttcagccacgtgatcagcctgggctaccccgtgagcaagcccgacgtgatcagcaagctggagcagggcgaggacccctggatcatcaagagggacgtgagcaactggatctacaccgacgagaaccaggccggatctggctccggcagcggccccaagaaaaagagaaaagtctaagctgccttctgcggggcttgccttctggccatgcccttcttctctcccttgcacctgtacctcttggtctttgaataaagcctgagtaggaaggctagcaaaaaaaaaaaaaaaaaaaaaaaaaaaaaaaaaaaaaaaaaaaaaaaaaaaaaaaaaaaaaaaaaaaaaaaaaaaaaaaa

SEQ ID NO: 16187 - RNA, 9485 nt, synthetic construct
  source 1..9485: mol_type = other RNA
aggaaataagagagaaaagaagagtaagaagaaatataagagccaccatggcccctaagaagaagcgtaaagtgagccggatggaacgcctcgtctacgaggtgcggcagaagtgcagaaacatcgaggacatctgcatctcctgcggatctctgaacgtgaccctggagcacccactgttcatcggcggcatgtgccagaactgtaaaaactgttttctggagtgtgcctatcaatacgacgatgacggctaccagagctactgcaccatctgttgcggcggaagagaggtgctgatgtgtggaaataacaactgctgccggtgcttctgcgtggaatgcgtggacctgctggtgggccccggcgccgcccaggccgctattaaggaagatccttggaactgctacatgtgcggccacaagggcacatacggcctgctgagacggagagaggactggcctagcagactgcagatgttcttcgccaataaccacgaccaggagttcgacccccctaaggtgtaccctcccgtccccgccgagaagagaaagcccatccgggtcctgagcctgttcgatggcatcgccaccggtctgctggtgctgaaggacctgggcatccaggtggataggtacattgcctccgaggtgtgcgaggactccatcaccgtgggaatggtgcgtcatcagggcaagatcatgtacgtgggcgacgtgcggagcgtgacacagaagcatatccaggagtggggccctttcgacctggtgatcggcggcagcccttgcaatgacctgagcatcgtgaacccagcccggaagggcctgtacgagggaaccggcagactgttcttcgagttttacagactgctgcacgacgcccggcctaaggaaggcgacgaccggcccttcttttggctgttcgagaatgtggtggccatgggagtcagcgacaagcgggatattagccggttcctggagagcaaccccgtgatgatcgatgccaaggaagtgagcgccgcccaccgggccagatacttctggggcaatctgcctggcatgaacagacccctggccagcaccgtgaacgacaagctggagctgcaggagtgcctggagcacggccggatcgccaagttcagcaaggtgagaaccatcaccacccgaagcaacagcatcaaacaaggcaaggaccagcactttcctgtgttcatgaacgagaaggaggacatcctgtggtgtaccgagatggagagagtgttcgggttcccagtccactacacagatgtcagcaacatgtctagactggccagacagagactgctgggaagaagctggtccgtccctgtgatcagacacctgttcgcccctctgaaggagtacttcgcctgcgtgagcagcggcaacagcaacgccaacagccggggccccagcttctctagcggcctggtgccactgtccctgagagggagccacatgggccccatggagatctacaaaaccgtgagcgcctggaagcggcagcctgtgcgcgtgctgagcctgtttcggaatatcgataaagtcctgaaaagcctgggattcctggagagcggctctggctccggcggtggcaccctgaagtacgtggaggatgtgacaaacgtggtcagacgggatgtggagaagtggggccccttcgatctggtgtacggcagcacccaacccctgggcagctcttgtgaccggtgccctggctggtacatgtttcagttccaccggatcctgcagtacgccctgccgagacaggagtcccagcggccattcttttggattttcatggacaacttgctgctgaccgaggatgaccaggaaactaccactcggttcctgcagaccgaagccgtgaccctgcaggacgtgagaggccgggactaccagaacgccatgcgggtgtggtccaacatccctggactgaaaagcaagcacgcacctctgacccctaaagaagaggagtacctgcaggcccaggtgcggagcagaagcaagctggacgcccctaaggtggatctgctggtgaagaattgcctcctgcccctgagagagtacttcaagtatttcagccagaatagtctgcccctgggaggcagcggcggcggcgccctggtgacatttgaggacgtcgccgtgcggttcacccaggaggaatgggctctgctggatccttctcagaaaatcctgtaccgggacgtgatgagagagacataccggaatctgacctccgtgggcatcaactgggaatgttgggaccttgaagcctgcttcagaagcctgggaagaaacctgagagtgcaggtggtgaagagaaagtgcgagctgaccaacagcggcccctgcgccgagggcggcccaagcagcggcgcccctcctcccagcggcggcagcccagccggctccccaacctctaccgaggagggcacctctgagtccgccacccccgagagcggccctggcacctccaccgagcccagcgagggcagcgcacccggcagccctgccggcagccccacctccacagaggagggaaccagcaccgagcccagcgaaggcagcgccccaggcaccagcaccgagcctagtgagcaggagattaaacggatcaacaagatcagaagaagacttgtgaaagacagcaacaccaagaaggccggcaagacaggccccatgaaaaccctgctggttagagtgatgacacccgatctgagagagcggctggaaaacctgagaaagaagcctgaaaatatcccccagcccatcagcaatacatctagagccaacctgaataagctgctgaccgattacaccgaaatgaagaaggcgatcctgcatgtgtactgggaagagttccagaaggaccctgtgggcctgatgagccgggtggcccagcctgccagcaagaagatcgatcagaacaagctgaaacctgagatggacgagaagggcaacctgaccaccgccggctttgcctgctctcagtgtggccagcccctgttcgtgtacaagctggagcaggtgtctgagaagggcaaggcttacaccaactacttcggacggtgcaatgtggccgagcacgaaaagctgatcctgctggcccagctgaagcccgagaaggatagcgacgaagccgtgacatatagcctgggaaagtttgggcagagggccctggatttctacagcattcatgtgaccaaggagtccacccaccccgtgaagcccctggcccagatcgccggaaacagatacgcctccggacctgtgggaaaggccctgagcgacgcatgtatgggcacaatcgcctccttcctgtctaagtaccaggacatcatcatcgaacaccagaaggtggtgaagggcaaccagaagagactggagagcctgcgggagctggccggcaaggaaaacctggaataccctagcgtgaccctgccacctcagcctcacaccaaggagggcgttgatgcctacaacgaagtgatcgcccgggtgcgaatgtgggtgaacctgaacctgtggcagaagctgaagctaagcagagatgatgccaagcctctgctgagactgaagggattcccttcctttcctctggtcgagagacaggccaacgaagtggactggtgggacatggtgtgtaacgtgaagaagctgatcaacgagaaaaaggaggatggcaaggtgttttggcagaatctggctggctacaagagacaggaagccctgagaccatacctgagcagcgaggaagatcggaagaagggaaagaaattcgctcggtaccagctgggcgacctgctgctgcacctggaaaagaagcacggcgaggactggggaaaggtgtacgacgaggcctgggagcggattgacaagaaagtggaaggcctgagcaagcacatcaagctggaagaggaacggagaagcgaggacgcccagagcaaggccgccctgaccgactggctgcgggctaaggccagcttcgtgatcgagggcctgaaggaggccgacaaggacgagttctgcagatgcgagctgaagctgcagaagtggtacggggacctgcggggaaagcccttcgccatcgaagccgagaacagcatcctggacatcagcggcttcagcaagcagtacaactgtgccttcatctggcagaaggacggcgtgaagaagctgaacctgtacctgatcatcaactacttcaagggcggcaagctgcggttcaagaagatcaaacctgaagccttcgaagccaacagattctacaccgtgatcaacaaaaagagcggcgagatcgtgcccatggaggtgaacttcaacttcgacgaccccaacctgatcatcctgcctctggcctttggcaagagacagggcagagaattcatctggaacgacctgctgtccctggaaaccggcagcctgaagctggccaacggaagagtgatcgagaagacactgtacaacagaagaacccggcaggatgagcctgccctgttcgtggccctgaccttcgagcggcgggaggtcctggactcctccaatatcaaaccaatgaacctgatcggcgtggcaagaggcgaaaacatccccgccgtgatcgccctgaccgaccccgagggctgcccactgagccggtttaaggatagcctgggaaacccaacccacatcctgagaatcggcgagagctataaggagaagcagcggaccatccaggccaagaaggaggtggagcagcggagagccggcggctacagccggaagtacgccagcaaagccaagaatctggcagacgatatggtgagaaacaccgctagagatctgctgtactacgccgtgacccaggatgccatgctgatcttcgccaacctgagccggggcttcggccggcagggcaagcggaccttcatggccgagagacagtacacacggatggaggactggctgaccgccaagctggcctacgagggcctgagcaagacctacctgtccaagacactggcccagtacacctccaagacatgcagcaactgtgggtttaccatcaccagcgccgactacgacagggtgctggagaagctgaagaagacagcaacaggctggatgaccacaattaacggcaaggagctgaaggtggagggccagattacctactacaacagatacaagagacagaacgtagtcaaggacctgtccgtcgagctggatagactgagcgaagaatctgtgaacaacgacatctcctcctggacaaagggcagaagcggagaagctctgagcctcctgaagaaaagattctcccatagacccgtgcaggagaagttcgtgtgcctgaactgcggcttcgagacacacgcagccgagcaagccgccctgaacatcgccagatcctggctgttcctgcggagccaggagtacaagaaataccagacaaacaagacaaccggcaacaccgataagagagccttcgtcgagacctggcagtccttttaccggaagaagcttaaggaggtgtggaaacctgccgtgcggtctggcggatctggcggaggctccgcccaggagagcgtgaccttcgaggacgtggccgtgaacttcaccgacagggagtggcagtgcctgacctacgcccagaggcacctgtacaaggacgtgatgctggagaactacggcaacatggtgagcgtgggcttccccttccccaagccccccctgatcagccacctggagaggggcgtggagctgtgcgtgcaggacccccaggacagggagagcctgagctgcagctgcctggtgagcggcggcccaagcagcggcgcccctcctcccagcggcggcagcccagccggctccccaacctctaccgaggagggcacctctgagtccgccacccccgagagcggccctggcacctccaccgagcccagcgagggcagcgcacccggcagccctgccggcagccccacctccacagaggagggaaccagcaccgagcccagcgaaggcagcgccccaggcaccagcaccgagcctagtgagcaggagattaaacggatcaacaagatcagaagaagacttgtgaaagacagcaacaccaagaaggccggcaagacaggccccatgaaaaccctgctggttagagtgatgacacccgatctgagagagcggctggaaaacctgagaaagaagcctgaaaatatcccccagcccatcagcaatacatctagagccaacctgaataagctgctgaccgattacaccgaaatgaagaaggcgatcctgcatgtgtactgggaagagttccagaaggaccctgtgggcctgatgagccgggtggcccagcctgccagcaagaagatcgatcagaacaagctgaaacctgagatggacgagaagggcaacctgaccaccgccggctttgcctgctctcagtgtggccagcccctgttcgtgtacaagctggagcaggtgtctgagaagggcaaggcttacaccaactacttcggacggtgcaatgtggccgagcacgaaaagctgatcctgctggcccagctgaagcccgagaaggatagcgacgaagccgtgacatatagcctgggaaagtttgggcagagggccctggatttctacagcattcatgtgaccaaggagtccacccaccccgtgaagcccctggcccagatcgccggaaacagatacgcctccggacctgtgggaaaggccctgagcgacgcatgtatgggcacaatcgcctccttcctgtctaagtaccaggacatcatcatcgaacaccagaaggtggtgaagggcaaccagaagagactggagagcctgcgggagctggccggcaaggaaaacctggaataccctagcgtgaccctgccacctcagcctcacaccaaggagggcgttgatgcctacaacgaagtgatcgcccgggtgcgaatgtgggtgaacctgaacctgtggcagaagctgaagctaagcagagatgatgccaagcctctgctgagactgaagggattcccttcctttcctctggtcgagagacaggccaacgaagtggactggtgggacatggtgtgtaacgtgaagaagctgatcaacgagaaaaaggaggatggcaaggtgttttggcagaatctggctggctacaagagacaggaagccctgagaccatacctgagcagcgaggaagatcggaagaagggaaagaaattcgctcggtaccagctgggcgacctgctgctgcacctggaaaagaagcacggcgaggactggggaaaggtgtacgacgaggcctgggagcggattgacaagaaagtggaaggcctgagcaagcacatcaagctggaagaggaacggagaagcgaggacgcccagagcaaggccgccctgaccgactggctgcgggctaaggccagcttcgtgatcgagggcctgaaggaggccgacaaggacgagttctgcagatgcgagctgaagctgcagaagtggtacggggacctgcggggaaagcccttcgccatcgaagccgagaacagcatcctggacatcagcggcttcagcaagcagtacaactgtgccttcatctggcagaaggacggcgtgaagaagctgaacctgtacctgatcatcaactacttcaagggcggcaagctgcggttcaagaagatcaaacctgaagccttcgaagccaacagattctacaccgtgatcaacaaaaagagcggcgagatcgtgcccatggaggtgaacttcaacttcgacgaccccaacctgatcatcctgcctctggcctttggcaagagacagggcagagaattcatctggaacgacctgctgtccctggaaaccggcagcctgaagctggccaacggaagagtgatcgagaagacactgtacaacagaagaacccggcaggatgagcctgccctgttcgtggccctgaccttcgagcggcgggaggtcctggactcctccaatatcaaaccaatgaacctgatcggcgtggcaagaggcgaaaacatccccgccgtgatcgccctgaccgaccccgagggctgcccactgagccggtttaaggatagcctgggaaacccaacccacatcctgagaatcggcgagagctataaggagaagcagcggaccatccaggccaagaaggaggtggagcagcggagagccggcggctacagccggaagtacgccagcaaagccaagaatctggcagacgatatggtgagaaacaccgctagagatctgctgtactacgccgtgacccaggatgccatgctgatcttcgccaacctgagccggggcttcggccggcagggcaagcggaccttcatggccgagagacagtacacacggatggaggactggctgaccgccaagctggcctacgagggcctgagcaagacctacctgtccaagacactggcccagtacacctccaagacatgcagcaactgtgggtttaccatcaccagcgccgactacgacagggtgctggagaagctgaagaagacagcaacaggctggatgaccacaattaacggcaaggagctgaaggtggagggccagattacctactacaacagatacaagagacagaacgtagtcaaggacctgtccgtcgagctggatagactgagcgaagaatctgtgaacaacgacatctcctcctggacaaagggcagaagcggagaagctctgagcctcctgaagaaaagattctcccatagacccgtgcaggagaagttcgtgtgcctgaactgcggcttcgagacacacgcagccgagcaagccgccctgaacatcgccagatcctggctgttcctgcggagccaggagtacaagaaataccagacaaacaagacaaccggcaacaccgataagagagccttcgtcgagacctggcagtccttttaccggaagaagcttaaggaggtgtggaaacctgccgtgcggtctggcggatctggcggaggctcctgcccaggagagcgtgaccttcgaggacgtggccgtgaacttcaccgacagggagtggcagtgcctgacctacgcccagaggcacctgtacaaggacgtgatgctggagaactacggcaacatggtgagcgtgggcttccccttccccaagccccccctgatcagccacctggagaggggcgtggagctgtgcgtgcaggacccccaggacagggagagcctgagctgcagctgcctggtgagcggatctggctccggcagcggccccaagaaaaagagaaaagtctaagctgccttctgcggggcttgccttctggccatgcccttcttctctcccttgcacctgtacctcttggtctttgaataaagcctgagtaggaaggctagcaaaaaaaaaaaaaaaaaaaaaaaaaaaaaaaaaaaaaaaaaaaaaaaaaaaaaaaaaaaaaaaaaaaaaaaaaaaaaaaa

SEQ ID NO: 16188 - RNA, 9485 nt, synthetic construct
  source 1..9485: mol_type = other RNA
aggaaataagagagaaaagaagagtaagaagaaatataagagccaccatggcccctaagaagaagcgtaaagtgagccggatggaacgcctcgtctacgaggtgcggcagaagtgcagaaacatcgaggacatctgcatctcctgcggatctctgaacgtgaccctggagcacccactgttcatcggcggcatgtgccagaactgtaaaaactgttttctggagtgtgcctatcaatacgacgatgacggctaccagagctactgcaccatctgttgcggcggaagagaggtgctgatgtgtggaaataacaactgctgccggtgcttctgcgtggaatgcgtggacctgctggtgggccccggcgccgcccaggccgctattaaggaagatccttggaactgctacatgtgcggccacaagggcacatacggcctgctgagacggagagaggactggcctagcagactgcagatgttcttcgccaataaccacgaccaggagttcgacccccctaaggtgtaccctcccgtccccgccgagaagagaaagcccatccgggtcctgagcctgttcgatggcatcgccaccggtctgctggtgctgaaggacctgggcatccaggtggataggtacattgcctccgaggtgtgcgaggactccatcaccgtgggaatggtgcgtcatcagggcaagatcatgtacgtgggcgacgtgcggagcgtgacacagaagcatatccaggagtggggccctttcgacctggtgatcggcggcagcccttgcaatgacctgagcatcgtgaacccagcccggaagggcctgtacgagggaaccggcagactgttcttcgagttttacagactgctgcacgacgcccggcctaaggaaggcgacgaccggcccttcttttggctgttcgagaatgtggtggccatgggagtcagcgacaagcgggatattagccggttcctggagagcaaccccgtgatgatcgatgccaaggaagtgagcgccgcccaccgggccagatacttctggggcaatctgcctggcatgaacagacccctggccagcaccgtgaacgacaagctggagctgcaggagtgcctggagcacggccggatcgccaagttcagcaaggtgagaaccatcaccacccgaagcaacagcatcaaacaaggcaaggaccagcactttcctgtgttcatgaacgagaaggaggacatcctgtggtgtaccgagatggagagagtgttcgggttcccagtccactacacagatgtcagcaacatgtctagactggccagacagagactgctgggaagaagctggtccgtccctgtgatcagacacctgttcgcccctctgaaggagtacttcgcctgcgtgagcagcggcaacagcaacgccaacagccggggccccagcttctctagcggcctggtgccactgtccctgagagggagccacatgggccccatggagatctacaaaaccgtgagcgcctggaagcggcagcctgtgcgcgtgctgagcctgtttcggaatatcgataaagtcctgaaaagcctgggattcctggagagcggctctggctccggcggtggcaccctgaagtacgtggaggatgtgacaaacgtggtcagacgggatgtggagaagtggggccccttcgatctggtgtacggcagcacccaacccctgggcagctcttgtgaccggtgccctggctggtacatgtttcagttccaccggatcctgcagtacgccctgccgagacaggagtcccagcggccattcttttggattttcatggacaacttgctgctgaccgaggatgaccaggaaactaccactcggttcctgcagaccgaagccgtgaccctgcaggacgtgagaggccgggactaccagaacgccatgcgggtgtggtccaacatccctggactgaaaagcaagcacgcacctctgacccctaaagaagaggagtacctgcaggcccaggtgcggagcagaagcaagctggacgcccctaaggtggatctgctggtgaagaattgcctcctgcccctgagagagtacttcaagtatttcagccagaatagtctgcccctgggaggcagcggcggcggcgccctggtgacatttgaggacgtcgccgtgcggttcacccaggaggaatgggctctgctggatccttctcagaaaatcctgtaccgggacgtgatgagagagacataccggaatctgacctccgtgggcatcaactgggaatgttgggaccttgaagcctgcttcagaagcctgggaagaaacctgagagtgcaggtggtgaagagaaagtgcgagctgaccaacagcggcccctgcgccgagggcggcccaagcagcggcgcccctcctcccagcggcggcagcccagccggctccccaacctctaccgaggagggcacctctgagtccgccacccccgagagcggccctggcacctccaccgagcccagcgagggcagcgcacccggcagccctgccggcagccccacctccacagaggagggaaccagcaccgagcccagcgaaggcagcgccccaggcaccagcaccgagcctagtgagcaggagattaaacggatcaacaagatcagaagaagacttgtgaaagacagcaacaccaagaaggccggcaagacaggccccatgaaaaccctgctggttagagtgatgacacccgatctgagagagcggctggaaaacctgagaaagaagcctgaaaatatcccccagcccatcagcaatacatctagagccaacctgaataagctgctgaccgattacaccgaaatgaagaaggcgatcctgcatgtgtactgggaagagttccagaaggaccctgtgggcctgatgagccgggtggcccagcctgccagcaagaagatcgatcagaacaagctgaaacctgagatggacgagaagggcaacctgaccaccgccggctttgcctgctctcagtgtggccagcccctgttcgtgtacaagctggagcaggtgtctgagaagggcaaggcttacaccaactacttcggacggtgcaatgtggccgagcacgaaaagctgatcctgctggcccagctgaagcccgagaaggatagcgacgaagccgtgacatatagcctgggaaagtttgggcagagggccctggatttctacagcattcatgtgaccaaggagtccacccaccccgtgaagcccctggcccagatcgccggaaacagatacgcctccggacctgtgggaaaggccctgagcgacgcatgtatgggcacaatcgcctccttcctgtctaagtaccaggacatcatcatcgaacaccagaaggtggtgaagggcaaccagaagagactggagagcctgcgggagctggccggcaaggaaaacctggaataccctagcgtgaccctgccacctcagcctcacaccaaggagggcgttgatgcctacaacgaagtgatcgcccgggtgcgaatgtgggtgaacctgaacctgtggcagaagctgaagctaagcagagatgatgccaagcctctgctgagactgaagggattcccttcctttcctctggtcgagagacaggccaacgaagtggactggtgggacatggtgtgtaacgtgaagaagctgatcaacgagaaaaaggaggatggcaaggtgttttggcagaatctggctggctacaagagacaggaagccctgagaccatacctgagcagcgaggaagatcggaagaagggaaagaaattcgctcggtaccagctgggcgacctgctgctgcacctggaaaagaagcacggcgaggactggggaaaggtgtacgacgaggcctgggagcggattgacaagaaagtggaaggcctgagcaagcacatcaagctggaagaggaacggagaagcgaggacgcccagagcaaggccgccctgaccgactggctgcgggctaaggccagcttcgtgatcgagggcctgaaggaggccgacaaggacgagttctgcagatgcgagctgaagctgcagaagtggtacggggacctgcggggaaagcccttcgccatcgaagccgagaacagcatcctggacatcagcggcttcagcaagcagtacaactgtgccttcatctggcagaaggacggcgtgaagaagctgaacctgtacctgatcatcaactacttcaagggcggcaagctgcggttcaagaagatcaaacctgaagccttcgaagccaacagattctacaccgtgatcaacaaaaagagcggcgagatcgtgcccatggaggtgaacttcaacttcgacgaccccaacctgatcatcctgcctctggcctttggcaagagacagggcagagaattcatctggaacgacctgctgtccctggaaaccggcagcctgaagctggccaacggaagagtgatcgagaagacactgtacaacagaagaacccggcaggatgagcctgccctgttcgtggccctgaccttcgagcggcgggaggtcctggactcctccaatatcaaaccaatgaacctgatcggcgtggcaagaggcgaaaacatccccgccgtgatcgccctgaccgaccccgagggctgcccactgagccggtttaaggatagcctgggaaacccaacccacatcctgagaatcggcgagagctataaggagaagcagcggaccatccaggccaagaaggaggtggagcagcggagagccggcggctacagccggaagtacgccagcaaagccaagaatctggcagacgatatggtgagaaacaccgctagagatctgctgtactacgccgtgacccaggatgccatgctgatcttcgccaacctgagccggggcttcggccggcagggcaagcggaccttcatggccgagagacagtacacacggatggaggactggctgaccgccaagctggcctacgagggcctgagcaagacctacctgtccaagacactggcccagtacacctccaagacatgcagcaactgtgggtttaccatcaccagcgccgactacgacagggtgctggagaagctgaagaagacagcaacaggctggatgaccacaattaacggcaaggagctgaaggtggagggccagattacctactacaacagatacaagagacagaacgtagtcaaggacctgtccgtcgagctggatagactgagcgaagaatctgtgaacaacgacatctcctcctggacaaagggcagaagcggagaagctctgagcctcctgaagaaaagattctcccatagacccgtgcaggagaagttcgtgtgcctgaactgcggcttcgagacacacgcagccgagcaagccgccctgaacatcgccagatcctggctgttcctgcggagccaggagtacaagaaataccagacaaacaagacaaccggcaacaccgataagagagccttcgtcgagacctggcagtccttttaccggaagaagcttaaggaggtgtggaaacctgccgtgcggtctggcggatctggcggaggctccgcctacggcagcctgagcttcggcgaggtggccatcagcttcagccaggaggagtgggagtgcctggaccccgcccagagggccctgtacagggacgtgatgctggagacctacagcaacctggtgagcctggccggcagcagcatcagcaagcccgacgtgatcaccctgctggagcaggagaaggagccctgggtggtggtgaggagggagaccagcaggtggtaccccgacctggagagcggcggcccaagcagcggcgcccctcctcccagcggcggcagcccagccggctccccaacctctaccgaggagggcacctctgagtccgccacccccgagagcggccctggcacctccaccgagcccagcgagggcagcgcacccggcagccctgccggcagccccacctccacagaggagggaaccagcaccgagcccagcgaaggcagcgccccaggcaccagcaccgagcctagtgagcaggagattaaacggatcaacaagatcagaagaagacttgtgaaagacagcaacaccaagaaggccggcaagacaggccccatgaaaaccctgctggttagagtgatgacacccgatctgagagagcggctggaaaacctgagaaagaagcctgaaaatatcccccagcccatcagcaatacatctagagccaacctgaataagctgctgaccgattacaccgaaatgaagaaggcgatcctgcatgtgtactgggaagagttccagaaggaccctgtgggcctgatgagccgggtggcccagcctgccagcaagaagatcgatcagaacaagctgaaacctgagatggacgagaagggcaacctgaccaccgccggctttgcctgctctcagtgtggccagcccctgttcgtgtacaagctggagcaggtgtctgagaagggcaaggcttacaccaactacttcggacggtgcaatgtggccgagcacgaaaagctgatcctgctggcccagctgaagcccgagaaggatagcgacgaagccgtgacatatagcctgggaaagtttgggcagagggccctggatttctacagcattcatgtgaccaaggagtccacccaccccgtgaagcccctggcccagatcgccggaaacagatacgcctccggacctgtgggaaaggccctgagcgacgcatgtatgggcacaatcgcctccttcctgtctaagtaccaggacatcatcatcgaacaccagaaggtggtgaagggcaaccagaagagactggagagcctgcgggagctggccggcaaggaaaacctggaataccctagcgtgaccctgccacctcagcctcacaccaaggagggcgttgatgcctacaacgaagtgatcgcccgggtgcgaatgtgggtgaacctgaacctgtggcagaagctgaagctaagcagagatgatgccaagcctctgctgagactgaagggattcccttcctttcctctggtcgagagacaggccaacgaagtggactggtgggacatggtgtgtaacgtgaagaagctgatcaacgagaaaaaggaggatggcaaggtgttttggcagaatctggctggctacaagagacaggaagccctgagaccatacctgagcagcgaggaagatcggaagaagggaaagaaattcgctcggtaccagctgggcgacctgctgctgcacctggaaaagaagcacggcgaggactggggaaaggtgtacgacgaggcctgggagcggattgacaagaaagtggaaggcctgagcaagcacatcaagctggaagaggaacggagaagcgaggacgcccagagcaaggccgccctgaccgactggctgcgggctaaggccagcttcgtgatcgagggcctgaaggaggccgacaaggacgagttctgcagatgcgagctgaagctgcagaagtggtacggggacctgcggggaaagcccttcgccatcgaagccgagaacagcatcctggacatcagcggcttcagcaagcagtacaactgtgccttcatctggcagaaggacggcgtgaagaagctgaacctgtacctgatcatcaactacttcaagggcggcaagctgcggttcaagaagatcaaacctgaagccttcgaagccaacagattctacaccgtgatcaacaaaaagagcggcgagatcgtgcccatggaggtgaacttcaacttcgacgaccccaacctgatcatcctgcctctggcctttggcaagagacagggcagagaattcatctggaacgacctgctgtccctggaaaccggcagcctgaagctggccaacggaagagtgatcgagaagacactgtacaacagaagaacccggcaggatgagcctgccctgttcgtggccctgaccttcgagcggcgggaggtcctggactcctccaatatcaaaccaatgaacctgatcggcgtggcaagaggcgaaaacatccccgccgtgatcgccctgaccgaccccgagggctgcccactgagccggtttaaggatagcctgggaaacccaacccacatcctgagaatcggcgagagctataaggagaagcagcggaccatccaggccaagaaggaggtggagcagcggagagccggcggctacagccggaagtacgccagcaaagccaagaatctggcagacgatatggtgagaaacaccgctagagatctgctgtactacgccgtgacccaggatgccatgctgatcttcgccaacctgagccggggcttcggccggcagggcaagcggaccttcatggccgagagacagtacacacggatggaggactggctgaccgccaagctggcctacgagggcctgagcaagacctacctgtccaagacactggcccagtacacctccaagacatgcagcaactgtgggtttaccatcaccagcgccgactacgacagggtgctggagaagctgaagaagacagcaacaggctggatgaccacaattaacggcaaggagctgaaggtggagggccagattacctactacaacagatacaagagacagaacgtagtcaaggacctgtccgtcgagctggatagactgagcgaagaatctgtgaacaacgacatctcctcctggacaaagggcagaagcggagaagctctgagcctcctgaagaaaagattctcccatagacccgtgcaggagaagttcgtgtgcctgaactgcggcttcgagacacacgcagccgagcaagccgccctgaacatcgccagatcctggctgttcctgcggagccaggagtacaagaaataccagacaaacaagacaaccggcaacaccgataagagagccttcgtcgagacctggcagtccttttaccggaagaagcttaaggaggtgtggaaacctgccgtgcggtctggcggatctggcggaggctcctgcctacggcagcctgagcttcggcgaggtggccatcagcttcagccaggaggagtgggagtgcctggaccccgcccagagggccctgtacagggacgtgatgctggagacctacagcaacctggtgagcctggccggcagcagcatcagcaagcccgacgtgatcaccctgctggagcaggagaaggagccctgggtggtggtgaggagggagaccagcaggtggtaccccgacctggagagcggatctggctccggcagcggccccaagaaaaagagaaaagtctaagctgccttctgcggggcttgccttctggccatgcccttcttctctcccttgcacctgtacctcttggtctttgaataaagcctgagtaggaaggctagcaaaaaaaaaaaaaaaaaaaaaaaaaaaaaaaaaaaaaaaaaaaaaaaaaaaaaaaaaaaaaaaaaaaaaaaaaaaaaaaa

SEQ ID NO: 16189 - RNA, 9485 nt, synthetic construct
  source 1..9485: mol_type = other RNA
aggaaataagagagaaaagaagagtaagaagaaatataagagccaccatggcccctaagaagaagcgtaaagtgagccggatggaacgcctcgtctacgaggtgcggcagaagtgcagaaacatcgaggacatctgcatctcctgcggatctctgaacgtgaccctggagcacccactgttcatcggcggcatgtgccagaactgtaaaaactgttttctggagtgtgcctatcaatacgacgatgacggctaccagagctactgcaccatctgttgcggcggaagagaggtgctgatgtgtggaaataacaactgctgccggtgcttctgcgtggaatgcgtggacctgctggtgggccccggcgccgcccaggccgctattaaggaagatccttggaactgctacatgtgcggccacaagggcacatacggcctgctgagacggagagaggactggcctagcagactgcagatgttcttcgccaataaccacgaccaggagttcgacccccctaaggtgtaccctcccgtccccgccgagaagagaaagcccatccgggtcctgagcctgttcgatggcatcgccaccggtctgctggtgctgaaggacctgggcatccaggtggataggtacattgcctccgaggtgtgcgaggactccatcaccgtgggaatggtgcgtcatcagggcaagatcatgtacgtgggcgacgtgcggagcgtgacacagaagcatatccaggagtggggccctttcgacctggtgatcggcggcagcccttgcaatgacctgagcatcgtgaacccagcccggaagggcctgtacgagggaaccggcagactgttcttcgagttttacagactgctgcacgacgcccggcctaaggaaggcgacgaccggcccttcttttggctgttcgagaatgtggtggccatgggagtcagcgacaagcgggatattagccggttcctggagagcaaccccgtgatgatcgatgccaaggaagtgagcgccgcccaccgggccagatacttctggggcaatctgcctggcatgaacagacccctggccagcaccgtgaacgacaagctggagctgcaggagtgcctggagcacggccggatcgccaagttcagcaaggtgagaaccatcaccacccgaagcaacagcatcaaacaaggcaaggaccagcactttcctgtgttcatgaacgagaaggaggacatcctgtggtgtaccgagatggagagagtgttcgggttcccagtccactacacagatgtcagcaacatgtctagactggccagacagagactgctgggaagaagctggtccgtccctgtgatcagacacctgttcgcccctctgaaggagtacttcgcctgcgtgagcagcggcaacagcaacgccaacagccggggccccagcttctctagcggcctggtgccactgtccctgagagggagccacatgggccccatggagatctacaaaaccgtgagcgcctggaagcggcagcctgtgcgcgtgctgagcctgtttcggaatatcgataaagtcctgaaaagcctgggattcctggagagcggctctggctccggcggtggcaccctgaagtacgtggaggatgtgacaaacgtggtcagacgggatgtggagaagtggggccccttcgatctggtgtacggcagcacccaacccctgggcagctcttgtgaccggtgccctggctggtacatgtttcagttccaccggatcctgcagtacgccctgccgagacaggagtcccagcggccattcttttggattttcatggacaacttgctgctgaccgaggatgaccaggaaactaccactcggttcctgcagaccgaagccgtgaccctgcaggacgtgagaggccgggactaccagaacgccatgcgggtgtggtccaacatccctggactgaaaagcaagcacgcacctctgacccctaaagaagaggagtacctgcaggcccaggtgcggagcagaagcaagctggacgcccctaaggtggatctgctggtgaagaattgcctcctgcccctgagagagtacttcaagtatttcagccagaatagtctgcccctgggaggcagcggcggcggcgccctggtgacatttgaggacgtcgccgtgcggttcacccaggaggaatgggctctgctggatccttctcagaaaatcctgtaccgggacgtgatgagagagacataccggaatctgacctccgtgggcatcaactgggaatgttgggaccttgaagcctgcttcagaagcctgggaagaaacctgagagtgcaggtggtgaagagaaagtgcgagctgaccaacagcggcccctgcgccgagggcggcccaagcagcggcgcccctcctcccagcggcggcagcccagccggctccccaacctctaccgaggagggcacctctgagtccgccacccccgagagcggccctggcacctccaccgagcccagcgagggcagcgcacccggcagccctgccggcagccccacctccacagaggagggaaccagcaccgagcccagcgaaggcagcgccccaggcaccagcaccgagcctagtgagcaggagattaaacggatcaacaagatcagaagaagacttgtgaaagacagcaacaccaagaaggccggcaagacaggccccatgaaaaccctgctggttagagtgatgacacccgatctgagagagcggctggaaaacctgagaaagaagcctgaaaatatcccccagcccatcagcaatacatctagagccaacctgaataagctgctgaccgattacaccgaaatgaagaaggcgatcctgcatgtgtactgggaagagttccagaaggaccctgtgggcctgatgagccgggtggcccagcctgccagcaagaagatcgatcagaacaagctgaaacctgagatggacgagaagggcaacctgaccaccgccggctttgcctgctctcagtgtggccagcccctgttcgtgtacaagctggagcaggtgtctgagaagggcaaggcttacaccaactacttcggacggtgcaatgtggccgagcacgaaaagctgatcctgctggcccagctgaagcccgagaaggatagcgacgaagccgtgacatatagcctgggaaagtttgggcagagggccctggatttctacagcattcatgtgaccaaggagtccacccaccccgtgaagcccctggcccagatcgccggaaacagatacgcctccggacctgtgggaaaggccctgagcgacgcatgtatgggcacaatcgcctccttcctgtctaagtaccaggacatcatcatcgaacaccagaaggtggtgaagggcaaccagaagagactggagagcctgcgggagctggccggcaaggaaaacctggaataccctagcgtgaccctgccacctcagcctcacaccaaggagggcgttgatgcctacaacgaagtgatcgcccgggtgcgaatgtgggtgaacctgaacctgtggcagaagctgaagctaagcagagatgatgccaagcctctgctgagactgaagggattcccttcctttcctctggtcgagagacaggccaacgaagtggactggtgggacatggtgtgtaacgtgaagaagctgatcaacgagaaaaaggaggatggcaaggtgttttggcagaatctggctggctacaagagacaggaagccctgagaccatacctgagcagcgaggaagatcggaagaagggaaagaaattcgctcggtaccagctgggcgacctgctgctgcacctggaaaagaagcacggcgaggactggggaaaggtgtacgacgaggcctgggagcggattgacaagaaagtggaaggcctgagcaagcacatcaagctggaagaggaacggagaagcgaggacgcccagagcaaggccgccctgaccgactggctgcgggctaaggccagcttcgtgatcgagggcctgaaggaggccgacaaggacgagttctgcagatgcgagctgaagctgcagaagtggtacggggacctgcggggaaagcccttcgccatcgaagccgagaacagcatcctggacatcagcggcttcagcaagcagtacaactgtgccttcatctggcagaaggacggcgtgaagaagctgaacctgtacctgatcatcaactacttcaagggcggcaagctgcggttcaagaagatcaaacctgaagccttcgaagccaacagattctacaccgtgatcaacaaaaagagcggcgagatcgtgcccatggaggtgaacttcaacttcgacgaccccaacctgatcatcctgcctctggcctttggcaagagacagggcagagaattcatctggaacgacctgctgtccctggaaaccggcagcctgaagctggccaacggaagagtgatcgagaagacactgtacaacagaagaacccggcaggatgagcctgccctgttcgtggccctgaccttcgagcggcgggaggtcctggactcctccaatatcaaaccaatgaacctgatcggcgtggcaagaggcgaaaacatccccgccgtgatcgccctgaccgaccccgagggctgcccactgagccggtttaaggatagcctgggaaacccaacccacatcctgagaatcggcgagagctataaggagaagcagcggaccatccaggccaagaaggaggtggagcagcggagagccggcggctacagccggaagtacgccagcaaagccaagaatctggcagacgatatggtgagaaacaccgctagagatctgctgtactacgccgtgacccaggatgccatgctgatcttcgccaacctgagccggggcttcggccggcagggcaagcggaccttcatggccgagagacagtacacacggatggaggactggctgaccgccaagctggcctacgagggcctgagcaagacctacctgtccaagacactggcccagtacacctccaagacatgcagcaactgtgggtttaccatcaccagcgccgactacgacagggtgctggagaagctgaagaagacagcaacaggctggatgaccacaattaacggcaaggagctgaaggtggagggccagattacctactacaacagatacaagagacagaacgtagtcaaggacctgtccgtcgagctggatagactgagcgaagaatctgtgaacaacgacatctcctcctggacaaagggcagaagcggagaagctctgagcctcctgaagaaaagattctcccatagacccgtgcaggagaagttcgtgtgcctgaactgcggcttcgagacacacgcagccgagcaagccgccctgaacatcgccagatcctggctgttcctgcggagccaggagtacaagaaataccagacaaacaagacaaccggcaacaccgataagagagccttcgtcgagacctggcagtccttttaccggaagaagcttaaggaggtgtggaaacctgccgtgcggtctggcggatctggcggaggctcccagctgaccttcgaggacgtggccctgagcttcagcaaggaggagtggcagatcatggaccccaaccagaagaccctgtacatcgacgtgatgagggagatctacgagaccgtgaccagcctgggcctgaagctgaagaacgacaccggcaacgaccagcccgtgagcctgagcaccagcgagatccagcccagcggctgcaaggtgctgaggaaggccaggatgaaggtggcccagaccaccggcggcccaagcagcggcgcccctcctcccagcggcggcagcccagccggctccccaacctctaccgaggagggcacctctgagtccgccacccccgagagcggccctggcacctccaccgagcccagcgagggcagcgcacccggcagccctgccggcagccccacctccacagaggagggaaccagcaccgagcccagcgaaggcagcgccccaggcaccagcaccgagcctagtgagcaggagattaaacggatcaacaagatcagaagaagacttgtgaaagacagcaacaccaagaaggccggcaagacaggccccatgaaaaccctgctggttagagtgatgacacccgatctgagagagcggctggaaaacctgagaaagaagcctgaaaatatcccccagcccatcagcaatacatctagagccaacctgaataagctgctgaccgattacaccgaaatgaagaaggcgatcctgcatgtgtactgggaagagttccagaaggaccctgtgggcctgatgagccgggtggcccagcctgccagcaagaagatcgatcagaacaagctgaaacctgagatggacgagaagggcaacctgaccaccgccggctttgcctgctctcagtgtggccagcccctgttcgtgtacaagctggagcaggtgtctgagaagggcaaggcttacaccaactacttcggacggtgcaatgtggccgagcacgaaaagctgatcctgctggcccagctgaagcccgagaaggatagcgacgaagccgtgacatatagcctgggaaagtttgggcagagggccctggatttctacagcattcatgtgaccaaggagtccacccaccccgtgaagcccctggcccagatcgccggaaacagatacgcctccggacctgtgggaaaggccctgagcgacgcatgtatgggcacaatcgcctccttcctgtctaagtaccaggacatcatcatcgaacaccagaaggtggtgaagggcaaccagaagagactggagagcctgcgggagctggccggcaaggaaaacctggaataccctagcgtgaccctgccacctcagcctcacaccaaggagggcgttgatgcctacaacgaagtgatcgcccgggtgcgaatgtgggtgaacctgaacctgtggcagaagctgaagctaagcagagatgatgccaagcctctgctgagactgaagggattcccttcctttcctctggtcgagagacaggccaacgaagtggactggtgggacatggtgtgtaacgtgaagaagctgatcaacgagaaaaaggaggatggcaaggtgttttggcagaatctggctggctacaagagacaggaagccctgagaccatacctgagcagcgaggaagatcggaagaagggaaagaaattcgctcggtaccagctgggcgacctgctgctgcacctggaaaagaagcacggcgaggactggggaaaggtgtacgacgaggcctgggagcggattgacaagaaagtggaaggcctgagcaagcacatcaagctggaagaggaacggagaagcgaggacgcccagagcaaggccgccctgaccgactggctgcgggctaaggccagcttcgtgatcgagggcctgaaggaggccgacaaggacgagttctgcagatgcgagctgaagctgcagaagtggtacggggacctgcggggaaagcccttcgccatcgaagccgagaacagcatcctggacatcagcggcttcagcaagcagtacaactgtgccttcatctggcagaaggacggcgtgaagaagctgaacctgtacctgatcatcaactacttcaagggcggcaagctgcggttcaagaagatcaaacctgaagccttcgaagccaacagattctacaccgtgatcaacaaaaagagcggcgagatcgtgcccatggaggtgaacttcaacttcgacgaccccaacctgatcatcctgcctctggcctttggcaagagacagggcagagaattcatctggaacgacctgctgtccctggaaaccggcagcctgaagctggccaacggaagagtgatcgagaagacactgtacaacagaagaacccggcaggatgagcctgccctgttcgtggccctgaccttcgagcggcgggaggtcctggactcctccaatatcaaaccaatgaacctgatcggcgtggcaagaggcgaaaacatccccgccgtgatcgccctgaccgaccccgagggctgcccactgagccggtttaaggatagcctgggaaacccaacccacatcctgagaatcggcgagagctataaggagaagcagcggaccatccaggccaagaaggaggtggagcagcggagagccggcggctacagccggaagtacgccagcaaagccaagaatctggcagacgatatggtgagaaacaccgctagagatctgctgtactacgccgtgacccaggatgccatgctgatcttcgccaacctgagccggggcttcggccggcagggcaagcggaccttcatggccgagagacagtacacacggatggaggactggctgaccgccaagctggcctacgagggcctgagcaagacctacctgtccaagacactggcccagtacacctccaagacatgcagcaactgtgggtttaccatcaccagcgccgactacgacagggtgctggagaagctgaagaagacagcaacaggctggatgaccacaattaacggcaaggagctgaaggtggagggccagattacctactacaacagatacaagagacagaacgtagtcaaggacctgtccgtcgagctggatagactgagcgaagaatctgtgaacaacgacatctcctcctggacaaagggcagaagcggagaagctctgagcctcctgaagaaaagattctcccatagacccgtgcaggagaagttcgtgtgcctgaactgcggcttcgagacacacgcagccgagcaagccgccctgaacatcgccagatcctggctgttcctgcggagccaggagtacaagaaataccagacaaacaagacaaccggcaacaccgataagagagccttcgtcgagacctggcagtccttttaccggaagaagcttaaggaggtgtggaaacctgccgtgcggtctggcggatctggcggaggctcctcagctgaccttcgaggacgtggccctgagcttcagcaaggaggagtggcagatcatggaccccaaccagaagaccctgtacatcgacgtgatgagggagatctacgagaccgtgaccagcctgggcctgaagctgaagaacgacaccggcaacgaccagcccgtgagcctgagcaccagcgagatccagcccagcggctgcaaggtgctgaggaaggccaggatgaaggtggcccagaccaccggatctggctccggcagcggccccaagaaaaagagaaaagtctaagctgccttctgcggggcttgccttctggccatgcccttcttctctcccttgcacctgtacctcttggtctttgaataaagcctgagtaggaaggctagcaaaaaaaaaaaaaaaaaaaaaaaaaaaaaaaaaaaaaaaaaaaaaaaaaaaaaaaaaaaaaaaaaaaaaaaaaaaaaaaa

SEQ ID NO: 16190 - RNA, 9485 nt, synthetic construct
  source 1..9485: mol_type = other RNA
aggaaataagagagaaaagaagagtaagaagaaatataagagccaccatggcccctaagaagaagcgtaaagtgagccggatggaacgcctcgtctacgaggtgcggcagaagtgcagaaacatcgaggacatctgcatctcctgcggatctctgaacgtgaccctggagcacccactgttcatcggcggcatgtgccagaactgtaaaaactgttttctggagtgtgcctatcaatacgacgatgacggctaccagagctactgcaccatctgttgcggcggaagagaggtgctgatgtgtggaaataacaactgctgccggtgcttctgcgtggaatgcgtggacctgctggtgggccccggcgccgcccaggccgctattaaggaagatccttggaactgctacatgtgcggccacaagggcacatacggcctgctgagacggagagaggactggcctagcagactgcagatgttcttcgccaataaccacgaccaggagttcgacccccctaaggtgtaccctcccgtccccgccgagaagagaaagcccatccgggtcctgagcctgttcgatggcatcgccaccggtctgctggtgctgaaggacctgggcatccaggtggataggtacattgcctccgaggtgtgcgaggactccatcaccgtgggaatggtgcgtcatcagggcaagatcatgtacgtgggcgacgtgcggagcgtgacacagaagcatatccaggagtggggccctttcgacctggtgatcggcggcagcccttgcaatgacctgagcatcgtgaacccagcccggaagggcctgtacgagggaaccggcagactgttcttcgagttttacagactgctgcacgacgcccggcctaaggaaggcgacgaccggcccttcttttggctgttcgagaatgtggtggccatgggagtcagcgacaagcgggatattagccggttcctggagagcaaccccgtgatgatcgatgccaaggaagtgagcgccgcccaccgggccagatacttctggggcaatctgcctggcatgaacagacccctggccagcaccgtgaacgacaagctggagctgcaggagtgcctggagcacggccggatcgccaagttcagcaaggtgagaaccatcaccacccgaagcaacagcatcaaacaaggcaaggaccagcactttcctgtgttcatgaacgagaaggaggacatcctgtggtgtaccgagatggagagagtgttcgggttcccagtccactacacagatgtcagcaacatgtctagactggccagacagagactgctgggaagaagctggtccgtccctgtgatcagacacctgttcgcccctctgaaggagtacttcgcctgcgtgagcagcggcaacagcaacgccaacagccggggccccagcttctctagcggcctggtgccactgtccctgagagggagccacatgggccccatggagatctacaaaaccgtgagcgcctggaagcggcagcctgtgcgcgtgctgagcctgtttcggaatatcgataaagtcctgaaaagcctgggattcctggagagcggctctggctccggcggtggcaccctgaagtacgtggaggatgtgacaaacgtggtcagacgggatgtggagaagtggggccccttcgatctggtgtacggcagcacccaacccctgggcagctcttgtgaccggtgccctggctggtacatgtttcagttccaccggatcctgcagtacgccctgccgagacaggagtcccagcggccattcttttggattttcatggacaacttgctgctgaccgaggatgaccaggaaactaccactcggttcctgcagaccgaagccgtgaccctgcaggacgtgagaggccgggactaccagaacgccatgcgggtgtggtccaacatccctggactgaaaagcaagcacgcacctctgacccctaaagaagaggagtacctgcaggcccaggtgcggagcagaagcaagctggacgcccctaaggtggatctgctggtgaagaattgcctcctgcccctgagagagtacttcaagtatttcagccagaatagtctgcccctgggaggcagcggcggcggcgccctggtgacatttgaggacgtcgccgtgcggttcacccaggaggaatgggctctgctggatccttctcagaaaatcctgtaccgggacgtgatgagagagacataccggaatctgacctccgtgggcatcaactgggaatgttgggaccttgaagcctgcttcagaagcctgggaagaaacctgagagtgcaggtggtgaagagaaagtgcgagctgaccaacagcggcccctgcgccgagggcggcccaagcagcggcgcccctcctcccagcggcggcagcccagccggctccccaacctctaccgaggagggcacctctgagtccgccacccccgagagcggccctggcacctccaccgagcccagcgagggcagcgcacccggcagccctgccggcagccccacctccacagaggagggaaccagcaccgagcccagcgaaggcagcgccccaggcaccagcaccgagcctagtgagcaggagattaaacggatcaacaagatcagaagaagacttgtgaaagacagcaacaccaagaaggccggcaagacaggccccatgaaaaccctgctggttagagtgatgacacccgatctgagagagcggctggaaaacctgagaaagaagcctgaaaatatcccccagcccatcagcaatacatctagagccaacctgaataagctgctgaccgattacaccgaaatgaagaaggcgatcctgcatgtgtactgggaagagttccagaaggaccctgtgggcctgatgagccgggtggcccagcctgccagcaagaagatcgatcagaacaagctgaaacctgagatggacgagaagggcaacctgaccaccgccggctttgcctgctctcagtgtggccagcccctgttcgtgtacaagctggagcaggtgtctgagaagggcaaggcttacaccaactacttcggacggtgcaatgtggccgagcacgaaaagctgatcctgctggcccagctgaagcccgagaaggatagcgacgaagccgtgacatatagcctgggaaagtttgggcagagggccctggatttctacagcattcatgtgaccaaggagtccacccaccccgtgaagcccctggcccagatcgccggaaacagatacgcctccggacctgtgggaaaggccctgagcgacgcatgtatgggcacaatcgcctccttcctgtctaagtaccaggacatcatcatcgaacaccagaaggtggtgaagggcaaccagaagagactggagagcctgcgggagctggccggcaaggaaaacctggaataccctagcgtgaccctgccacctcagcctcacaccaaggagggcgttgatgcctacaacgaagtgatcgcccgggtgcgaatgtgggtgaacctgaacctgtggcagaagctgaagctaagcagagatgatgccaagcctctgctgagactgaagggattcccttcctttcctctggtcgagagacaggccaacgaagtggactggtgggacatggtgtgtaacgtgaagaagctgatcaacgagaaaaaggaggatggcaaggtgttttggcagaatctggctggctacaagagacaggaagccctgagaccatacctgagcagcgaggaagatcggaagaagggaaagaaattcgctcggtaccagctgggcgacctgctgctgcacctggaaaagaagcacggcgaggactggggaaaggtgtacgacgaggcctgggagcggattgacaagaaagtggaaggcctgagcaagcacatcaagctggaagaggaacggagaagcgaggacgcccagagcaaggccgccctgaccgactggctgcgggctaaggccagcttcgtgatcgagggcctgaaggaggccgacaaggacgagttctgcagatgcgagctgaagctgcagaagtggtacggggacctgcggggaaagcccttcgccatcgaagccgagaacagcatcctggacatcagcggcttcagcaagcagtacaactgtgccttcatctggcagaaggacggcgtgaagaagctgaacctgtacctgatcatcaactacttcaagggcggcaagctgcggttcaagaagatcaaacctgaagccttcgaagccaacagattctacaccgtgatcaacaaaaagagcggcgagatcgtgcccatggaggtgaacttcaacttcgacgaccccaacctgatcatcctgcctctggcctttggcaagagacagggcagagaattcatctggaacgacctgctgtccctggaaaccggcagcctgaagctggccaacggaagagtgatcgagaagacactgtacaacagaagaacccggcaggatgagcctgccctgttcgtggccctgaccttcgagcggcgggaggtcctggactcctccaatatcaaaccaatgaacctgatcggcgtggcaagaggcgaaaacatccccgccgtgatcgccctgaccgaccccgagggctgcccactgagccggtttaaggatagcctgggaaacccaacccacatcctgagaatcggcgagagctataaggagaagcagcggaccatccaggccaagaaggaggtggagcagcggagagccggcggctacagccggaagtacgccagcaaagccaagaatctggcagacgatatggtgagaaacaccgctagagatctgctgtactacgccgtgacccaggatgccatgctgatcttcgccaacctgagccggggcttcggccggcagggcaagcggaccttcatggccgagagacagtacacacggatggaggactggctgaccgccaagctggcctacgagggcctgagcaagacctacctgtccaagacactggcccagtacacctccaagacatgcagcaactgtgggtttaccatcaccagcgccgactacgacagggtgctggagaagctgaagaagacagcaacaggctggatgaccacaattaacggcaaggagctgaaggtggagggccagattacctactacaacagatacaagagacagaacgtagtcaaggacctgtccgtcgagctggatagactgagcgaagaatctgtgaacaacgacatctcctcctggacaaagggcagaagcggagaagctctgagcctcctgaagaaaagattctcccatagacccgtgcaggagaagttcgtgtgcctgaactgcggcttcgagacacacgcagccgagcaagccgccctgaacatcgccagatcctggctgttcctgcggagccaggagtacaagaaataccagacaaacaagacaaccggcaacaccgataagagagccttcgtcgagacctggcagtccttttaccggaagaagcttaaggaggtgtggaaacctgccgtgcggtctggcggatctggcggaggctccgagaagggccccctgaccttcagggacgtggtgatcgagttcagccaggaggagtggcagtgcctggacaccgcccagcaggacctgtacaggaaggtgatgctggagaacttcaggaacctggtgttcctgggcatcgacgtgagcaagcccgacctgatcacctgcctggagcagggcaagaacccctggaacatgaagaggcacagcatggtggccaccccccccggcgtgttcttcgtgggcggcccaagcagcggcgcccctcctcccagcggcggcagcccagccggctccccaacctctaccgaggagggcacctctgagtccgccacccccgagagcggccctggcacctccaccgagcccagcgagggcagcgcacccggcagccctgccggcagccccacctccacagaggagggaaccagcaccgagcccagcgaaggcagcgccccaggcaccagcaccgagcctagtgagcaggagattaaacggatcaacaagatcagaagaagacttgtgaaagacagcaacaccaagaaggccggcaagacaggccccatgaaaaccctgctggttagagtgatgacacccgatctgagagagcggctggaaaacctgagaaagaagcctgaaaatatcccccagcccatcagcaatacatctagagccaacctgaataagctgctgaccgattacaccgaaatgaagaaggcgatcctgcatgtgtactgggaagagttccagaaggaccctgtgggcctgatgagccgggtggcccagcctgccagcaagaagatcgatcagaacaagctgaaacctgagatggacgagaagggcaacctgaccaccgccggctttgcctgctctcagtgtggccagcccctgttcgtgtacaagctggagcaggtgtctgagaagggcaaggcttacaccaactacttcggacggtgcaatgtggccgagcacgaaaagctgatcctgctggcccagctgaagcccgagaaggatagcgacgaagccgtgacatatagcctgggaaagtttgggcagagggccctggatttctacagcattcatgtgaccaaggagtccacccaccccgtgaagcccctggcccagatcgccggaaacagatacgcctccggacctgtgggaaaggccctgagcgacgcatgtatgggcacaatcgcctccttcctgtctaagtaccaggacatcatcatcgaacaccagaaggtggtgaagggcaaccagaagagactggagagcctgcgggagctggccggcaaggaaaacctggaataccctagcgtgaccctgccacctcagcctcacaccaaggagggcgttgatgcctacaacgaagtgatcgcccgggtgcgaatgtgggtgaacctgaacctgtggcagaagctgaagctaagcagagatgatgccaagcctctgctgagactgaagggattcccttcctttcctctggtcgagagacaggccaacgaagtggactggtgggacatggtgtgtaacgtgaagaagctgatcaacgagaaaaaggaggatggcaaggtgttttggcagaatctggctggctacaagagacaggaagccctgagaccatacctgagcagcgaggaagatcggaagaagggaaagaaattcgctcggtaccagctgggcgacctgctgctgcacctggaaaagaagcacggcgaggactggggaaaggtgtacgacgaggcctgggagcggattgacaagaaagtggaaggcctgagcaagcacatcaagctggaagaggaacggagaagcgaggacgcccagagcaaggccgccctgaccgactggctgcgggctaaggccagcttcgtgatcgagggcctgaaggaggccgacaaggacgagttctgcagatgcgagctgaagctgcagaagtggtacggggacctgcggggaaagcccttcgccatcgaagccgagaacagcatcctggacatcagcggcttcagcaagcagtacaactgtgccttcatctggcagaaggacggcgtgaagaagctgaacctgtacctgatcatcaactacttcaagggcggcaagctgcggttcaagaagatcaaacctgaagccttcgaagccaacagattctacaccgtgatcaacaaaaagagcggcgagatcgtgcccatggaggtgaacttcaacttcgacgaccccaacctgatcatcctgcctctggcctttggcaagagacagggcagagaattcatctggaacgacctgctgtccctggaaaccggcagcctgaagctggccaacggaagagtgatcgagaagacactgtacaacagaagaacccggcaggatgagcctgccctgttcgtggccctgaccttcgagcggcgggaggtcctggactcctccaatatcaaaccaatgaacctgatcggcgtggcaagaggcgaaaacatccccgccgtgatcgccctgaccgaccccgagggctgcccactgagccggtttaaggatagcctgggaaacccaacccacatcctgagaatcggcgagagctataaggagaagcagcggaccatccaggccaagaaggaggtggagcagcggagagccggcggctacagccggaagtacgccagcaaagccaagaatctggcagacgatatggtgagaaacaccgctagagatctgctgtactacgccgtgacccaggatgccatgctgatcttcgccaacctgagccggggcttcggccggcagggcaagcggaccttcatggccgagagacagtacacacggatggaggactggctgaccgccaagctggcctacgagggcctgagcaagacctacctgtccaagacactggcccagtacacctccaagacatgcagcaactgtgggtttaccatcaccagcgccgactacgacagggtgctggagaagctgaagaagacagcaacaggctggatgaccacaattaacggcaaggagctgaaggtggagggccagattacctactacaacagatacaagagacagaacgtagtcaaggacctgtccgtcgagctggatagactgagcgaagaatctgtgaacaacgacatctcctcctggacaaagggcagaagcggagaagctctgagcctcctgaagaaaagattctcccatagacccgtgcaggagaagttcgtgtgcctgaactgcggcttcgagacacacgcagccgagcaagccgccctgaacatcgccagatcctggctgttcctgcggagccaggagtacaagaaataccagacaaacaagacaaccggcaacaccgataagagagccttcgtcgagacctggcagtccttttaccggaagaagcttaaggaggtgtggaaacctgccgtgcggtctggcggatctggcggaggctcctgagaagggccccctgaccttcagggacgtggtgatcgagttcagccaggaggagtggcagtgcctggacaccgcccagcaggacctgtacaggaaggtgatgctggagaacttcaggaacctggtgttcctgggcatcgacgtgagcaagcccgacctgatcacctgcctggagcagggcaagaacccctggaacatgaagaggcacagcatggtggccaccccccccggcgtgttcttcgtgggatctggctccggcagcggccccaagaaaaagagaaaagtctaagctgccttctgcggggcttgccttctggccatgcccttcttctctcccttgcacctgtacctcttggtctttgaataaagcctgagtaggaaggctagcaaaaaaaaaaaaaaaaaaaaaaaaaaaaaaaaaaaaaaaaaaaaaaaaaaaaaaaaaaaaaaaaaaaaaaaaaaaaaaaa

SEQ ID NO: 16191 - RNA, 9485 nt, synthetic construct
  source 1..9485: mol_type = other RNA
aggaaataagagagaaaagaagagtaagaagaaatataagagccaccatggcccctaagaagaagcgtaaagtgagccggatggaacgcctcgtctacgaggtgcggcagaagtgcagaaacatcgaggacatctgcatctcctgcggatctctgaacgtgaccctggagcacccactgttcatcggcggcatgtgccagaactgtaaaaactgttttctggagtgtgcctatcaatacgacgatgacggctaccagagctactgcaccatctgttgcggcggaagagaggtgctgatgtgtggaaataacaactgctgccggtgcttctgcgtggaatgcgtggacctgctggtgggccccggcgccgcccaggccgctattaaggaagatccttggaactgctacatgtgcggccacaagggcacatacggcctgctgagacggagagaggactggcctagcagactgcagatgttcttcgccaataaccacgaccaggagttcgacccccctaaggtgtaccctcccgtccccgccgagaagagaaagcccatccgggtcctgagcctgttcgatggcatcgccaccggtctgctggtgctgaaggacctgggcatccaggtggataggtacattgcctccgaggtgtgcgaggactccatcaccgtgggaatggtgcgtcatcagggcaagatcatgtacgtgggcgacgtgcggagcgtgacacagaagcatatccaggagtggggccctttcgacctggtgatcggcggcagcccttgcaatgacctgagcatcgtgaacccagcccggaagggcctgtacgagggaaccggcagactgttcttcgagttttacagactgctgcacgacgcccggcctaaggaaggcgacgaccggcccttcttttggctgttcgagaatgtggtggccatgggagtcagcgacaagcgggatattagccggttcctggagagcaaccccgtgatgatcgatgccaaggaagtgagcgccgcccaccgggccagatacttctggggcaatctgcctggcatgaacagacccctggccagcaccgtgaacgacaagctggagctgcaggagtgcctggagcacggccggatcgccaagttcagcaaggtgagaaccatcaccacccgaagcaacagcatcaaacaaggcaaggaccagcactttcctgtgttcatgaacgagaaggaggacatcctgtggtgtaccgagatggagagagtgttcgggttcccagtccactacacagatgtcagcaacatgtctagactggccagacagagactgctgggaagaagctggtccgtccctgtgatcagacacctgttcgcccctctgaaggagtacttcgcctgcgtgagcagcggcaacagcaacgccaacagccggggccccagcttctctagcggcctggtgccactgtccctgagagggagccacatgggccccatggagatctacaaaaccgtgagcgcctggaagcggcagcctgtgcgcgtgctgagcctgtttcggaatatcgataaagtcctgaaaagcctgggattcctggagagcggctctggctccggcggtggcaccctgaagtacgtggaggatgtgacaaacgtggtcagacgggatgtggagaagtggggccccttcgatctggtgtacggcagcacccaacccctgggcagctcttgtgaccggtgccctggctggtacatgtttcagttccaccggatcctgcagtacgccctgccgagacaggagtcccagcggccattcttttggattttcatggacaacttgctgctgaccgaggatgaccaggaaactaccactcggttcctgcagaccgaagccgtgaccctgcaggacgtgagaggccgggactaccagaacgccatgcgggtgtggtccaacatccctggactgaaaagcaagcacgcacctctgacccctaaagaagaggagtacctgcaggcccaggtgcggagcagaagcaagctggacgcccctaaggtggatctgctggtgaagaattgcctcctgcccctgagagagtacttcaagtatttcagccagaatagtctgcccctgggaggcagcggcggcggcgccctggtgacatttgaggacgtcgccgtgcggttcacccaggaggaatgggctctgctggatccttctcagaaaatcctgtaccgggacgtgatgagagagacataccggaatctgacctccgtgggcatcaactgggaatgttgggaccttgaagcctgcttcagaagcctgggaagaaacctgagagtgcaggtggtgaagagaaagtgcgagctgaccaacagcggcccctgcgccgagggcggcccaagcagcggcgcccctcctcccagcggcggcagcccagccggctccccaacctctaccgaggagggcacctctgagtccgccacccccgagagcggccctggcacctccaccgagcccagcgagggcagcgcacccggcagccctgccggcagccccacctccacagaggagggaaccagcaccgagcccagcgaaggcagcgccccaggcaccagcaccgagcctagtgagcaggagattaaacggatcaacaagatcagaagaagacttgtgaaagacagcaacaccaagaaggccggcaagacaggccccatgaaaaccctgctggttagagtgatgacacccgatctgagagagcggctggaaaacctgagaaagaagcctgaaaatatcccccagcccatcagcaatacatctagagccaacctgaataagctgctgaccgattacaccgaaatgaagaaggcgatcctgcatgtgtactgggaagagttccagaaggaccctgtgggcctgatgagccgggtggcccagcctgccagcaagaagatcgatcagaacaagctgaaacctgagatggacgagaagggcaacctgaccaccgccggctttgcctgctctcagtgtggccagcccctgttcgtgtacaagctggagcaggtgtctgagaagggcaaggcttacaccaactacttcggacggtgcaatgtggccgagcacgaaaagctgatcctgctggcccagctgaagcccgagaaggatagcgacgaagccgtgacatatagcctgggaaagtttgggcagagggccctggatttctacagcattcatgtgaccaaggagtccacccaccccgtgaagcccctggcccagatcgccggaaacagatacgcctccggacctgtgggaaaggccctgagcgacgcatgtatgggcacaatcgcctccttcctgtctaagtaccaggacatcatcatcgaacaccagaaggtggtgaagggcaaccagaagagactggagagcctgcgggagctggccggcaaggaaaacctggaataccctagcgtgaccctgccacctcagcctcacaccaaggagggcgttgatgcctacaacgaagtgatcgcccgggtgcgaatgtgggtgaacctgaacctgtggcagaagctgaagctaagcagagatgatgccaagcctctgctgagactgaagggattcccttcctttcctctggtcgagagacaggccaacgaagtggactggtgggacatggtgtgtaacgtgaagaagctgatcaacgagaaaaaggaggatggcaaggtgttttggcagaatctggctggctacaagagacaggaagccctgagaccatacctgagcagcgaggaagatcggaagaagggaaagaaattcgctcggtaccagctgggcgacctgctgctgcacctggaaaagaagcacggcgaggactggggaaaggtgtacgacgaggcctgggagcggattgacaagaaagtggaaggcctgagcaagcacatcaagctggaagaggaacggagaagcgaggacgcccagagcaaggccgccctgaccgactggctgcgggctaaggccagcttcgtgatcgagggcctgaaggaggccgacaaggacgagttctgcagatgcgagctgaagctgcagaagtggtacggggacctgcggggaaagcccttcgccatcgaagccgagaacagcatcctggacatcagcggcttcagcaagcagtacaactgtgccttcatctggcagaaggacggcgtgaagaagctgaacctgtacctgatcatcaactacttcaagggcggcaagctgcggttcaagaagatcaaacctgaagccttcgaagccaacagattctacaccgtgatcaacaaaaagagcggcgagatcgtgcccatggaggtgaacttcaacttcgacgaccccaacctgatcatcctgcctctggcctttggcaagagacagggcagagaattcatctggaacgacctgctgtccctggaaaccggcagcctgaagctggccaacggaagagtgatcgagaagacactgtacaacagaagaacccggcaggatgagcctgccctgttcgtggccctgaccttcgagcggcgggaggtcctggactcctccaatatcaaaccaatgaacctgatcggcgtggcaagaggcgaaaacatccccgccgtgatcgccctgaccgaccccgagggctgcccactgagccggtttaaggatagcctgggaaacccaacccacatcctgagaatcggcgagagctataaggagaagcagcggaccatccaggccaagaaggaggtggagcagcggagagccggcggctacagccggaagtacgccagcaaagccaagaatctggcagacgatatggtgagaaacaccgctagagatctgctgtactacgccgtgacccaggatgccatgctgatcttcgccaacctgagccggggcttcggccggcagggcaagcggaccttcatggccgagagacagtacacacggatggaggactggctgaccgccaagctggcctacgagggcctgagcaagacctacctgtccaagacactggcccagtacacctccaagacatgcagcaactgtgggtttaccatcaccagcgccgactacgacagggtgctggagaagctgaagaagacagcaacaggctggatgaccacaattaacggcaaggagctgaaggtggagggccagattacctactacaacagatacaagagacagaacgtagtcaaggacctgtccgtcgagctggatagactgagcgaagaatctgtgaacaacgacatctcctcctggacaaagggcagaagcggagaagctctgagcctcctgaagaaaagattctcccatagacccgtgcaggagaagttcgtgtgcctgaactgcggcttcgagacacacgcagccgagcaagccgccctgaacatcgccagatcctggctgttcctgcggagccaggagtacaagaaataccagacaaacaagacaaccggcaacaccgataagagagccttcgtcgagacctggcagtccttttaccggaagaagcttaaggaggtgtggaaacctgccgtgcggtctggcggatctggcggaggctccttccagcacctggtgatgttcagggacgtggccgtggacttcagccaggaggagtgggagtgcctgaacagctaccagaggaacctgtacagggacgtgatcctggagaactacagcaacctggtgagcgtgggctgcaccatcagcaagcccgacgtgatcaccctgctggagcagggcaaggagccctggatggtggtgagggacgagaggaggaggaggagcctggacctggaggccaggggcggcccaagcagcggcgcccctcctcccagcggcggcagcccagccggctccccaacctctaccgaggagggcacctctgagtccgccacccccgagagcggccctggcacctccaccgagcccagcgagggcagcgcacccggcagccctgccggcagccccacctccacagaggagggaaccagcaccgagcccagcgaaggcagcgccccaggcaccagcaccgagcctagtgagcaggagattaaacggatcaacaagatcagaagaagacttgtgaaagacagcaacaccaagaaggccggcaagacaggccccatgaaaaccctgctggttagagtgatgacacccgatctgagagagcggctggaaaacctgagaaagaagcctgaaaatatcccccagcccatcagcaatacatctagagccaacctgaataagctgctgaccgattacaccgaaatgaagaaggcgatcctgcatgtgtactgggaagagttccagaaggaccctgtgggcctgatgagccgggtggcccagcctgccagcaagaagatcgatcagaacaagctgaaacctgagatggacgagaagggcaacctgaccaccgccggctttgcctgctctcagtgtggccagcccctgttcgtgtacaagctggagcaggtgtctgagaagggcaaggcttacaccaactacttcggacggtgcaatgtggccgagcacgaaaagctgatcctgctggcccagctgaagcccgagaaggatagcgacgaagccgtgacatatagcctgggaaagtttgggcagagggccctggatttctacagcattcatgtgaccaaggagtccacccaccccgtgaagcccctggcccagatcgccggaaacagatacgcctccggacctgtgggaaaggccctgagcgacgcatgtatgggcacaatcgcctccttcctgtctaagtaccaggacatcatcatcgaacaccagaaggtggtgaagggcaaccagaagagactggagagcctgcgggagctggccggcaaggaaaacctggaataccctagcgtgaccctgccacctcagcctcacaccaaggagggcgttgatgcctacaacgaagtgatcgcccgggtgcgaatgtgggtgaacctgaacctgtggcagaagctgaagctaagcagagatgatgccaagcctctgctgagactgaagggattcccttcctttcctctggtcgagagacaggccaacgaagtggactggtgggacatggtgtgtaacgtgaagaagctgatcaacgagaaaaaggaggatggcaaggtgttttggcagaatctggctggctacaagagacaggaagccctgagaccatacctgagcagcgaggaagatcggaagaagggaaagaaattcgctcggtaccagctgggcgacctgctgctgcacctggaaaagaagcacggcgaggactggggaaaggtgtacgacgaggcctgggagcggattgacaagaaagtggaaggcctgagcaagcacatcaagctggaagaggaacggagaagcgaggacgcccagagcaaggccgccctgaccgactggctgcgggctaaggccagcttcgtgatcgagggcctgaaggaggccgacaaggacgagttctgcagatgcgagctgaagctgcagaagtggtacggggacctgcggggaaagcccttcgccatcgaagccgagaacagcatcctggacatcagcggcttcagcaagcagtacaactgtgccttcatctggcagaaggacggcgtgaagaagctgaacctgtacctgatcatcaactacttcaagggcggcaagctgcggttcaagaagatcaaacctgaagccttcgaagccaacagattctacaccgtgatcaacaaaaagagcggcgagatcgtgcccatggaggtgaacttcaacttcgacgaccccaacctgatcatcctgcctctggcctttggcaagagacagggcagagaattcatctggaacgacctgctgtccctggaaaccggcagcctgaagctggccaacggaagagtgatcgagaagacactgtacaacagaagaacccggcaggatgagcctgccctgttcgtggccctgaccttcgagcggcgggaggtcctggactcctccaatatcaaaccaatgaacctgatcggcgtggcaagaggcgaaaacatccccgccgtgatcgccctgaccgaccccgagggctgcccactgagccggtttaaggatagcctgggaaacccaacccacatcctgagaatcggcgagagctataaggagaagcagcggaccatccaggccaagaaggaggtggagcagcggagagccggcggctacagccggaagtacgccagcaaagccaagaatctggcagacgatatggtgagaaacaccgctagagatctgctgtactacgccgtgacccaggatgccatgctgatcttcgccaacctgagccggggcttcggccggcagggcaagcggaccttcatggccgagagacagtacacacggatggaggactggctgaccgccaagctggcctacgagggcctgagcaagacctacctgtccaagacactggcccagtacacctccaagacatgcagcaactgtgggtttaccatcaccagcgccgactacgacagggtgctggagaagctgaagaagacagcaacaggctggatgaccacaattaacggcaaggagctgaaggtggagggccagattacctactacaacagatacaagagacagaacgtagtcaaggacctgtccgtcgagctggatagactgagcgaagaatctgtgaacaacgacatctcctcctggacaaagggcagaagcggagaagctctgagcctcctgaagaaaagattctcccatagacccgtgcaggagaagttcgtgtgcctgaactgcggcttcgagacacacgcagccgagcaagccgccctgaacatcgccagatcctggctgttcctgcggagccaggagtacaagaaataccagacaaacaagacaaccggcaacaccgataagagagccttcgtcgagacctggcagtccttttaccggaagaagcttaaggaggtgtggaaacctgccgtgcggtctggcggatctggcggaggctcctttccagcacctggtgatgttcagggacgtggccgtggacttcagccaggaggagtgggagtgcctgaacagctaccagaggaacctgtacagggacgtgatcctggagaactacagcaacctggtgagcgtgggctgcaccatcagcaagcccgacgtgatcaccctgctggagcagggcaaggagccctggatggtggtgagggacgagaggaggaggaggagcctggacctggaggccaggggatctggctccggcagcggccccaagaaaaagagaaaagtctaagctgccttctgcggggcttgccttctggccatgcccttcttctctcccttgcacctgtacctcttggtctttgaataaagcctgagtaggaaggctagcaaaaaaaaaaaaaaaaaaaaaaaaaaaaaaaaaaaaaaaaaaaaaaaaaaaaaaaaaaaaaaaaaaaaaaaaaaaaaaaa

SEQ ID NO: 16192 - RNA, 9503 nt, synthetic construct
  source 1..9503: mol_type = other RNA
aggaaataagagagaaaagaagagtaagaagaaatataagagccaccatggcccctaagaagaagcgtaaagtgagccggatggaacgcctcgtctacgaggtgcggcagaagtgcagaaacatcgaggacatctgcatctcctgcggatctctgaacgtgaccctggagcacccactgttcatcggcggcatgtgccagaactgtaaaaactgttttctggagtgtgcctatcaatacgacgatgacggctaccagagctactgcaccatctgttgcggcggaagagaggtgctgatgtgtggaaataacaactgctgccggtgcttctgcgtggaatgcgtggacctgctggtgggccccggcgccgcccaggccgctattaaggaagatccttggaactgctacatgtgcggccacaagggcacatacggcctgctgagacggagagaggactggcctagcagactgcagatgttcttcgccaataaccacgaccaggagttcgacccccctaaggtgtaccctcccgtccccgccgagaagagaaagcccatccgggtcctgagcctgttcgatggcatcgccaccggtctgctggtgctgaaggacctgggcatccaggtggataggtacattgcctccgaggtgtgcgaggactccatcaccgtgggaatggtgcgtcatcagggcaagatcatgtacgtgggcgacgtgcggagcgtgacacagaagcatatccaggagtggggccctttcgacctggtgatcggcggcagcccttgcaatgacctgagcatcgtgaacccagcccggaagggcctgtacgagggaaccggcagactgttcttcgagttttacagactgctgcacgacgcccggcctaaggaaggcgacgaccggcccttcttttggctgttcgagaatgtggtggccatgggagtcagcgacaagcgggatattagccggttcctggagagcaaccccgtgatgatcgatgccaaggaagtgagcgccgcccaccgggccagatacttctggggcaatctgcctggcatgaacagacccctggccagcaccgtgaacgacaagctggagctgcaggagtgcctggagcacggccggatcgccaagttcagcaaggtgagaaccatcaccacccgaagcaacagcatcaaacaaggcaaggaccagcactttcctgtgttcatgaacgagaaggaggacatcctgtggtgtaccgagatggagagagtgttcgggttcccagtccactacacagatgtcagcaacatgtctagactggccagacagagactgctgggaagaagctggtccgtccctgtgatcagacacctgttcgcccctctgaaggagtacttcgcctgcgtgagcagcggcaacagcaacgccaacagccggggccccagcttctctagcggcctggtgccactgtccctgagagggagccacatgggccccatggagatctacaaaaccgtgagcgcctggaagcggcagcctgtgcgcgtgctgagcctgtttcggaatatcgataaagtcctgaaaagcctgggattcctggagagcggctctggctccggcggtggcaccctgaagtacgtggaggatgtgacaaacgtggtcagacgggatgtggagaagtggggccccttcgatctggtgtacggcagcacccaacccctgggcagctcttgtgaccggtgccctggctggtacatgtttcagttccaccggatcctgcagtacgccctgccgagacaggagtcccagcggccattcttttggattttcatggacaacttgctgctgaccgaggatgaccaggaaactaccactcggttcctgcagaccgaagccgtgaccctgcaggacgtgagaggccgggactaccagaacgccatgcgggtgtggtccaacatccctggactgaaaagcaagcacgcacctctgacccctaaagaagaggagtacctgcaggcccaggtgcggagcagaagcaagctggacgcccctaaggtggatctgctggtgaagaattgcctcctgcccctgagagagtacttcaagtatttcagccagaatagtctgcccctgggaggcagcggcggcggcgccctggtgacatttgaggacgtcgccgtgcggttcacccaggaggaatgggctctgctggatccttctcagaaaatcctgtaccgggacgtgatgagagagacataccggaatctgacctccgtgggcatcaactgggaatgttgggaccttgaagcctgcttcagaagcctgggaagaaacctgagagtgcaggtggtgaagagaaagtgcgagctgaccaacagcggcccctgcgccgagggcggcccaagcagcggcgcccctcctcccagcggcggcagcccagccggctccccaacctctaccgaggagggcacctctgagtccgccacccccgagagcggccctggcacctccaccgagcccagcgagggcagcgcacccggcagccctgccggcagccccacctccacagaggagggaaccagcaccgagcccagcgaaggcagcgccccaggcaccagcaccgagcctagtgagcaggagattaaacggatcaacaagatcagaagaagacttgtgaaagacagcaacaccaagaaggccggcaagacaggccccatgaaaaccctgctggttagagtgatgacacccgatctgagagagcggctggaaaacctgagaaagaagcctgaaaatatcccccagcccatcagcaatacatctagagccaacctgaataagctgctgaccgattacaccgaaatgaagaaggcgatcctgcatgtgtactgggaagagttccagaaggaccctgtgggcctgatgagccgggtggcccagcctgccagcaagaagatcgatcagaacaagctgaaacctgagatggacgagaagggcaacctgaccaccgccggctttgcctgctctcagtgtggccagcccctgttcgtgtacaagctggagcaggtgtctgagaagggcaaggcttacaccaactacttcggacggtgcaatgtggccgagcacgaaaagctgatcctgctggcccagctgaagcccgagaaggatagcgacgaagccgtgacatatagcctgggaaagtttgggcagagggccctggatttctacagcattcatgtgaccaaggagtccacccaccccgtgaagcccctggcccagatcgccggaaacagatacgcctccggacctgtgggaaaggccctgagcgacgcatgtatgggcacaatcgcctccttcctgtctaagtaccaggacatcatcatcgaacaccagaaggtggtgaagggcaaccagaagagactggagagcctgcgggagctggccggcaaggaaaacctggaataccctagcgtgaccctgccacctcagcctcacaccaaggagggcgttgatgcctacaacgaagtgatcgcccgggtgcgaatgtgggtgaacctgaacctgtggcagaagctgaagctaagcagagatgatgccaagcctctgctgagactgaagggattcccttcctttcctctggtcgagagacaggccaacgaagtggactggtgggacatggtgtgtaacgtgaagaagctgatcaacgagaaaaaggaggatggcaaggtgttttggcagaatctggctggctacaagagacaggaagccctgagaccatacctgagcagcgaggaagatcggaagaagggaaagaaattcgctcggtaccagctgggcgacctgctgctgcacctggaaaagaagcacggcgaggactggggaaaggtgtacgacgaggcctgggagcggattgacaagaaagtggaaggcctgagcaagcacatcaagctggaagaggaacggagaagcgaggacgcccagagcaaggccgccctgaccgactggctgcgggctaaggccagcttcgtgatcgagggcctgaaggaggccgacaaggacgagttctgcagatgcgagctgaagctgcagaagtggtacggggacctgcggggaaagcccttcgccatcgaagccgagaacagcatcctggacatcagcggcttcagcaagcagtacaactgtgccttcatctggcagaaggacggcgtgaagaagctgaacctgtacctgatcatcaactacttcaagggcggcaagctgcggttcaagaagatcaaacctgaagccttcgaagccaacagattctacaccgtgatcaacaaaaagagcggcgagatcgtgcccatggaggtgaacttcaacttcgacgaccccaacctgatcatcctgcctctggcctttggcaagagacagggcagagaattcatctggaacgacctgctgtccctggaaaccggcagcctgaagctggccaacggaagagtgatcgagaagacactgtacaacagaagaacccggcaggatgagcctgccctgttcgtggccctgaccttcgagcggcgggaggtcctggactcctccaatatcaaaccaatgaacctgatcggcgtggcaagaggcgaaaacatccccgccgtgatcgccctgaccgaccccgagggctgcccactgagccggtttaaggatagcctgggaaacccaacccacatcctgagaatcggcgagagctataaggagaagcagcggaccatccaggccaagaaggaggtggagcagcggagagccggcggctacagccggaagtacgccagcaaagccaagaatctggcagacgatatggtgagaaacaccgctagagatctgctgtactacgccgtgacccaggatgccatgctgatcttcgccaacctgagccggggcttcggccggcagggcaagcggaccttcatggccgagagacagtacacacggatggaggactggctgaccgccaagctggcctacgagggcctgagcaagacctacctgtccaagacactggcccagtacacctccaagacatgcagcaactgtgggtttaccatcaccagcgccgactacgacagggtgctggagaagctgaagaagacagcaacaggctggatgaccacaattaacggcaaggagctgaaggtggagggccagattacctactacaacagatacaagagacagaacgtagtcaaggacctgtccgtcgagctggatagactgagcgaagaatctgtgaacaacgacatctcctcctggacaaagggcagaagcggagaagctctgagcctcctgaagaaaagattctcccatagacccgtgcaggagaagttcgtgtgcctgaactgcggcttcgagacacacgcagccgagcaagccgccctgaacatcgccagatcctggctgttcctgcggagccaggagtacaagaaataccagacaaacaagacaaccggcaacaccgataagagagccttcgtcgagacctggcagtccttttaccggaagaagcttaaggaggtgtggaaacctgccgtgcggtctggcggatctggcggaggctccctgaccttcgaggacgtggccgtgtacttcagcgaggaggagtggcagctgctgaaccccctggagaagaccctgtacaacgacgtgatgcaggacatctacgagaccgtgatcagcctgggcctgaagctgaagaacgacaccggcaacgaccaccccatcagcgtgagcaccagcgagatccagaccagcggctgcgaggtgagcaagaagaccaggatgaagatcgcccagaagaccatgggcagggagggcggcccaagcagcggcgcccctcctcccagcggcggcagcccagccggctccccaacctctaccgaggagggcacctctgagtccgccacccccgagagcggccctggcacctccaccgagcccagcgagggcagcgcacccggcagccctgccggcagccccacctccacagaggagggaaccagcaccgagcccagcgaaggcagcgccccaggcaccagcaccgagcctagtgagcaggagattaaacggatcaacaagatcagaagaagacttgtgaaagacagcaacaccaagaaggccggcaagacaggccccatgaaaaccctgctggttagagtgatgacacccgatctgagagagcggctggaaaacctgagaaagaagcctgaaaatatcccccagcccatcagcaatacatctagagccaacctgaataagctgctgaccgattacaccgaaatgaagaaggcgatcctgcatgtgtactgggaagagttccagaaggaccctgtgggcctgatgagccgggtggcccagcctgccagcaagaagatcgatcagaacaagctgaaacctgagatggacgagaagggcaacctgaccaccgccggctttgcctgctctcagtgtggccagcccctgttcgtgtacaagctggagcaggtgtctgagaagggcaaggcttacaccaactacttcggacggtgcaatgtggccgagcacgaaaagctgatcctgctggcccagctgaagcccgagaaggatagcgacgaagccgtgacatatagcctgggaaagtttgggcagagggccctggatttctacagcattcatgtgaccaaggagtccacccaccccgtgaagcccctggcccagatcgccggaaacagatacgcctccggacctgtgggaaaggccctgagcgacgcatgtatgggcacaatcgcctccttcctgtctaagtaccaggacatcatcatcgaacaccagaaggtggtgaagggcaaccagaagagactggagagcctgcgggagctggccggcaaggaaaacctggaataccctagcgtgaccctgccacctcagcctcacaccaaggagggcgttgatgcctacaacgaagtgatcgcccgggtgcgaatgtgggtgaacctgaacctgtggcagaagctgaagctaagcagagatgatgccaagcctctgctgagactgaagggattcccttcctttcctctggtcgagagacaggccaacgaagtggactggtgggacatggtgtgtaacgtgaagaagctgatcaacgagaaaaaggaggatggcaaggtgttttggcagaatctggctggctacaagagacaggaagccctgagaccatacctgagcagcgaggaagatcggaagaagggaaagaaattcgctcggtaccagctgggcgacctgctgctgcacctggaaaagaagcacggcgaggactggggaaaggtgtacgacgaggcctgggagcggattgacaagaaagtggaaggcctgagcaagcacatcaagctggaagaggaacggagaagcgaggacgcccagagcaaggccgccctgaccgactggctgcgggctaaggccagcttcgtgatcgagggcctgaaggaggccgacaaggacgagttctgcagatgcgagctgaagctgcagaagtggtacggggacctgcggggaaagcccttcgccatcgaagccgagaacagcatcctggacatcagcggcttcagcaagcagtacaactgtgccttcatctggcagaaggacggcgtgaagaagctgaacctgtacctgatcatcaactacttcaagggcggcaagctgcggttcaagaagatcaaacctgaagccttcgaagccaacagattctacaccgtgatcaacaaaaagagcggcgagatcgtgcccatggaggtgaacttcaacttcgacgaccccaacctgatcatcctgcctctggcctttggcaagagacagggcagagaattcatctggaacgacctgctgtccctggaaaccggcagcctgaagctggccaacggaagagtgatcgagaagacactgtacaacagaagaacccggcaggatgagcctgccctgttcgtggccctgaccttcgagcggcgggaggtcctggactcctccaatatcaaaccaatgaacctgatcggcgtggcaagaggcgaaaacatccccgccgtgatcgccctgaccgaccccgagggctgcccactgagccggtttaaggatagcctgggaaacccaacccacatcctgagaatcggcgagagctataaggagaagcagcggaccatccaggccaagaaggaggtggagcagcggagagccggcggctacagccggaagtacgccagcaaagccaagaatctggcagacgatatggtgagaaacaccgctagagatctgctgtactacgccgtgacccaggatgccatgctgatcttcgccaacctgagccggggcttcggccggcagggcaagcggaccttcatggccgagagacagtacacacggatggaggactggctgaccgccaagctggcctacgagggcctgagcaagacctacctgtccaagacactggcccagtacacctccaagacatgcagcaactgtgggtttaccatcaccagcgccgactacgacagggtgctggagaagctgaagaagacagcaacaggctggatgaccacaattaacggcaaggagctgaaggtggagggccagattacctactacaacagatacaagagacagaacgtagtcaaggacctgtccgtcgagctggatagactgagcgaagaatctgtgaacaacgacatctcctcctggacaaagggcagaagcggagaagctctgagcctcctgaagaaaagattctcccatagacccgtgcaggagaagttcgtgtgcctgaactgcggcttcgagacacacgcagccgagcaagccgccctgaacatcgccagatcctggctgttcctgcggagccaggagtacaagaaataccagacaaacaagacaaccggcaacaccgataagagagccttcgtcgagacctggcagtccttttaccggaagaagcttaaggaggtgtggaaacctgccgtgcggtctggcggatctggcggaggctcctctgaccttcgaggacgtggccgtgtacttcagcgaggaggagtggcagctgctgaaccccctggagaagaccctgtacaacgacgtgatgcaggacatctacgagaccgtgatcagcctgggcctgaagctgaagaacgacaccggcaacgaccaccccatcagcgtgagcaccagcgagatccagaccagcggctgcgaggtgagcaagaagaccaggatgaagatcgcccagaagaccatgggcagggagggatctggctccggcagcggccccaagaaaaagagaaaagtctaagctgccttctgcggggcttgccttctggccatgcccttcttctctcccttgcacctgtacctcttggtctttgaataaagcctgagtaggaaggctagcaaaaaaaaaaaaaaaaaaaaaaaaaaaaaaaaaaaaaaaaaaaaaaaaaaaaaaaaaaaaaaaaaaaaaaaaaaaaaaaa

SEQ ID NO: 16193 - RNA, 9485 nt, synthetic construct
  source 1..9485: mol_type = other RNA
aggaaataagagagaaaagaagagtaagaagaaatataagagccaccatggcccctaagaagaagcgtaaagtgagccggatggaacgcctcgtctacgaggtgcggcagaagtgcagaaacatcgaggacatctgcatctcctgcggatctctgaacgtgaccctggagcacccactgttcatcggcggcatgtgccagaactgtaaaaactgttttctggagtgtgcctatcaatacgacgatgacggctaccagagctactgcaccatctgttgcggcggaagagaggtgctgatgtgtggaaataacaactgctgccggtgcttctgcgtggaatgcgtggacctgctggtgggccccggcgccgcccaggccgctattaaggaagatccttggaactgctacatgtgcggccacaagggcacatacggcctgctgagacggagagaggactggcctagcagactgcagatgttcttcgccaataaccacgaccaggagttcgacccccctaaggtgtaccctcccgtccccgccgagaagagaaagcccatccgggtcctgagcctgttcgatggcatcgccaccggtctgctggtgctgaaggacctgggcatccaggtggataggtacattgcctccgaggtgtgcgaggactccatcaccgtgggaatggtgcgtcatcagggcaagatcatgtacgtgggcgacgtgcggagcgtgacacagaagcatatccaggagtggggccctttcgacctggtgatcggcggcagcccttgcaatgacctgagcatcgtgaacccagcccggaagggcctgtacgagggaaccggcagactgttcttcgagttttacagactgctgcacgacgcccggcctaaggaaggcgacgaccggcccttcttttggctgttcgagaatgtggtggccatgggagtcagcgacaagcgggatattagccggttcctggagagcaaccccgtgatgatcgatgccaaggaagtgagcgccgcccaccgggccagatacttctggggcaatctgcctggcatgaacagacccctggccagcaccgtgaacgacaagctggagctgcaggagtgcctggagcacggccggatcgccaagttcagcaaggtgagaaccatcaccacccgaagcaacagcatcaaacaaggcaaggaccagcactttcctgtgttcatgaacgagaaggaggacatcctgtggtgtaccgagatggagagagtgttcgggttcccagtccactacacagatgtcagcaacatgtctagactggccagacagagactgctgggaagaagctggtccgtccctgtgatcagacacctgttcgcccctctgaaggagtacttcgcctgcgtgagcagcggcaacagcaacgccaacagccggggccccagcttctctagcggcctggtgccactgtccctgagagggagccacatgggccccatggagatctacaaaaccgtgagcgcctggaagcggcagcctgtgcgcgtgctgagcctgtttcggaatatcgataaagtcctgaaaagcctgggattcctggagagcggctctggctccggcggtggcaccctgaagtacgtggaggatgtgacaaacgtggtcagacgggatgtggagaagtggggccccttcgatctggtgtacggcagcacccaacccctgggcagctcttgtgaccggtgccctggctggtacatgtttcagttccaccggatcctgcagtacgccctgccgagacaggagtcccagcggccattcttttggattttcatggacaacttgctgctgaccgaggatgaccaggaaactaccactcggttcctgcagaccgaagccgtgaccctgcaggacgtgagaggccgggactaccagaacgccatgcgggtgtggtccaacatccctggactgaaaagcaagcacgcacctctgacccctaaagaagaggagtacctgcaggcccaggtgcggagcagaagcaagctggacgcccctaaggtggatctgctggtgaagaattgcctcctgcccctgagagagtacttcaagtatttcagccagaatagtctgcccctgggaggcagcggcggcggcgccctggtgacatttgaggacgtcgccgtgcggttcacccaggaggaatgggctctgctggatccttctcagaaaatcctgtaccgggacgtgatgagagagacataccggaatctgacctccgtgggcatcaactgggaatgttgggaccttgaagcctgcttcagaagcctgggaagaaacctgagagtgcaggtggtgaagagaaagtgcgagctgaccaacagcggcccctgcgccgagggcggcccaagcagcggcgcccctcctcccagcggcggcagcccagccggctccccaacctctaccgaggagggcacctctgagtccgccacccccgagagcggccctggcacctccaccgagcccagcgagggcagcgcacccggcagccctgccggcagccccacctccacagaggagggaaccagcaccgagcccagcgaaggcagcgccccaggcaccagcaccgagcctagtgagcaggagattaaacggatcaacaagatcagaagaagacttgtgaaagacagcaacaccaagaaggccggcaagacaggccccatgaaaaccctgctggttagagtgatgacacccgatctgagagagcggctggaaaacctgagaaagaagcctgaaaatatcccccagcccatcagcaatacatctagagccaacctgaataagctgctgaccgattacaccgaaatgaagaaggcgatcctgcatgtgtactgggaagagttccagaaggaccctgtgggcctgatgagccgggtggcccagcctgccagcaagaagatcgatcagaacaagctgaaacctgagatggacgagaagggcaacctgaccaccgccggctttgcctgctctcagtgtggccagcccctgttcgtgtacaagctggagcaggtgtctgagaagggcaaggcttacaccaactacttcggacggtgcaatgtggccgagcacgaaaagctgatcctgctggcccagctgaagcccgagaaggatagcgacgaagccgtgacatatagcctgggaaagtttgggcagagggccctggatttctacagcattcatgtgaccaaggagtccacccaccccgtgaagcccctggcccagatcgccggaaacagatacgcctccggacctgtgggaaaggccctgagcgacgcatgtatgggcacaatcgcctccttcctgtctaagtaccaggacatcatcatcgaacaccagaaggtggtgaagggcaaccagaagagactggagagcctgcgggagctggccggcaaggaaaacctggaataccctagcgtgaccctgccacctcagcctcacaccaaggagggcgttgatgcctacaacgaagtgatcgcccgggtgcgaatgtgggtgaacctgaacctgtggcagaagctgaagctaagcagagatgatgccaagcctctgctgagactgaagggattcccttcctttcctctggtcgagagacaggccaacgaagtggactggtgggacatggtgtgtaacgtgaagaagctgatcaacgagaaaaaggaggatggcaaggtgttttggcagaatctggctggctacaagagacaggaagccctgagaccatacctgagcagcgaggaagatcggaagaagggaaagaaattcgctcggtaccagctgggcgacctgctgctgcacctggaaaagaagcacggcgaggactggggaaaggtgtacgacgaggcctgggagcggattgacaagaaagtggaaggcctgagcaagcacatcaagctggaagaggaacggagaagcgaggacgcccagagcaaggccgccctgaccgactggctgcgggctaaggccagcttcgtgatcgagggcctgaaggaggccgacaaggacgagttctgcagatgcgagctgaagctgcagaagtggtacggggacctgcggggaaagcccttcgccatcgaagccgagaacagcatcctggacatcagcggcttcagcaagcagtacaactgtgccttcatctggcagaaggacggcgtgaagaagctgaacctgtacctgatcatcaactacttcaagggcggcaagctgcggttcaagaagatcaaacctgaagccttcgaagccaacagattctacaccgtgatcaacaaaaagagcggcgagatcgtgcccatggaggtgaacttcaacttcgacgaccccaacctgatcatcctgcctctggcctttggcaagagacagggcagagaattcatctggaacgacctgctgtccctggaaaccggcagcctgaagctggccaacggaagagtgatcgagaagacactgtacaacagaagaacccggcaggatgagcctgccctgttcgtggccctgaccttcgagcggcgggaggtcctggactcctccaatatcaaaccaatgaacctgatcggcgtggcaagaggcgaaaacatccccgccgtgatcgccctgaccgaccccgagggctgcccactgagccggtttaaggatagcctgggaaacccaacccacatcctgagaatcggcgagagctataaggagaagcagcggaccatccaggccaagaaggaggtggagcagcggagagccggcggctacagccggaagtacgccagcaaagccaagaatctggcagacgatatggtgagaaacaccgctagagatctgctgtactacgccgtgacccaggatgccatgctgatcttcgccaacctgagccggggcttcggccggcagggcaagcggaccttcatggccgagagacagtacacacggatggaggactggctgaccgccaagctggcctacgagggcctgagcaagacctacctgtccaagacactggcccagtacacctccaagacatgcagcaactgtgggtttaccatcaccagcgccgactacgacagggtgctggagaagctgaagaagacagcaacaggctggatgaccacaattaacggcaaggagctgaaggtggagggccagattacctactacaacagatacaagagacagaacgtagtcaaggacctgtccgtcgagctggatagactgagcgaagaatctgtgaacaacgacatctcctcctggacaaagggcagaagcggagaagctctgagcctcctgaagaaaagattctcccatagacccgtgcaggagaagttcgtgtgcctgaactgcggcttcgagacacacgcagccgagcaagccgccctgaacatcgccagatcctggctgttcctgcggagccaggagtacaagaaataccagacaaacaagacaaccggcaacaccgataagagagccttcgtcgagacctggcagtccttttaccggaagaagcttaaggaggtgtggaaacctgccgtgcggtctggcggatctggcggaggctcccccaggctgcccctgaccttcgaggacgtggccatctacttcagcgagcaggagtggcaggacctggaggcctggcagaaggagctgtacaagcacgtgatgaggagcaactacgagaccctggtgagcctggacgacggcctgcccaagcccgagctgatcagctggatcgagcacggcggcgagcccttcaggaactggagggagagccagaagagcaggaacatcatctgcagcagcagcggcggcccaagcagcggcgcccctcctcccagcggcggcagcccagccggctccccaacctctaccgaggagggcacctctgagtccgccacccccgagagcggccctggcacctccaccgagcccagcgagggcagcgcacccggcagccctgccggcagccccacctccacagaggagggaaccagcaccgagcccagcgaaggcagcgccccaggcaccagcaccgagcctagtgagcaggagattaaacggatcaacaagatcagaagaagacttgtgaaagacagcaacaccaagaaggccggcaagacaggccccatgaaaaccctgctggttagagtgatgacacccgatctgagagagcggctggaaaacctgagaaagaagcctgaaaatatcccccagcccatcagcaatacatctagagccaacctgaataagctgctgaccgattacaccgaaatgaagaaggcgatcctgcatgtgtactgggaagagttccagaaggaccctgtgggcctgatgagccgggtggcccagcctgccagcaagaagatcgatcagaacaagctgaaacctgagatggacgagaagggcaacctgaccaccgccggctttgcctgctctcagtgtggccagcccctgttcgtgtacaagctggagcaggtgtctgagaagggcaaggcttacaccaactacttcggacggtgcaatgtggccgagcacgaaaagctgatcctgctggcccagctgaagcccgagaaggatagcgacgaagccgtgacatatagcctgggaaagtttgggcagagggccctggatttctacagcattcatgtgaccaaggagtccacccaccccgtgaagcccctggcccagatcgccggaaacagatacgcctccggacctgtgggaaaggccctgagcgacgcatgtatgggcacaatcgcctccttcctgtctaagtaccaggacatcatcatcgaacaccagaaggtggtgaagggcaaccagaagagactggagagcctgcgggagctggccggcaaggaaaacctggaataccctagcgtgaccctgccacctcagcctcacaccaaggagggcgttgatgcctacaacgaagtgatcgcccgggtgcgaatgtgggtgaacctgaacctgtggcagaagctgaagctaagcagagatgatgccaagcctctgctgagactgaagggattcccttcctttcctctggtcgagagacaggccaacgaagtggactggtgggacatggtgtgtaacgtgaagaagctgatcaacgagaaaaaggaggatggcaaggtgttttggcagaatctggctggctacaagagacaggaagccctgagaccatacctgagcagcgaggaagatcggaagaagggaaagaaattcgctcggtaccagctgggcgacctgctgctgcacctggaaaagaagcacggcgaggactggggaaaggtgtacgacgaggcctgggagcggattgacaagaaagtggaaggcctgagcaagcacatcaagctggaagaggaacggagaagcgaggacgcccagagcaaggccgccctgaccgactggctgcgggctaaggccagcttcgtgatcgagggcctgaaggaggccgacaaggacgagttctgcagatgcgagctgaagctgcagaagtggtacggggacctgcggggaaagcccttcgccatcgaagccgagaacagcatcctggacatcagcggcttcagcaagcagtacaactgtgccttcatctggcagaaggacggcgtgaagaagctgaacctgtacctgatcatcaactacttcaagggcggcaagctgcggttcaagaagatcaaacctgaagccttcgaagccaacagattctacaccgtgatcaacaaaaagagcggcgagatcgtgcccatggaggtgaacttcaacttcgacgaccccaacctgatcatcctgcctctggcctttggcaagagacagggcagagaattcatctggaacgacctgctgtccctggaaaccggcagcctgaagctggccaacggaagagtgatcgagaagacactgtacaacagaagaacccggcaggatgagcctgccctgttcgtggccctgaccttcgagcggcgggaggtcctggactcctccaatatcaaaccaatgaacctgatcggcgtggcaagaggcgaaaacatccccgccgtgatcgccctgaccgaccccgagggctgcccactgagccggtttaaggatagcctgggaaacccaacccacatcctgagaatcggcgagagctataaggagaagcagcggaccatccaggccaagaaggaggtggagcagcggagagccggcggctacagccggaagtacgccagcaaagccaagaatctggcagacgatatggtgagaaacaccgctagagatctgctgtactacgccgtgacccaggatgccatgctgatcttcgccaacctgagccggggcttcggccggcagggcaagcggaccttcatggccgagagacagtacacacggatggaggactggctgaccgccaagctggcctacgagggcctgagcaagacctacctgtccaagacactggcccagtacacctccaagacatgcagcaactgtgggtttaccatcaccagcgccgactacgacagggtgctggagaagctgaagaagacagcaacaggctggatgaccacaattaacggcaaggagctgaaggtggagggccagattacctactacaacagatacaagagacagaacgtagtcaaggacctgtccgtcgagctggatagactgagcgaagaatctgtgaacaacgacatctcctcctggacaaagggcagaagcggagaagctctgagcctcctgaagaaaagattctcccatagacccgtgcaggagaagttcgtgtgcctgaactgcggcttcgagacacacgcagccgagcaagccgccctgaacatcgccagatcctggctgttcctgcggagccaggagtacaagaaataccagacaaacaagacaaccggcaacaccgataagagagccttcgtcgagacctggcagtccttttaccggaagaagcttaaggaggtgtggaaacctgccgtgcggtctggcggatctggcggaggctcctcccaggctgcccctgaccttcgaggacgtggccatctacttcagcgagcaggagtggcaggacctggaggcctggcagaaggagctgtacaagcacgtgatgaggagcaactacgagaccctggtgagcctggacgacggcctgcccaagcccgagctgatcagctggatcgagcacggcggcgagcccttcaggaactggagggagagccagaagagcaggaacatcatctgcagcagcagcggatctggctccggcagcggccccaagaaaaagagaaaagtctaagctgccttctgcggggcttgccttctggccatgcccttcttctctcccttgcacctgtacctcttggtctttgaataaagcctgagtaggaaggctagcaaaaaaaaaaaaaaaaaaaaaaaaaaaaaaaaaaaaaaaaaaaaaaaaaaaaaaaaaaaaaaaaaaaaaaaaaaaaaaaa

SEQ ID NO: 16194 - RNA, 9485 nt, synthetic construct
  source 1..9485: mol_type = other RNA
aggaaataagagagaaaagaagagtaagaagaaatataagagccaccatggcccctaagaagaagcgtaaagtgagccggatggaacgcctcgtctacgaggtgcggcagaagtgcagaaacatcgaggacatctgcatctcctgcggatctctgaacgtgaccctggagcacccactgttcatcggcggcatgtgccagaactgtaaaaactgttttctggagtgtgcctatcaatacgacgatgacggctaccagagctactgcaccatctgttgcggcggaagagaggtgctgatgtgtggaaataacaactgctgccggtgcttctgcgtggaatgcgtggacctgctggtgggccccggcgccgcccaggccgctattaaggaagatccttggaactgctacatgtgcggccacaagggcacatacggcctgctgagacggagagaggactggcctagcagactgcagatgttcttcgccaataaccacgaccaggagttcgacccccctaaggtgtaccctcccgtccccgccgagaagagaaagcccatccgggtcctgagcctgttcgatggcatcgccaccggtctgctggtgctgaaggacctgggcatccaggtggataggtacattgcctccgaggtgtgcgaggactccatcaccgtgggaatggtgcgtcatcagggcaagatcatgtacgtgggcgacgtgcggagcgtgacacagaagcatatccaggagtggggccctttcgacctggtgatcggcggcagcccttgcaatgacctgagcatcgtgaacccagcccggaagggcctgtacgagggaaccggcagactgttcttcgagttttacagactgctgcacgacgcccggcctaaggaaggcgacgaccggcccttcttttggctgttcgagaatgtggtggccatgggagtcagcgacaagcgggatattagccggttcctggagagcaaccccgtgatgatcgatgccaaggaagtgagcgccgcccaccgggccagatacttctggggcaatctgcctggcatgaacagacccctggccagcaccgtgaacgacaagctggagctgcaggagtgcctggagcacggccggatcgccaagttcagcaaggtgagaaccatcaccacccgaagcaacagcatcaaacaaggcaaggaccagcactttcctgtgttcatgaacgagaaggaggacatcctgtggtgtaccgagatggagagagtgttcgggttcccagtccactacacagatgtcagcaacatgtctagactggccagacagagactgctgggaagaagctggtccgtccctgtgatcagacacctgttcgcccctctgaaggagtacttcgcctgcgtgagcagcggcaacagcaacgccaacagccggggccccagcttctctagcggcctggtgccactgtccctgagagggagccacatgggccccatggagatctacaaaaccgtgagcgcctggaagcggcagcctgtgcgcgtgctgagcctgtttcggaatatcgataaagtcctgaaaagcctgggattcctggagagcggctctggctccggcggtggcaccctgaagtacgtggaggatgtgacaaacgtggtcagacgggatgtggagaagtggggccccttcgatctggtgtacggcagcacccaacccctgggcagctcttgtgaccggtgccctggctggtacatgtttcagttccaccggatcctgcagtacgccctgccgagacaggagtcccagcggccattcttttggattttcatggacaacttgctgctgaccgaggatgaccaggaaactaccactcggttcctgcagaccgaagccgtgaccctgcaggacgtgagaggccgggactaccagaacgccatgcgggtgtggtccaacatccctggactgaaaagcaagcacgcacctctgacccctaaagaagaggagtacctgcaggcccaggtgcggagcagaagcaagctggacgcccctaaggtggatctgctggtgaagaattgcctcctgcccctgagagagtacttcaagtatttcagccagaatagtctgcccctgggaggcagcggcggcggcgccctggtgacatttgaggacgtcgccgtgcggttcacccaggaggaatgggctctgctggatccttctcagaaaatcctgtaccgggacgtgatgagagagacataccggaatctgacctccgtgggcatcaactgggaatgttgggaccttgaagcctgcttcagaagcctgggaagaaacctgagagtgcaggtggtgaagagaaagtgcgagctgaccaacagcggcccctgcgccgagggcggcccaagcagcggcgcccctcctcccagcggcggcagcccagccggctccccaacctctaccgaggagggcacctctgagtccgccacccccgagagcggccctggcacctccaccgagcccagcgagggcagcgcacccggcagccctgccggcagccccacctccacagaggagggaaccagcaccgagcccagcgaaggcagcgccccaggcaccagcaccgagcctagtgagcaggagattaaacggatcaacaagatcagaagaagacttgtgaaagacagcaacaccaagaaggccggcaagacaggccccatgaaaaccctgctggttagagtgatgacacccgatctgagagagcggctggaaaacctgagaaagaagcctgaaaatatcccccagcccatcagcaatacatctagagccaacctgaataagctgctgaccgattacaccgaaatgaagaaggcgatcctgcatgtgtactgggaagagttccagaaggaccctgtgggcctgatgagccgggtggcccagcctgccagcaagaagatcgatcagaacaagctgaaacctgagatggacgagaagggcaacctgaccaccgccggctttgcctgctctcagtgtggccagcccctgttcgtgtacaagctggagcaggtgtctgagaagggcaaggcttacaccaactacttcggacggtgcaatgtggccgagcacgaaaagctgatcctgctggcccagctgaagcccgagaaggatagcgacgaagccgtgacatatagcctgggaaagtttgggcagagggccctggatttctacagcattcatgtgaccaaggagtccacccaccccgtgaagcccctggcccagatcgccggaaacagatacgcctccggacctgtgggaaaggccctgagcgacgcatgtatgggcacaatcgcctccttcctgtctaagtaccaggacatcatcatcgaacaccagaaggtggtgaagggcaaccagaagagactggagagcctgcgggagctggccggcaaggaaaacctggaataccctagcgtgaccctgccacctcagcctcacaccaaggagggcgttgatgcctacaacgaagtgatcgcccgggtgcgaatgtgggtgaacctgaacctgtggcagaagctgaagctaagcagagatgatgccaagcctctgctgagactgaagggattcccttcctttcctctggtcgagagacaggccaacgaagtggactggtgggacatggtgtgtaacgtgaagaagctgatcaacgagaaaaaggaggatggcaaggtgttttggcagaatctggctggctacaagagacaggaagccctgagaccatacctgagcagcgaggaagatcggaagaagggaaagaaattcgctcggtaccagctgggcgacctgctgctgcacctggaaaagaagcacggcgaggactggggaaaggtgtacgacgaggcctgggagcggattgacaagaaagtggaaggcctgagcaagcacatcaagctggaagaggaacggagaagcgaggacgcccagagcaaggccgccctgaccgactggctgcgggctaaggccagcttcgtgatcgagggcctgaaggaggccgacaaggacgagttctgcagatgcgagctgaagctgcagaagtggtacggggacctgcggggaaagcccttcgccatcgaagccgagaacagcatcctggacatcagcggcttcagcaagcagtacaactgtgccttcatctggcagaaggacggcgtgaagaagctgaacctgtacctgatcatcaactacttcaagggcggcaagctgcggttcaagaagatcaaacctgaagccttcgaagccaacagattctacaccgtgatcaacaaaaagagcggcgagatcgtgcccatggaggtgaacttcaacttcgacgaccccaacctgatcatcctgcctctggcctttggcaagagacagggcagagaattcatctggaacgacctgctgtccctggaaaccggcagcctgaagctggccaacggaagagtgatcgagaagacactgtacaacagaagaacccggcaggatgagcctgccctgttcgtggccctgaccttcgagcggcgggaggtcctggactcctccaatatcaaaccaatgaacctgatcggcgtggcaagaggcgaaaacatccccgccgtgatcgccctgaccgaccccgagggctgcccactgagccggtttaaggatagcctgggaaacccaacccacatcctgagaatcggcgagagctataaggagaagcagcggaccatccaggccaagaaggaggtggagcagcggagagccggcggctacagccggaagtacgccagcaaagccaagaatctggcagacgatatggtgagaaacaccgctagagatctgctgtactacgccgtgacccaggatgccatgctgatcttcgccaacctgagccggggcttcggccggcagggcaagcggaccttcatggccgagagacagtacacacggatggaggactggctgaccgccaagctggcctacgagggcctgagcaagacctacctgtccaagacactggcccagtacacctccaagacatgcagcaactgtgggtttaccatcaccagcgccgactacgacagggtgctggagaagctgaagaagacagcaacaggctggatgaccacaattaacggcaaggagctgaaggtggagggccagattacctactacaacagatacaagagacagaacgtagtcaaggacctgtccgtcgagctggatagactgagcgaagaatctgtgaacaacgacatctcctcctggacaaagggcagaagcggagaagctctgagcctcctgaagaaaagattctcccatagacccgtgcaggagaagttcgtgtgcctgaactgcggcttcgagacacacgcagccgagcaagccgccctgaacatcgccagatcctggctgttcctgcggagccaggagtacaagaaataccagacaaacaagacaaccggcaacaccgataagagagccttcgtcgagacctggcagtccttttaccggaagaagcttaaggaggtgtggaaacctgccgtgcggtctggcggatctggcggaggctccatgagccagggcagcgtgaccttcagggacgtggccatcgacttcagccaggaggagtggaagtggctgcagcccgcccagagggacctgtacaggtgcgtgatgctggagaactacggccacctggtgagcctgggcctgagcatcagcaagcccgacgtggtgagcctgctggagcagggcaaggagccctggctgggcaagagggacgtgaagagggacctgttccccgtgagcgagagcggcggcccaagcagcggcgcccctcctcccagcggcggcagcccagccggctccccaacctctaccgaggagggcacctctgagtccgccacccccgagagcggccctggcacctccaccgagcccagcgagggcagcgcacccggcagccctgccggcagccccacctccacagaggagggaaccagcaccgagcccagcgaaggcagcgccccaggcaccagcaccgagcctagtgagcaggagattaaacggatcaacaagatcagaagaagacttgtgaaagacagcaacaccaagaaggccggcaagacaggccccatgaaaaccctgctggttagagtgatgacacccgatctgagagagcggctggaaaacctgagaaagaagcctgaaaatatcccccagcccatcagcaatacatctagagccaacctgaataagctgctgaccgattacaccgaaatgaagaaggcgatcctgcatgtgtactgggaagagttccagaaggaccctgtgggcctgatgagccgggtggcccagcctgccagcaagaagatcgatcagaacaagctgaaacctgagatggacgagaagggcaacctgaccaccgccggctttgcctgctctcagtgtggccagcccctgttcgtgtacaagctggagcaggtgtctgagaagggcaaggcttacaccaactacttcggacggtgcaatgtggccgagcacgaaaagctgatcctgctggcccagctgaagcccgagaaggatagcgacgaagccgtgacatatagcctgggaaagtttgggcagagggccctggatttctacagcattcatgtgaccaaggagtccacccaccccgtgaagcccctggcccagatcgccggaaacagatacgcctccggacctgtgggaaaggccctgagcgacgcatgtatgggcacaatcgcctccttcctgtctaagtaccaggacatcatcatcgaacaccagaaggtggtgaagggcaaccagaagagactggagagcctgcgggagctggccggcaaggaaaacctggaataccctagcgtgaccctgccacctcagcctcacaccaaggagggcgttgatgcctacaacgaagtgatcgcccgggtgcgaatgtgggtgaacctgaacctgtggcagaagctgaagctaagcagagatgatgccaagcctctgctgagactgaagggattcccttcctttcctctggtcgagagacaggccaacgaagtggactggtgggacatggtgtgtaacgtgaagaagctgatcaacgagaaaaaggaggatggcaaggtgttttggcagaatctggctggctacaagagacaggaagccctgagaccatacctgagcagcgaggaagatcggaagaagggaaagaaattcgctcggtaccagctgggcgacctgctgctgcacctggaaaagaagcacggcgaggactggggaaaggtgtacgacgaggcctgggagcggattgacaagaaagtggaaggcctgagcaagcacatcaagctggaagaggaacggagaagcgaggacgcccagagcaaggccgccctgaccgactggctgcgggctaaggccagcttcgtgatcgagggcctgaaggaggccgacaaggacgagttctgcagatgcgagctgaagctgcagaagtggtacggggacctgcggggaaagcccttcgccatcgaagccgagaacagcatcctggacatcagcggcttcagcaagcagtacaactgtgccttcatctggcagaaggacggcgtgaagaagctgaacctgtacctgatcatcaactacttcaagggcggcaagctgcggttcaagaagatcaaacctgaagccttcgaagccaacagattctacaccgtgatcaacaaaaagagcggcgagatcgtgcccatggaggtgaacttcaacttcgacgaccccaacctgatcatcctgcctctggcctttggcaagagacagggcagagaattcatctggaacgacctgctgtccctggaaaccggcagcctgaagctggccaacggaagagtgatcgagaagacactgtacaacagaagaacccggcaggatgagcctgccctgttcgtggccctgaccttcgagcggcgggaggtcctggactcctccaatatcaaaccaatgaacctgatcggcgtggcaagaggcgaaaacatccccgccgtgatcgccctgaccgaccccgagggctgcccactgagccggtttaaggatagcctgggaaacccaacccacatcctgagaatcggcgagagctataaggagaagcagcggaccatccaggccaagaaggaggtggagcagcggagagccggcggctacagccggaagtacgccagcaaagccaagaatctggcagacgatatggtgagaaacaccgctagagatctgctgtactacgccgtgacccaggatgccatgctgatcttcgccaacctgagccggggcttcggccggcagggcaagcggaccttcatggccgagagacagtacacacggatggaggactggctgaccgccaagctggcctacgagggcctgagcaagacctacctgtccaagacactggcccagtacacctccaagacatgcagcaactgtgggtttaccatcaccagcgccgactacgacagggtgctggagaagctgaagaagacagcaacaggctggatgaccacaattaacggcaaggagctgaaggtggagggccagattacctactacaacagatacaagagacagaacgtagtcaaggacctgtccgtcgagctggatagactgagcgaagaatctgtgaacaacgacatctcctcctggacaaagggcagaagcggagaagctctgagcctcctgaagaaaagattctcccatagacccgtgcaggagaagttcgtgtgcctgaactgcggcttcgagacacacgcagccgagcaagccgccctgaacatcgccagatcctggctgttcctgcggagccaggagtacaagaaataccagacaaacaagacaaccggcaacaccgataagagagccttcgtcgagacctggcagtccttttaccggaagaagcttaaggaggtgtggaaacctgccgtgcggtctggcggatctggcggaggctcctatgagccagggcagcgtgaccttcagggacgtggccatcgacttcagccaggaggagtggaagtggctgcagcccgcccagagggacctgtacaggtgcgtgatgctggagaactacggccacctggtgagcctgggcctgagcatcagcaagcccgacgtggtgagcctgctggagcagggcaaggagccctggctgggcaagagggacgtgaagagggacctgttccccgtgagcgagagcggatctggctccggcagcggccccaagaaaaagagaaaagtctaagctgccttctgcggggcttgccttctggccatgcccttcttctctcccttgcacctgtacctcttggtctttgaataaagcctgagtaggaaggctagcaaaaaaaaaaaaaaaaaaaaaaaaaaaaaaaaaaaaaaaaaaaaaaaaaaaaaaaaaaaaaaaaaaaaaaaaaaaaaaaa

SEQ ID NO: 16195 - RNA, 9485 nt, synthetic construct
  source 1..9485: mol_type = other RNA
aggaaataagagagaaaagaagagtaagaagaaatataagagccaccatggcccctaagaagaagcgtaaagtgagccggatggaacgcctcgtctacgaggtgcggcagaagtgcagaaacatcgaggacatctgcatctcctgcggatctctgaacgtgaccctggagcacccactgttcatcggcggcatgtgccagaactgtaaaaactgttttctggagtgtgcctatcaatacgacgatgacggctaccagagctactgcaccatctgttgcggcggaagagaggtgctgatgtgtggaaataacaactgctgccggtgcttctgcgtggaatgcgtggacctgctggtgggccccggcgccgcccaggccgctattaaggaagatccttggaactgctacatgtgcggccacaagggcacatacggcctgctgagacggagagaggactggcctagcagactgcagatgttcttcgccaataaccacgaccaggagttcgacccccctaaggtgtaccctcccgtccccgccgagaagagaaagcccatccgggtcctgagcctgttcgatggcatcgccaccggtctgctggtgctgaaggacctgggcatccaggtggataggtacattgcctccgaggtgtgcgaggactccatcaccgtgggaatggtgcgtcatcagggcaagatcatgtacgtgggcgacgtgcggagcgtgacacagaagcatatccaggagtggggccctttcgacctggtgatcggcggcagcccttgcaatgacctgagcatcgtgaacccagcccggaagggcctgtacgagggaaccggcagactgttcttcgagttttacagactgctgcacgacgcccggcctaaggaaggcgacgaccggcccttcttttggctgttcgagaatgtggtggccatgggagtcagcgacaagcgggatattagccggttcctggagagcaaccccgtgatgatcgatgccaaggaagtgagcgccgcccaccgggccagatacttctggggcaatctgcctggcatgaacagacccctggccagcaccgtgaacgacaagctggagctgcaggagtgcctggagcacggccggatcgccaagttcagcaaggtgagaaccatcaccacccgaagcaacagcatcaaacaaggcaaggaccagcactttcctgtgttcatgaacgagaaggaggacatcctgtggtgtaccgagatggagagagtgttcgggttcccagtccactacacagatgtcagcaacatgtctagactggccagacagagactgctgggaagaagctggtccgtccctgtgatcagacacctgttcgcccctctgaaggagtacttcgcctgcgtgagcagcggcaacagcaacgccaacagccggggccccagcttctctagcggcctggtgccactgtccctgagagggagccacatgggccccatggagatctacaaaaccgtgagcgcctggaagcggcagcctgtgcgcgtgctgagcctgtttcggaatatcgataaagtcctgaaaagcctgggattcctggagagcggctctggctccggcggtggcaccctgaagtacgtggaggatgtgacaaacgtggtcagacgggatgtggagaagtggggccccttcgatctggtgtacggcagcacccaacccctgggcagctcttgtgaccggtgccctggctggtacatgtttcagttccaccggatcctgcagtacgccctgccgagacaggagtcccagcggccattcttttggattttcatggacaacttgctgctgaccgaggatgaccaggaaactaccactcggttcctgcagaccgaagccgtgaccctgcaggacgtgagaggccgggactaccagaacgccatgcgggtgtggtccaacatccctggactgaaaagcaagcacgcacctctgacccctaaagaagaggagtacctgcaggcccaggtgcggagcagaagcaagctggacgcccctaaggtggatctgctggtgaagaattgcctcctgcccctgagagagtacttcaagtatttcagccagaatagtctgcccctgggaggcagcggcggcggcgccctggtgacatttgaggacgtcgccgtgcggttcacccaggaggaatgggctctgctggatccttctcagaaaatcctgtaccgggacgtgatgagagagacataccggaatctgacctccgtgggcatcaactgggaatgttgggaccttgaagcctgcttcagaagcctgggaagaaacctgagagtgcaggtggtgaagagaaagtgcgagctgaccaacagcggcccctgcgccgagggcggcccaagcagcggcgcccctcctcccagcggcggcagcccagccggctccccaacctctaccgaggagggcacctctgagtccgccacccccgagagcggccctggcacctccaccgagcccagcgagggcagcgcacccggcagccctgccggcagccccacctccacagaggagggaaccagcaccgagcccagcgaaggcagcgccccaggcaccagcaccgagcctagtgagcaggagattaaacggatcaacaagatcagaagaagacttgtgaaagacagcaacaccaagaaggccggcaagacaggccccatgaaaaccctgctggttagagtgatgacacccgatctgagagagcggctggaaaacctgagaaagaagcctgaaaatatcccccagcccatcagcaatacatctagagccaacctgaataagctgctgaccgattacaccgaaatgaagaaggcgatcctgcatgtgtactgggaagagttccagaaggaccctgtgggcctgatgagccgggtggcccagcctgccagcaagaagatcgatcagaacaagctgaaacctgagatggacgagaagggcaacctgaccaccgccggctttgcctgctctcagtgtggccagcccctgttcgtgtacaagctggagcaggtgtctgagaagggcaaggcttacaccaactacttcggacggtgcaatgtggccgagcacgaaaagctgatcctgctggcccagctgaagcccgagaaggatagcgacgaagccgtgacatatagcctgggaaagtttgggcagagggccctggatttctacagcattcatgtgaccaaggagtccacccaccccgtgaagcccctggcccagatcgccggaaacagatacgcctccggacctgtgggaaaggccctgagcgacgcatgtatgggcacaatcgcctccttcctgtctaagtaccaggacatcatcatcgaacaccagaaggtggtgaagggcaaccagaagagactggagagcctgcgggagctggccggcaaggaaaacctggaataccctagcgtgaccctgccacctcagcctcacaccaaggagggcgttgatgcctacaacgaagtgatcgcccgggtgcgaatgtgggtgaacctgaacctgtggcagaagctgaagctaagcagagatgatgccaagcctctgctgagactgaagggattcccttcctttcctctggtcgagagacaggccaacgaagtggactggtgggacatggtgtgtaacgtgaagaagctgatcaacgagaaaaaggaggatggcaaggtgttttggcagaatctggctggctacaagagacaggaagccctgagaccatacctgagcagcgaggaagatcggaagaagggaaagaaattcgctcggtaccagctgggcgacctgctgctgcacctggaaaagaagcacggcgaggactggggaaaggtgtacgacgaggcctgggagcggattgacaagaaagtggaaggcctgagcaagcacatcaagctggaagaggaacggagaagcgaggacgcccagagcaaggccgccctgaccgactggctgcgggctaaggccagcttcgtgatcgagggcctgaaggaggccgacaaggacgagttctgcagatgcgagctgaagctgcagaagtggtacggggacctgcggggaaagcccttcgccatcgaagccgagaacagcatcctggacatcagcggcttcagcaagcagtacaactgtgccttcatctggcagaaggacggcgtgaagaagctgaacctgtacctgatcatcaactacttcaagggcggcaagctgcggttcaagaagatcaaacctgaagccttcgaagccaacagattctacaccgtgatcaacaaaaagagcggcgagatcgtgcccatggaggtgaacttcaacttcgacgaccccaacctgatcatcctgcctctggcctttggcaagagacagggcagagaattcatctggaacgacctgctgtccctggaaaccggcagcctgaagctggccaacggaagagtgatcgagaagacactgtacaacagaagaacccggcaggatgagcctgccctgttcgtggccctgaccttcgagcggcgggaggtcctggactcctccaatatcaaaccaatgaacctgatcggcgtggcaagaggcgaaaacatccccgccgtgatcgccctgaccgaccccgagggctgcccactgagccggtttaaggatagcctgggaaacccaacccacatcctgagaatcggcgagagctataaggagaagcagcggaccatccaggccaagaaggaggtggagcagcggagagccggcggctacagccggaagtacgccagcaaagccaagaatctggcagacgatatggtgagaaacaccgctagagatctgctgtactacgccgtgacccaggatgccatgctgatcttcgccaacctgagccggggcttcggccggcagggcaagcggaccttcatggccgagagacagtacacacggatggaggactggctgaccgccaagctggcctacgagggcctgagcaagacctacctgtccaagacactggcccagtacacctccaagacatgcagcaactgtgggtttaccatcaccagcgccgactacgacagggtgctggagaagctgaagaagacagcaacaggctggatgaccacaattaacggcaaggagctgaaggtggagggccagattacctactacaacagatacaagagacagaacgtagtcaaggacctgtccgtcgagctggatagactgagcgaagaatctgtgaacaacgacatctcctcctggacaaagggcagaagcggagaagctctgagcctcctgaagaaaagattctcccatagacccgtgcaggagaagttcgtgtgcctgaactgcggcttcgagacacacgcagccgagcaagccgccctgaacatcgccagatcctggctgttcctgcggagccaggagtacaagaaataccagacaaacaagacaaccggcaacaccgataagagagccttcgtcgagacctggcagtccttttaccggaagaagcttaaggaggtgtggaaacctgccgtgcggtctggcggatctggcggaggctccgtggccttcgaggacgtggccgtgaacttcacccaggaggagtgggccctgctggaccccagccagaagaacctgtacagggaggtgatgcaggagaccctgaggaacctggccagcatcggccagaggtggagcaaccagaacgccgaggacaagcaccagaaccccaggaggaacctgaggaggctgatcggcgagaggctgttccagagcaaggagagccaccagcacgtggaggtgctgggcggcccaagcagcggcgcccctcctcccagcggcggcagcccagccggctccccaacctctaccgaggagggcacctctgagtccgccacccccgagagcggccctggcacctccaccgagcccagcgagggcagcgcacccggcagccctgccggcagccccacctccacagaggagggaaccagcaccgagcccagcgaaggcagcgccccaggcaccagcaccgagcctagtgagcaggagattaaacggatcaacaagatcagaagaagacttgtgaaagacagcaacaccaagaaggccggcaagacaggccccatgaaaaccctgctggttagagtgatgacacccgatctgagagagcggctggaaaacctgagaaagaagcctgaaaatatcccccagcccatcagcaatacatctagagccaacctgaataagctgctgaccgattacaccgaaatgaagaaggcgatcctgcatgtgtactgggaagagttccagaaggaccctgtgggcctgatgagccgggtggcccagcctgccagcaagaagatcgatcagaacaagctgaaacctgagatggacgagaagggcaacctgaccaccgccggctttgcctgctctcagtgtggccagcccctgttcgtgtacaagctggagcaggtgtctgagaagggcaaggcttacaccaactacttcggacggtgcaatgtggccgagcacgaaaagctgatcctgctggcccagctgaagcccgagaaggatagcgacgaagccgtgacatatagcctgggaaagtttgggcagagggccctggatttctacagcattcatgtgaccaaggagtccacccaccccgtgaagcccctggcccagatcgccggaaacagatacgcctccggacctgtgggaaaggccctgagcgacgcatgtatgggcacaatcgcctccttcctgtctaagtaccaggacatcatcatcgaacaccagaaggtggtgaagggcaaccagaagagactggagagcctgcgggagctggccggcaaggaaaacctggaataccctagcgtgaccctgccacctcagcctcacaccaaggagggcgttgatgcctacaacgaagtgatcgcccgggtgcgaatgtgggtgaacctgaacctgtggcagaagctgaagctaagcagagatgatgccaagcctctgctgagactgaagggattcccttcctttcctctggtcgagagacaggccaacgaagtggactggtgggacatggtgtgtaacgtgaagaagctgatcaacgagaaaaaggaggatggcaaggtgttttggcagaatctggctggctacaagagacaggaagccctgagaccatacctgagcagcgaggaagatcggaagaagggaaagaaattcgctcggtaccagctgggcgacctgctgctgcacctggaaaagaagcacggcgaggactggggaaaggtgtacgacgaggcctgggagcggattgacaagaaagtggaaggcctgagcaagcacatcaagctggaagaggaacggagaagcgaggacgcccagagcaaggccgccctgaccgactggctgcgggctaaggccagcttcgtgatcgagggcctgaaggaggccgacaaggacgagttctgcagatgcgagctgaagctgcagaagtggtacggggacctgcggggaaagcccttcgccatcgaagccgagaacagcatcctggacatcagcggcttcagcaagcagtacaactgtgccttcatctggcagaaggacggcgtgaagaagctgaacctgtacctgatcatcaactacttcaagggcggcaagctgcggttcaagaagatcaaacctgaagccttcgaagccaacagattctacaccgtgatcaacaaaaagagcggcgagatcgtgcccatggaggtgaacttcaacttcgacgaccccaacctgatcatcctgcctctggcctttggcaagagacagggcagagaattcatctggaacgacctgctgtccctggaaaccggcagcctgaagctggccaacggaagagtgatcgagaagacactgtacaacagaagaacccggcaggatgagcctgccctgttcgtggccctgaccttcgagcggcgggaggtcctggactcctccaatatcaaaccaatgaacctgatcggcgtggcaagaggcgaaaacatccccgccgtgatcgccctgaccgaccccgagggctgcccactgagccggtttaaggatagcctgggaaacccaacccacatcctgagaatcggcgagagctataaggagaagcagcggaccatccaggccaagaaggaggtggagcagcggagagccggcggctacagccggaagtacgccagcaaagccaagaatctggcagacgatatggtgagaaacaccgctagagatctgctgtactacgccgtgacccaggatgccatgctgatcttcgccaacctgagccggggcttcggccggcagggcaagcggaccttcatggccgagagacagtacacacggatggaggactggctgaccgccaagctggcctacgagggcctgagcaagacctacctgtccaagacactggcccagtacacctccaagacatgcagcaactgtgggtttaccatcaccagcgccgactacgacagggtgctggagaagctgaagaagacagcaacaggctggatgaccacaattaacggcaaggagctgaaggtggagggccagattacctactacaacagatacaagagacagaacgtagtcaaggacctgtccgtcgagctggatagactgagcgaagaatctgtgaacaacgacatctcctcctggacaaagggcagaagcggagaagctctgagcctcctgaagaaaagattctcccatagacccgtgcaggagaagttcgtgtgcctgaactgcggcttcgagacacacgcagccgagcaagccgccctgaacatcgccagatcctggctgttcctgcggagccaggagtacaagaaataccagacaaacaagacaaccggcaacaccgataagagagccttcgtcgagacctggcagtccttttaccggaagaagcttaaggaggtgtggaaacctgccgtgcggtctggcggatctggcggaggctcctgtggccttcgaggacgtggccgtgaacttcacccaggaggagtgggccctgctggaccccagccagaagaacctgtacagggaggtgatgcaggagaccctgaggaacctggccagcatcggccagaggtggagcaaccagaacgccgaggacaagcaccagaaccccaggaggaacctgaggaggctgatcggcgagaggctgttccagagcaaggagagccaccagcacgtggaggtgctgggatctggctccggcagcggccccaagaaaaagagaaaagtctaagctgccttctgcggggcttgccttctggccatgcccttcttctctcccttgcacctgtacctcttggtctttgaataaagcctgagtaggaaggctagcaaaaaaaaaaaaaaaaaaaaaaaaaaaaaaaaaaaaaaaaaaaaaaaaaaaaaaaaaaaaaaaaaaaaaaaaaaaaaaaa

SEQ ID NO: 16196 - RNA, 9485 nt, synthetic construct
  source 1..9485: mol_type = other RNA
aggaaataagagagaaaagaagagtaagaagaaatataagagccaccatggcccctaagaagaagcgtaaagtgagccggatggaacgcctcgtctacgaggtgcggcagaagtgcagaaacatcgaggacatctgcatctcctgcggatctctgaacgtgaccctggagcacccactgttcatcggcggcatgtgccagaactgtaaaaactgttttctggagtgtgcctatcaatacgacgatgacggctaccagagctactgcaccatctgttgcggcggaagagaggtgctgatgtgtggaaataacaactgctgccggtgcttctgcgtggaatgcgtggacctgctggtgggccccggcgccgcccaggccgctattaaggaagatccttggaactgctacatgtgcggccacaagggcacatacggcctgctgagacggagagaggactggcctagcagactgcagatgttcttcgccaataaccacgaccaggagttcgacccccctaaggtgtaccctcccgtccccgccgagaagagaaagcccatccgggtcctgagcctgttcgatggcatcgccaccggtctgctggtgctgaaggacctgggcatccaggtggataggtacattgcctccgaggtgtgcgaggactccatcaccgtgggaatggtgcgtcatcagggcaagatcatgtacgtgggcgacgtgcggagcgtgacacagaagcatatccaggagtggggccctttcgacctggtgatcggcggcagcccttgcaatgacctgagcatcgtgaacccagcccggaagggcctgtacgagggaaccggcagactgttcttcgagttttacagactgctgcacgacgcccggcctaaggaaggcgacgaccggcccttcttttggctgttcgagaatgtggtggccatgggagtcagcgacaagcgggatattagccggttcctggagagcaaccccgtgatgatcgatgccaaggaagtgagcgccgcccaccgggccagatacttctggggcaatctgcctggcatgaacagacccctggccagcaccgtgaacgacaagctggagctgcaggagtgcctggagcacggccggatcgccaagttcagcaaggtgagaaccatcaccacccgaagcaacagcatcaaacaaggcaaggaccagcactttcctgtgttcatgaacgagaaggaggacatcctgtggtgtaccgagatggagagagtgttcgggttcccagtccactacacagatgtcagcaacatgtctagactggccagacagagactgctgggaagaagctggtccgtccctgtgatcagacacctgttcgcccctctgaaggagtacttcgcctgcgtgagcagcggcaacagcaacgccaacagccggggccccagcttctctagcggcctggtgccactgtccctgagagggagccacatgggccccatggagatctacaaaaccgtgagcgcctggaagcggcagcctgtgcgcgtgctgagcctgtttcggaatatcgataaagtcctgaaaagcctgggattcctggagagcggctctggctccggcggtggcaccctgaagtacgtggaggatgtgacaaacgtggtcagacgggatgtggagaagtggggccccttcgatctggtgtacggcagcacccaacccctgggcagctcttgtgaccggtgccctggctggtacatgtttcagttccaccggatcctgcagtacgccctgccgagacaggagtcccagcggccattcttttggattttcatggacaacttgctgctgaccgaggatgaccaggaaactaccactcggttcctgcagaccgaagccgtgaccctgcaggacgtgagaggccgggactaccagaacgccatgcgggtgtggtccaacatccctggactgaaaagcaagcacgcacctctgacccctaaagaagaggagtacctgcaggcccaggtgcggagcagaagcaagctggacgcccctaaggtggatctgctggtgaagaattgcctcctgcccctgagagagtacttcaagtatttcagccagaatagtctgcccctgggaggcagcggcggcggcgccctggtgacatttgaggacgtcgccgtgcggttcacccaggaggaatgggctctgctggatccttctcagaaaatcctgtaccgggacgtgatgagagagacataccggaatctgacctccgtgggcatcaactgggaatgttgggaccttgaagcctgcttcagaagcctgggaagaaacctgagagtgcaggtggtgaagagaaagtgcgagctgaccaacagcggcccctgcgccgagggcggcccaagcagcggcgcccctcctcccagcggcggcagcccagccggctccccaacctctaccgaggagggcacctctgagtccgccacccccgagagcggccctggcacctccaccgagcccagcgagggcagcgcacccggcagccctgccggcagccccacctccacagaggagggaaccagcaccgagcccagcgaaggcagcgccccaggcaccagcaccgagcctagtgagcaggagattaaacggatcaacaagatcagaagaagacttgtgaaagacagcaacaccaagaaggccggcaagacaggccccatgaaaaccctgctggttagagtgatgacacccgatctgagagagcggctggaaaacctgagaaagaagcctgaaaatatcccccagcccatcagcaatacatctagagccaacctgaataagctgctgaccgattacaccgaaatgaagaaggcgatcctgcatgtgtactgggaagagttccagaaggaccctgtgggcctgatgagccgggtggcccagcctgccagcaagaagatcgatcagaacaagctgaaacctgagatggacgagaagggcaacctgaccaccgccggctttgcctgctctcagtgtggccagcccctgttcgtgtacaagctggagcaggtgtctgagaagggcaaggcttacaccaactacttcggacggtgcaatgtggccgagcacgaaaagctgatcctgctggcccagctgaagcccgagaaggatagcgacgaagccgtgacatatagcctgggaaagtttgggcagagggccctggatttctacagcattcatgtgaccaaggagtccacccaccccgtgaagcccctggcccagatcgccggaaacagatacgcctccggacctgtgggaaaggccctgagcgacgcatgtatgggcacaatcgcctccttcctgtctaagtaccaggacatcatcatcgaacaccagaaggtggtgaagggcaaccagaagagactggagagcctgcgggagctggccggcaaggaaaacctggaataccctagcgtgaccctgccacctcagcctcacaccaaggagggcgttgatgcctacaacgaagtgatcgcccgggtgcgaatgtgggtgaacctgaacctgtggcagaagctgaagctaagcagagatgatgccaagcctctgctgagactgaagggattcccttcctttcctctggtcgagagacaggccaacgaagtggactggtgggacatggtgtgtaacgtgaagaagctgatcaacgagaaaaaggaggatggcaaggtgttttggcagaatctggctggctacaagagacaggaagccctgagaccatacctgagcagcgaggaagatcggaagaagggaaagaaattcgctcggtaccagctgggcgacctgctgctgcacctggaaaagaagcacggcgaggactggggaaaggtgtacgacgaggcctgggagcggattgacaagaaagtggaaggcctgagcaagcacatcaagctggaagaggaacggagaagcgaggacgcccagagcaaggccgccctgaccgactggctgcgggctaaggccagcttcgtgatcgagggcctgaaggaggccgacaaggacgagttctgcagatgcgagctgaagctgcagaagtggtacggggacctgcggggaaagcccttcgccatcgaagccgagaacagcatcctggacatcagcggcttcagcaagcagtacaactgtgccttcatctggcagaaggacggcgtgaagaagctgaacctgtacctgatcatcaactacttcaagggcggcaagctgcggttcaagaagatcaaacctgaagccttcgaagccaacagattctacaccgtgatcaacaaaaagagcggcgagatcgtgcccatggaggtgaacttcaacttcgacgaccccaacctgatcatcctgcctctggcctttggcaagagacagggcagagaattcatctggaacgacctgctgtccctggaaaccggcagcctgaagctggccaacggaagagtgatcgagaagacactgtacaacagaagaacccggcaggatgagcctgccctgttcgtggccctgaccttcgagcggcgggaggtcctggactcctccaatatcaaaccaatgaacctgatcggcgtggcaagaggcgaaaacatccccgccgtgatcgccctgaccgaccccgagggctgcccactgagccggtttaaggatagcctgggaaacccaacccacatcctgagaatcggcgagagctataaggagaagcagcggaccatccaggccaagaaggaggtggagcagcggagagccggcggctacagccggaagtacgccagcaaagccaagaatctggcagacgatatggtgagaaacaccgctagagatctgctgtactacgccgtgacccaggatgccatgctgatcttcgccaacctgagccggggcttcggccggcagggcaagcggaccttcatggccgagagacagtacacacggatggaggactggctgaccgccaagctggcctacgagggcctgagcaagacctacctgtccaagacactggcccagtacacctccaagacatgcagcaactgtgggtttaccatcaccagcgccgactacgacagggtgctggagaagctgaagaagacagcaacaggctggatgaccacaattaacggcaaggagctgaaggtggagggccagattacctactacaacagatacaagagacagaacgtagtcaaggacctgtccgtcgagctggatagactgagcgaagaatctgtgaacaacgacatctcctcctggacaaagggcagaagcggagaagctctgagcctcctgaagaaaagattctcccatagacccgtgcaggagaagttcgtgtgcctgaactgcggcttcgagacacacgcagccgagcaagccgccctgaacatcgccagatcctggctgttcctgcggagccaggagtacaagaaataccagacaaacaagacaaccggcaacaccgataagagagccttcgtcgagacctggcagtccttttaccggaagaagcttaaggaggtgtggaaacctgccgtgcggtctggcggatctggcggaggctccgtggaggagcccgtgaccttcaaggacgtggccgtggccttcacccaggaggagtggggccagctggacctggtgcagaggaccctgtacagggacgtgatgctggagacctacggccacctgctgagcgtgggcaaccagatcgccaagcccgaggtgatcagcctgctggagcagggcgaggagccctggagcgtggagcagggctaccccaagagcagctgccccgagtggatgaggaacggcggcccaagcagcggcgcccctcctcccagcggcggcagcccagccggctccccaacctctaccgaggagggcacctctgagtccgccacccccgagagcggccctggcacctccaccgagcccagcgagggcagcgcacccggcagccctgccggcagccccacctccacagaggagggaaccagcaccgagcccagcgaaggcagcgccccaggcaccagcaccgagcctagtgagcaggagattaaacggatcaacaagatcagaagaagacttgtgaaagacagcaacaccaagaaggccggcaagacaggccccatgaaaaccctgctggttagagtgatgacacccgatctgagagagcggctggaaaacctgagaaagaagcctgaaaatatcccccagcccatcagcaatacatctagagccaacctgaataagctgctgaccgattacaccgaaatgaagaaggcgatcctgcatgtgtactgggaagagttccagaaggaccctgtgggcctgatgagccgggtggcccagcctgccagcaagaagatcgatcagaacaagctgaaacctgagatggacgagaagggcaacctgaccaccgccggctttgcctgctctcagtgtggccagcccctgttcgtgtacaagctggagcaggtgtctgagaagggcaaggcttacaccaactacttcggacggtgcaatgtggccgagcacgaaaagctgatcctgctggcccagctgaagcccgagaaggatagcgacgaagccgtgacatatagcctgggaaagtttgggcagagggccctggatttctacagcattcatgtgaccaaggagtccacccaccccgtgaagcccctggcccagatcgccggaaacagatacgcctccggacctgtgggaaaggccctgagcgacgcatgtatgggcacaatcgcctccttcctgtctaagtaccaggacatcatcatcgaacaccagaaggtggtgaagggcaaccagaagagactggagagcctgcgggagctggccggcaaggaaaacctggaataccctagcgtgaccctgccacctcagcctcacaccaaggagggcgttgatgcctacaacgaagtgatcgcccgggtgcgaatgtgggtgaacctgaacctgtggcagaagctgaagctaagcagagatgatgccaagcctctgctgagactgaagggattcccttcctttcctctggtcgagagacaggccaacgaagtggactggtgggacatggtgtgtaacgtgaagaagctgatcaacgagaaaaaggaggatggcaaggtgttttggcagaatctggctggctacaagagacaggaagccctgagaccatacctgagcagcgaggaagatcggaagaagggaaagaaattcgctcggtaccagctgggcgacctgctgctgcacctggaaaagaagcacggcgaggactggggaaaggtgtacgacgaggcctgggagcggattgacaagaaagtggaaggcctgagcaagcacatcaagctggaagaggaacggagaagcgaggacgcccagagcaaggccgccctgaccgactggctgcgggctaaggccagcttcgtgatcgagggcctgaaggaggccgacaaggacgagttctgcagatgcgagctgaagctgcagaagtggtacggggacctgcggggaaagcccttcgccatcgaagccgagaacagcatcctggacatcagcggcttcagcaagcagtacaactgtgccttcatctggcagaaggacggcgtgaagaagctgaacctgtacctgatcatcaactacttcaagggcggcaagctgcggttcaagaagatcaaacctgaagccttcgaagccaacagattctacaccgtgatcaacaaaaagagcggcgagatcgtgcccatggaggtgaacttcaacttcgacgaccccaacctgatcatcctgcctctggcctttggcaagagacagggcagagaattcatctggaacgacctgctgtccctggaaaccggcagcctgaagctggccaacggaagagtgatcgagaagacactgtacaacagaagaacccggcaggatgagcctgccctgttcgtggccctgaccttcgagcggcgggaggtcctggactcctccaatatcaaaccaatgaacctgatcggcgtggcaagaggcgaaaacatccccgccgtgatcgccctgaccgaccccgagggctgcccactgagccggtttaaggatagcctgggaaacccaacccacatcctgagaatcggcgagagctataaggagaagcagcggaccatccaggccaagaaggaggtggagcagcggagagccggcggctacagccggaagtacgccagcaaagccaagaatctggcagacgatatggtgagaaacaccgctagagatctgctgtactacgccgtgacccaggatgccatgctgatcttcgccaacctgagccggggcttcggccggcagggcaagcggaccttcatggccgagagacagtacacacggatggaggactggctgaccgccaagctggcctacgagggcctgagcaagacctacctgtccaagacactggcccagtacacctccaagacatgcagcaactgtgggtttaccatcaccagcgccgactacgacagggtgctggagaagctgaagaagacagcaacaggctggatgaccacaattaacggcaaggagctgaaggtggagggccagattacctactacaacagatacaagagacagaacgtagtcaaggacctgtccgtcgagctggatagactgagcgaagaatctgtgaacaacgacatctcctcctggacaaagggcagaagcggagaagctctgagcctcctgaagaaaagattctcccatagacccgtgcaggagaagttcgtgtgcctgaactgcggcttcgagacacacgcagccgagcaagccgccctgaacatcgccagatcctggctgttcctgcggagccaggagtacaagaaataccagacaaacaagacaaccggcaacaccgataagagagccttcgtcgagacctggcagtccttttaccggaagaagcttaaggaggtgtggaaacctgccgtgcggtctggcggatctggcggaggctcctgtggaggagcccgtgaccttcaaggacgtggccgtggccttcacccaggaggagtggggccagctggacctggtgcagaggaccctgtacagggacgtgatgctggagacctacggccacctgctgagcgtgggcaaccagatcgccaagcccgaggtgatcagcctgctggagcagggcgaggagccctggagcgtggagcagggctaccccaagagcagctgccccgagtggatgaggaacggatctggctccggcagcggccccaagaaaaagagaaaagtctaagctgccttctgcggggcttgccttctggccatgcccttcttctctcccttgcacctgtacctcttggtctttgaataaagcctgagtaggaaggctagcaaaaaaaaaaaaaaaaaaaaaaaaaaaaaaaaaaaaaaaaaaaaaaaaaaaaaaaaaaaaaaaaaaaaaaaaaaaaaaaa

SEQ ID NO: 16197 - RNA, 9485 nt, synthetic construct
  source 1..9485: mol_type = other RNA
aggaaataagagagaaaagaagagtaagaagaaatataagagccaccatggcccctaagaagaagcgtaaagtgagccggatggaacgcctcgtctacgaggtgcggcagaagtgcagaaacatcgaggacatctgcatctcctgcggatctctgaacgtgaccctggagcacccactgttcatcggcggcatgtgccagaactgtaaaaactgttttctggagtgtgcctatcaatacgacgatgacggctaccagagctactgcaccatctgttgcggcggaagagaggtgctgatgtgtggaaataacaactgctgccggtgcttctgcgtggaatgcgtggacctgctggtgggccccggcgccgcccaggccgctattaaggaagatccttggaactgctacatgtgcggccacaagggcacatacggcctgctgagacggagagaggactggcctagcagactgcagatgttcttcgccaataaccacgaccaggagttcgacccccctaaggtgtaccctcccgtccccgccgagaagagaaagcccatccgggtcctgagcctgttcgatggcatcgccaccggtctgctggtgctgaaggacctgggcatccaggtggataggtacattgcctccgaggtgtgcgaggactccatcaccgtgggaatggtgcgtcatcagggcaagatcatgtacgtgggcgacgtgcggagcgtgacacagaagcatatccaggagtggggccctttcgacctggtgatcggcggcagcccttgcaatgacctgagcatcgtgaacccagcccggaagggcctgtacgagggaaccggcagactgttcttcgagttttacagactgctgcacgacgcccggcctaaggaaggcgacgaccggcccttcttttggctgttcgagaatgtggtggccatgggagtcagcgacaagcgggatattagccggttcctggagagcaaccccgtgatgatcgatgccaaggaagtgagcgccgcccaccgggccagatacttctggggcaatctgcctggcatgaacagacccctggccagcaccgtgaacgacaagctggagctgcaggagtgcctggagcacggccggatcgccaagttcagcaaggtgagaaccatcaccacccgaagcaacagcatcaaacaaggcaaggaccagcactttcctgtgttcatgaacgagaaggaggacatcctgtggtgtaccgagatggagagagtgttcgggttcccagtccactacacagatgtcagcaacatgtctagactggccagacagagactgctgggaagaagctggtccgtccctgtgatcagacacctgttcgcccctctgaaggagtacttcgcctgcgtgagcagcggcaacagcaacgccaacagccggggccccagcttctctagcggcctggtgccactgtccctgagagggagccacatgggccccatggagatctacaaaaccgtgagcgcctggaagcggcagcctgtgcgcgtgctgagcctgtttcggaatatcgataaagtcctgaaaagcctgggattcctggagagcggctctggctccggcggtggcaccctgaagtacgtggaggatgtgacaaacgtggtcagacgggatgtggagaagtggggccccttcgatctggtgtacggcagcacccaacccctgggcagctcttgtgaccggtgccctggctggtacatgtttcagttccaccggatcctgcagtacgccctgccgagacaggagtcccagcggccattcttttggattttcatggacaacttgctgctgaccgaggatgaccaggaaactaccactcggttcctgcagaccgaagccgtgaccctgcaggacgtgagaggccgggactaccagaacgccatgcgggtgtggtccaacatccctggactgaaaagcaagcacgcacctctgacccctaaagaagaggagtacctgcaggcccaggtgcggagcagaagcaagctggacgcccctaaggtggatctgctggtgaagaattgcctcctgcccctgagagagtacttcaagtatttcagccagaatagtctgcccctgggaggcagcggcggcggcgccctggtgacatttgaggacgtcgccgtgcggttcacccaggaggaatgggctctgctggatccttctcagaaaatcctgtaccgggacgtgatgagagagacataccggaatctgacctccgtgggcatcaactgggaatgttgggaccttgaagcctgcttcagaagcctgggaagaaacctgagagtgcaggtggtgaagagaaagtgcgagctgaccaacagcggcccctgcgccgagggcggcccaagcagcggcgcccctcctcccagcggcggcagcccagccggctccccaacctctaccgaggagggcacctctgagtccgccacccccgagagcggccctggcacctccaccgagcccagcgagggcagcgcacccggcagccctgccggcagccccacctccacagaggagggaaccagcaccgagcccagcgaaggcagcgccccaggcaccagcaccgagcctagtgagcaggagattaaacggatcaacaagatcagaagaagacttgtgaaagacagcaacaccaagaaggccggcaagacaggccccatgaaaaccctgctggttagagtgatgacacccgatctgagagagcggctggaaaacctgagaaagaagcctgaaaatatcccccagcccatcagcaatacatctagagccaacctgaataagctgctgaccgattacaccgaaatgaagaaggcgatcctgcatgtgtactgggaagagttccagaaggaccctgtgggcctgatgagccgggtggcccagcctgccagcaagaagatcgatcagaacaagctgaaacctgagatggacgagaagggcaacctgaccaccgccggctttgcctgctctcagtgtggccagcccctgttcgtgtacaagctggagcaggtgtctgagaagggcaaggcttacaccaactacttcggacggtgcaatgtggccgagcacgaaaagctgatcctgctggcccagctgaagcccgagaaggatagcgacgaagccgtgacatatagcctgggaaagtttgggcagagggccctggatttctacagcattcatgtgaccaaggagtccacccaccccgtgaagcccctggcccagatcgccggaaacagatacgcctccggacctgtgggaaaggccctgagcgacgcatgtatgggcacaatcgcctccttcctgtctaagtaccaggacatcatcatcgaacaccagaaggtggtgaagggcaaccagaagagactggagagcctgcgggagctggccggcaaggaaaacctggaataccctagcgtgaccctgccacctcagcctcacaccaaggagggcgttgatgcctacaacgaagtgatcgcccgggtgcgaatgtgggtgaacctgaacctgtggcagaagctgaagctaagcagagatgatgccaagcctctgctgagactgaagggattcccttcctttcctctggtcgagagacaggccaacgaagtggactggtgggacatggtgtgtaacgtgaagaagctgatcaacgagaaaaaggaggatggcaaggtgttttggcagaatctggctggctacaagagacaggaagccctgagaccatacctgagcagcgaggaagatcggaagaagggaaagaaattcgctcggtaccagctgggcgacctgctgctgcacctggaaaagaagcacggcgaggactggggaaaggtgtacgacgaggcctgggagcggattgacaagaaagtggaaggcctgagcaagcacatcaagctggaagaggaacggagaagcgaggacgcccagagcaaggccgccctgaccgactggctgcgggctaaggccagcttcgtgatcgagggcctgaaggaggccgacaaggacgagttctgcagatgcgagctgaagctgcagaagtggtacggggacctgcggggaaagcccttcgccatcgaagccgagaacagcatcctggacatcagcggcttcagcaagcagtacaactgtgccttcatctggcagaaggacggcgtgaagaagctgaacctgtacctgatcatcaactacttcaagggcggcaagctgcggttcaagaagatcaaacctgaagccttcgaagccaacagattctacaccgtgatcaacaaaaagagcggcgagatcgtgcccatggaggtgaacttcaacttcgacgaccccaacctgatcatcctgcctctggcctttggcaagagacagggcagagaattcatctggaacgacctgctgtccctggaaaccggcagcctgaagctggccaacggaagagtgatcgagaagacactgtacaacagaagaacccggcaggatgagcctgccctgttcgtggccctgaccttcgagcggcgggaggtcctggactcctccaatatcaaaccaatgaacctgatcggcgtggcaagaggcgaaaacatccccgccgtgatcgccctgaccgaccccgagggctgcccactgagccggtttaaggatagcctgggaaacccaacccacatcctgagaatcggcgagagctataaggagaagcagcggaccatccaggccaagaaggaggtggagcagcggagagccggcggctacagccggaagtacgccagcaaagccaagaatctggcagacgatatggtgagaaacaccgctagagatctgctgtactacgccgtgacccaggatgccatgctgatcttcgccaacctgagccggggcttcggccggcagggcaagcggaccttcatggccgagagacagtacacacggatggaggactggctgaccgccaagctggcctacgagggcctgagcaagacctacctgtccaagacactggcccagtacacctccaagacatgcagcaactgtgggtttaccatcaccagcgccgactacgacagggtgctggagaagctgaagaagacagcaacaggctggatgaccacaattaacggcaaggagctgaaggtggagggccagattacctactacaacagatacaagagacagaacgtagtcaaggacctgtccgtcgagctggatagactgagcgaagaatctgtgaacaacgacatctcctcctggacaaagggcagaagcggagaagctctgagcctcctgaagaaaagattctcccatagacccgtgcaggagaagttcgtgtgcctgaactgcggcttcgagacacacgcagccgagcaagccgccctgaacatcgccagatcctggctgttcctgcggagccaggagtacaagaaataccagacaaacaagacaaccggcaacaccgataagagagccttcgtcgagacctggcagtccttttaccggaagaagcttaaggaggtgtggaaacctgccgtgcggtctggcggatctggcggaggctcctgcgaggtgagcgtgagcttcgaggacgtgaccgtggacttcagcagggaggagtggcagcacctggaccccgcccagaggaggctgtacagggacgtgaccctggagaactacagccacctgtgcagcgtgggctaccaggtgcccaagcccgaggtgatcttcaagctggagcagggcgagggcccctggaccctggaggaggagaccccccaccagagctgcagcgacgaggacatgggcggcggcccaagcagcggcgcccctcctcccagcggcggcagcccagccggctccccaacctctaccgaggagggcacctctgagtccgccacccccgagagcggccctggcacctccaccgagcccagcgagggcagcgcacccggcagccctgccggcagccccacctccacagaggagggaaccagcaccgagcccagcgaaggcagcgccccaggcaccagcaccgagcctagtgagcaggagattaaacggatcaacaagatcagaagaagacttgtgaaagacagcaacaccaagaaggccggcaagacaggccccatgaaaaccctgctggttagagtgatgacacccgatctgagagagcggctggaaaacctgagaaagaagcctgaaaatatcccccagcccatcagcaatacatctagagccaacctgaataagctgctgaccgattacaccgaaatgaagaaggcgatcctgcatgtgtactgggaagagttccagaaggaccctgtgggcctgatgagccgggtggcccagcctgccagcaagaagatcgatcagaacaagctgaaacctgagatggacgagaagggcaacctgaccaccgccggctttgcctgctctcagtgtggccagcccctgttcgtgtacaagctggagcaggtgtctgagaagggcaaggcttacaccaactacttcggacggtgcaatgtggccgagcacgaaaagctgatcctgctggcccagctgaagcccgagaaggatagcgacgaagccgtgacatatagcctgggaaagtttgggcagagggccctggatttctacagcattcatgtgaccaaggagtccacccaccccgtgaagcccctggcccagatcgccggaaacagatacgcctccggacctgtgggaaaggccctgagcgacgcatgtatgggcacaatcgcctccttcctgtctaagtaccaggacatcatcatcgaacaccagaaggtggtgaagggcaaccagaagagactggagagcctgcgggagctggccggcaaggaaaacctggaataccctagcgtgaccctgccacctcagcctcacaccaaggagggcgttgatgcctacaacgaagtgatcgcccgggtgcgaatgtgggtgaacctgaacctgtggcagaagctgaagctaagcagagatgatgccaagcctctgctgagactgaagggattcccttcctttcctctggtcgagagacaggccaacgaagtggactggtgggacatggtgtgtaacgtgaagaagctgatcaacgagaaaaaggaggatggcaaggtgttttggcagaatctggctggctacaagagacaggaagccctgagaccatacctgagcagcgaggaagatcggaagaagggaaagaaattcgctcggtaccagctgggcgacctgctgctgcacctggaaaagaagcacggcgaggactggggaaaggtgtacgacgaggcctgggagcggattgacaagaaagtggaaggcctgagcaagcacatcaagctggaagaggaacggagaagcgaggacgcccagagcaaggccgccctgaccgactggctgcgggctaaggccagcttcgtgatcgagggcctgaaggaggccgacaaggacgagttctgcagatgcgagctgaagctgcagaagtggtacggggacctgcggggaaagcccttcgccatcgaagccgagaacagcatcctggacatcagcggcttcagcaagcagtacaactgtgccttcatctggcagaaggacggcgtgaagaagctgaacctgtacctgatcatcaactacttcaagggcggcaagctgcggttcaagaagatcaaacctgaagccttcgaagccaacagattctacaccgtgatcaacaaaaagagcggcgagatcgtgcccatggaggtgaacttcaacttcgacgaccccaacctgatcatcctgcctctggcctttggcaagagacagggcagagaattcatctggaacgacctgctgtccctggaaaccggcagcctgaagctggccaacggaagagtgatcgagaagacactgtacaacagaagaacccggcaggatgagcctgccctgttcgtggccctgaccttcgagcggcgggaggtcctggactcctccaatatcaaaccaatgaacctgatcggcgtggcaagaggcgaaaacatccccgccgtgatcgccctgaccgaccccgagggctgcccactgagccggtttaaggatagcctgggaaacccaacccacatcctgagaatcggcgagagctataaggagaagcagcggaccatccaggccaagaaggaggtggagcagcggagagccggcggctacagccggaagtacgccagcaaagccaagaatctggcagacgatatggtgagaaacaccgctagagatctgctgtactacgccgtgacccaggatgccatgctgatcttcgccaacctgagccggggcttcggccggcagggcaagcggaccttcatggccgagagacagtacacacggatggaggactggctgaccgccaagctggcctacgagggcctgagcaagacctacctgtccaagacactggcccagtacacctccaagacatgcagcaactgtgggtttaccatcaccagcgccgactacgacagggtgctggagaagctgaagaagacagcaacaggctggatgaccacaattaacggcaaggagctgaaggtggagggccagattacctactacaacagatacaagagacagaacgtagtcaaggacctgtccgtcgagctggatagactgagcgaagaatctgtgaacaacgacatctcctcctggacaaagggcagaagcggagaagctctgagcctcctgaagaaaagattctcccatagacccgtgcaggagaagttcgtgtgcctgaactgcggcttcgagacacacgcagccgagcaagccgccctgaacatcgccagatcctggctgttcctgcggagccaggagtacaagaaataccagacaaacaagacaaccggcaacaccgataagagagccttcgtcgagacctggcagtccttttaccggaagaagcttaaggaggtgtggaaacctgccgtgcggtctggcggatctggcggaggctccttgcgaggtgagcgtgagcttcgaggacgtgaccgtggacttcagcagggaggagtggcagcacctggaccccgcccagaggaggctgtacagggacgtgaccctggagaactacagccacctgtgcagcgtgggctaccaggtgcccaagcccgaggtgatcttcaagctggagcagggcgagggcccctggaccctggaggaggagaccccccaccagagctgcagcgacgaggacatgggcggatctggctccggcagcggccccaagaaaaagagaaaagtctaagctgccttctgcggggcttgccttctggccatgcccttcttctctcccttgcacctgtacctcttggtctttgaataaagcctgagtaggaaggctagcaaaaaaaaaaaaaaaaaaaaaaaaaaaaaaaaaaaaaaaaaaaaaaaaaaaaaaaaaaaaaaaaaaaaaaaaaaaaaaaa

SEQ ID NO: 16198 - RNA, 9485 nt, synthetic construct
  source 1..9485: mol_type = other RNA
aggaaataagagagaaaagaagagtaagaagaaatataagagccaccatggcccctaagaagaagcgtaaagtgagccggatggaacgcctcgtctacgaggtgcggcagaagtgcagaaacatcgaggacatctgcatctcctgcggatctctgaacgtgaccctggagcacccactgttcatcggcggcatgtgccagaactgtaaaaactgttttctggagtgtgcctatcaatacgacgatgacggctaccagagctactgcaccatctgttgcggcggaagagaggtgctgatgtgtggaaataacaactgctgccggtgcttctgcgtggaatgcgtggacctgctggtgggccccggcgccgcccaggccgctattaaggaagatccttggaactgctacatgtgcggccacaagggcacatacggcctgctgagacggagagaggactggcctagcagactgcagatgttcttcgccaataaccacgaccaggagttcgacccccctaaggtgtaccctcccgtccccgccgagaagagaaagcccatccgggtcctgagcctgttcgatggcatcgccaccggtctgctggtgctgaaggacctgggcatccaggtggataggtacattgcctccgaggtgtgcgaggactccatcaccgtgggaatggtgcgtcatcagggcaagatcatgtacgtgggcgacgtgcggagcgtgacacagaagcatatccaggagtggggccctttcgacctggtgatcggcggcagcccttgcaatgacctgagcatcgtgaacccagcccggaagggcctgtacgagggaaccggcagactgttcttcgagttttacagactgctgcacgacgcccggcctaaggaaggcgacgaccggcccttcttttggctgttcgagaatgtggtggccatgggagtcagcgacaagcgggatattagccggttcctggagagcaaccccgtgatgatcgatgccaaggaagtgagcgccgcccaccgggccagatacttctggggcaatctgcctggcatgaacagacccctggccagcaccgtgaacgacaagctggagctgcaggagtgcctggagcacggccggatcgccaagttcagcaaggtgagaaccatcaccacccgaagcaacagcatcaaacaaggcaaggaccagcactttcctgtgttcatgaacgagaaggaggacatcctgtggtgtaccgagatggagagagtgttcgggttcccagtccactacacagatgtcagcaacatgtctagactggccagacagagactgctgggaagaagctggtccgtccctgtgatcagacacctgttcgcccctctgaaggagtacttcgcctgcgtgagcagcggcaacagcaacgccaacagccggggccccagcttctctagcggcctggtgccactgtccctgagagggagccacatgggccccatggagatctacaaaaccgtgagcgcctggaagcggcagcctgtgcgcgtgctgagcctgtttcggaatatcgataaagtcctgaaaagcctgggattcctggagagcggctctggctccggcggtggcaccctgaagtacgtggaggatgtgacaaacgtggtcagacgggatgtggagaagtggggccccttcgatctggtgtacggcagcacccaacccctgggcagctcttgtgaccggtgccctggctggtacatgtttcagttccaccggatcctgcagtacgccctgccgagacaggagtcccagcggccattcttttggattttcatggacaacttgctgctgaccgaggatgaccaggaaactaccactcggttcctgcagaccgaagccgtgaccctgcaggacgtgagaggccgggactaccagaacgccatgcgggtgtggtccaacatccctggactgaaaagcaagcacgcacctctgacccctaaagaagaggagtacctgcaggcccaggtgcggagcagaagcaagctggacgcccctaaggtggatctgctggtgaagaattgcctcctgcccctgagagagtacttcaagtatttcagccagaatagtctgcccctgggaggcagcggcggcggcgccctggtgacatttgaggacgtcgccgtgcggttcacccaggaggaatgggctctgctggatccttctcagaaaatcctgtaccgggacgtgatgagagagacataccggaatctgacctccgtgggcatcaactgggaatgttgggaccttgaagcctgcttcagaagcctgggaagaaacctgagagtgcaggtggtgaagagaaagtgcgagctgaccaacagcggcccctgcgccgagggcggcccaagcagcggcgcccctcctcccagcggcggcagcccagccggctccccaacctctaccgaggagggcacctctgagtccgccacccccgagagcggccctggcacctccaccgagcccagcgagggcagcgcacccggcagccctgccggcagccccacctccacagaggagggaaccagcaccgagcccagcgaaggcagcgccccaggcaccagcaccgagcctagtgagcaggagattaaacggatcaacaagatcagaagaagacttgtgaaagacagcaacaccaagaaggccggcaagacaggccccatgaaaaccctgctggttagagtgatgacacccgatctgagagagcggctggaaaacctgagaaagaagcctgaaaatatcccccagcccatcagcaatacatctagagccaacctgaataagctgctgaccgattacaccgaaatgaagaaggcgatcctgcatgtgtactgggaagagttccagaaggaccctgtgggcctgatgagccgggtggcccagcctgccagcaagaagatcgatcagaacaagctgaaacctgagatggacgagaagggcaacctgaccaccgccggctttgcctgctctcagtgtggccagcccctgttcgtgtacaagctggagcaggtgtctgagaagggcaaggcttacaccaactacttcggacggtgcaatgtggccgagcacgaaaagctgatcctgctggcccagctgaagcccgagaaggatagcgacgaagccgtgacatatagcctgggaaagtttgggcagagggccctggatttctacagcattcatgtgaccaaggagtccacccaccccgtgaagcccctggcccagatcgccggaaacagatacgcctccggacctgtgggaaaggccctgagcgacgcatgtatgggcacaatcgcctccttcctgtctaagtaccaggacatcatcatcgaacaccagaaggtggtgaagggcaaccagaagagactggagagcctgcgggagctggccggcaaggaaaacctggaataccctagcgtgaccctgccacctcagcctcacaccaaggagggcgttgatgcctacaacgaagtgatcgcccgggtgcgaatgtgggtgaacctgaacctgtggcagaagctgaagctaagcagagatgatgccaagcctctgctgagactgaagggattcccttcctttcctctggtcgagagacaggccaacgaagtggactggtgggacatggtgtgtaacgtgaagaagctgatcaacgagaaaaaggaggatggcaaggtgttttggcagaatctggctggctacaagagacaggaagccctgagaccatacctgagcagcgaggaagatcggaagaagggaaagaaattcgctcggtaccagctgggcgacctgctgctgcacctggaaaagaagcacggcgaggactggggaaaggtgtacgacgaggcctgggagcggattgacaagaaagtggaaggcctgagcaagcacatcaagctggaagaggaacggagaagcgaggacgcccagagcaaggccgccctgaccgactggctgcgggctaaggccagcttcgtgatcgagggcctgaaggaggccgacaaggacgagttctgcagatgcgagctgaagctgcagaagtggtacggggacctgcggggaaagcccttcgccatcgaagccgagaacagcatcctggacatcagcggcttcagcaagcagtacaactgtgccttcatctggcagaaggacggcgtgaagaagctgaacctgtacctgatcatcaactacttcaagggcggcaagctgcggttcaagaagatcaaacctgaagccttcgaagccaacagattctacaccgtgatcaacaaaaagagcggcgagatcgtgcccatggaggtgaacttcaacttcgacgaccccaacctgatcatcctgcctctggcctttggcaagagacagggcagagaattcatctggaacgacctgctgtccctggaaaccggcagcctgaagctggccaacggaagagtgatcgagaagacactgtacaacagaagaacccggcaggatgagcctgccctgttcgtggccctgaccttcgagcggcgggaggtcctggactcctccaatatcaaaccaatgaacctgatcggcgtggcaagaggcgaaaacatccccgccgtgatcgccctgaccgaccccgagggctgcccactgagccggtttaaggatagcctgggaaacccaacccacatcctgagaatcggcgagagctataaggagaagcagcggaccatccaggccaagaaggaggtggagcagcggagagccggcggctacagccggaagtacgccagcaaagccaagaatctggcagacgatatggtgagaaacaccgctagagatctgctgtactacgccgtgacccaggatgccatgctgatcttcgccaacctgagccggggcttcggccggcagggcaagcggaccttcatggccgagagacagtacacacggatggaggactggctgaccgccaagctggcctacgagggcctgagcaagacctacctgtccaagacactggcccagtacacctccaagacatgcagcaactgtgggtttaccatcaccagcgccgactacgacagggtgctggagaagctgaagaagacagcaacaggctggatgaccacaattaacggcaaggagctgaaggtggagggccagattacctactacaacagatacaagagacagaacgtagtcaaggacctgtccgtcgagctggatagactgagcgaagaatctgtgaacaacgacatctcctcctggacaaagggcagaagcggagaagctctgagcctcctgaagaaaagattctcccatagacccgtgcaggagaagttcgtgtgcctgaactgcggcttcgagacacacgcagccgagcaagccgccctgaacatcgccagatcctggctgttcctgcggagccaggagtacaagaaataccagacaaacaagacaaccggcaacaccgataagagagccttcgtcgagacctggcagtccttttaccggaagaagcttaaggaggtgtggaaacctgccgtgcggtctggcggatctggcggaggctccttcggcaacctgctgggcgtgccctgggcccagggcaacagcgccctgcccgagggcctgctgagcttcaaggacatcagcatggagttcacctgggacgagtggcagctgctggacagcacccagaagtacctgtacagggacgtgatcctggagaactaccacaacctgatcagcgtgggctaccacggcaccaagcccgacctgatcttcaagctggagcagggcgaggacccctggatcggcggcccaagcagcggcgcccctcctcccagcggcggcagcccagccggctccccaacctctaccgaggagggcacctctgagtccgccacccccgagagcggccctggcacctccaccgagcccagcgagggcagcgcacccggcagccctgccggcagccccacctccacagaggagggaaccagcaccgagcccagcgaaggcagcgccccaggcaccagcaccgagcctagtgagcaggagattaaacggatcaacaagatcagaagaagacttgtgaaagacagcaacaccaagaaggccggcaagacaggccccatgaaaaccctgctggttagagtgatgacacccgatctgagagagcggctggaaaacctgagaaagaagcctgaaaatatcccccagcccatcagcaatacatctagagccaacctgaataagctgctgaccgattacaccgaaatgaagaaggcgatcctgcatgtgtactgggaagagttccagaaggaccctgtgggcctgatgagccgggtggcccagcctgccagcaagaagatcgatcagaacaagctgaaacctgagatggacgagaagggcaacctgaccaccgccggctttgcctgctctcagtgtggccagcccctgttcgtgtacaagctggagcaggtgtctgagaagggcaaggcttacaccaactacttcggacggtgcaatgtggccgagcacgaaaagctgatcctgctggcccagctgaagcccgagaaggatagcgacgaagccgtgacatatagcctgggaaagtttgggcagagggccctggatttctacagcattcatgtgaccaaggagtccacccaccccgtgaagcccctggcccagatcgccggaaacagatacgcctccggacctgtgggaaaggccctgagcgacgcatgtatgggcacaatcgcctccttcctgtctaagtaccaggacatcatcatcgaacaccagaaggtggtgaagggcaaccagaagagactggagagcctgcgggagctggccggcaaggaaaacctggaataccctagcgtgaccctgccacctcagcctcacaccaaggagggcgttgatgcctacaacgaagtgatcgcccgggtgcgaatgtgggtgaacctgaacctgtggcagaagctgaagctaagcagagatgatgccaagcctctgctgagactgaagggattcccttcctttcctctggtcgagagacaggccaacgaagtggactggtgggacatggtgtgtaacgtgaagaagctgatcaacgagaaaaaggaggatggcaaggtgttttggcagaatctggctggctacaagagacaggaagccctgagaccatacctgagcagcgaggaagatcggaagaagggaaagaaattcgctcggtaccagctgggcgacctgctgctgcacctggaaaagaagcacggcgaggactggggaaaggtgtacgacgaggcctgggagcggattgacaagaaagtggaaggcctgagcaagcacatcaagctggaagaggaacggagaagcgaggacgcccagagcaaggccgccctgaccgactggctgcgggctaaggccagcttcgtgatcgagggcctgaaggaggccgacaaggacgagttctgcagatgcgagctgaagctgcagaagtggtacggggacctgcggggaaagcccttcgccatcgaagccgagaacagcatcctggacatcagcggcttcagcaagcagtacaactgtgccttcatctggcagaaggacggcgtgaagaagctgaacctgtacctgatcatcaactacttcaagggcggcaagctgcggttcaagaagatcaaacctgaagccttcgaagccaacagattctacaccgtgatcaacaaaaagagcggcgagatcgtgcccatggaggtgaacttcaacttcgacgaccccaacctgatcatcctgcctctggcctttggcaagagacagggcagagaattcatctggaacgacctgctgtccctggaaaccggcagcctgaagctggccaacggaagagtgatcgagaagacactgtacaacagaagaacccggcaggatgagcctgccctgttcgtggccctgaccttcgagcggcgggaggtcctggactcctccaatatcaaaccaatgaacctgatcggcgtggcaagaggcgaaaacatccccgccgtgatcgccctgaccgaccccgagggctgcccactgagccggtttaaggatagcctgggaaacccaacccacatcctgagaatcggcgagagctataaggagaagcagcggaccatccaggccaagaaggaggtggagcagcggagagccggcggctacagccggaagtacgccagcaaagccaagaatctggcagacgatatggtgagaaacaccgctagagatctgctgtactacgccgtgacccaggatgccatgctgatcttcgccaacctgagccggggcttcggccggcagggcaagcggaccttcatggccgagagacagtacacacggatggaggactggctgaccgccaagctggcctacgagggcctgagcaagacctacctgtccaagacactggcccagtacacctccaagacatgcagcaactgtgggtttaccatcaccagcgccgactacgacagggtgctggagaagctgaagaagacagcaacaggctggatgaccacaattaacggcaaggagctgaaggtggagggccagattacctactacaacagatacaagagacagaacgtagtcaaggacctgtccgtcgagctggatagactgagcgaagaatctgtgaacaacgacatctcctcctggacaaagggcagaagcggagaagctctgagcctcctgaagaaaagattctcccatagacccgtgcaggagaagttcgtgtgcctgaactgcggcttcgagacacacgcagccgagcaagccgccctgaacatcgccagatcctggctgttcctgcggagccaggagtacaagaaataccagacaaacaagacaaccggcaacaccgataagagagccttcgtcgagacctggcagtccttttaccggaagaagcttaaggaggtgtggaaacctgccgtgcggtctggcggatctggcggaggctcctttcggcaacctgctgggcgtgccctgggcccagggcaacagcgccctgcccgagggcctgctgagcttcaaggacatcagcatggagttcacctgggacgagtggcagctgctggacagcacccagaagtacctgtacagggacgtgatcctggagaactaccacaacctgatcagcgtgggctaccacggcaccaagcccgacctgatcttcaagctggagcagggcgaggacccctggatcggatctggctccggcagcggccccaagaaaaagagaaaagtctaagctgccttctgcggggcttgccttctggccatgcccttcttctctcccttgcacctgtacctcttggtctttgaataaagcctgagtaggaaggctagcaaaaaaaaaaaaaaaaaaaaaaaaaaaaaaaaaaaaaaaaaaaaaaaaaaaaaaaaaaaaaaaaaaaaaaaaaaaaaaaa

SEQ ID NO: 16199 - RNA, 9485 nt, synthetic construct
  source 1..9485: mol_type = other RNA
aggaaataagagagaaaagaagagtaagaagaaatataagagccaccatggcccctaagaagaagcgtaaagtgagccggatggaacgcctcgtctacgaggtgcggcagaagtgcagaaacatcgaggacatctgcatctcctgcggatctctgaacgtgaccctggagcacccactgttcatcggcggcatgtgccagaactgtaaaaactgttttctggagtgtgcctatcaatacgacgatgacggctaccagagctactgcaccatctgttgcggcggaagagaggtgctgatgtgtggaaataacaactgctgccggtgcttctgcgtggaatgcgtggacctgctggtgggccccggcgccgcccaggccgctattaaggaagatccttggaactgctacatgtgcggccacaagggcacatacggcctgctgagacggagagaggactggcctagcagactgcagatgttcttcgccaataaccacgaccaggagttcgacccccctaaggtgtaccctcccgtccccgccgagaagagaaagcccatccgggtcctgagcctgttcgatggcatcgccaccggtctgctggtgctgaaggacctgggcatccaggtggataggtacattgcctccgaggtgtgcgaggactccatcaccgtgggaatggtgcgtcatcagggcaagatcatgtacgtgggcgacgtgcggagcgtgacacagaagcatatccaggagtggggccctttcgacctggtgatcggcggcagcccttgcaatgacctgagcatcgtgaacccagcccggaagggcctgtacgagggaaccggcagactgttcttcgagttttacagactgctgcacgacgcccggcctaaggaaggcgacgaccggcccttcttttggctgttcgagaatgtggtggccatgggagtcagcgacaagcgggatattagccggttcctggagagcaaccccgtgatgatcgatgccaaggaagtgagcgccgcccaccgggccagatacttctggggcaatctgcctggcatgaacagacccctggccagcaccgtgaacgacaagctggagctgcaggagtgcctggagcacggccggatcgccaagttcagcaaggtgagaaccatcaccacccgaagcaacagcatcaaacaaggcaaggaccagcactttcctgtgttcatgaacgagaaggaggacatcctgtggtgtaccgagatggagagagtgttcgggttcccagtccactacacagatgtcagcaacatgtctagactggccagacagagactgctgggaagaagctggtccgtccctgtgatcagacacctgttcgcccctctgaaggagtacttcgcctgcgtgagcagcggcaacagcaacgccaacagccggggccccagcttctctagcggcctggtgccactgtccctgagagggagccacatgggccccatggagatctacaaaaccgtgagcgcctggaagcggcagcctgtgcgcgtgctgagcctgtttcggaatatcgataaagtcctgaaaagcctgggattcctggagagcggctctggctccggcggtggcaccctgaagtacgtggaggatgtgacaaacgtggtcagacgggatgtggagaagtggggccccttcgatctggtgtacggcagcacccaacccctgggcagctcttgtgaccggtgccctggctggtacatgtttcagttccaccggatcctgcagtacgccctgccgagacaggagtcccagcggccattcttttggattttcatggacaacttgctgctgaccgaggatgaccaggaaactaccactcggttcctgcagaccgaagccgtgaccctgcaggacgtgagaggccgggactaccagaacgccatgcgggtgtggtccaacatccctggactgaaaagcaagcacgcacctctgacccctaaagaagaggagtacctgcaggcccaggtgcggagcagaagcaagctggacgcccctaaggtggatctgctggtgaagaattgcctcctgcccctgagagagtacttcaagtatttcagccagaatagtctgcccctgggaggcagcggcggcggcgccctggtgacatttgaggacgtcgccgtgcggttcacccaggaggaatgggctctgctggatccttctcagaaaatcctgtaccgggacgtgatgagagagacataccggaatctgacctccgtgggcatcaactgggaatgttgggaccttgaagcctgcttcagaagcctgggaagaaacctgagagtgcaggtggtgaagagaaagtgcgagctgaccaacagcggcccctgcgccgagggcggcccaagcagcggcgcccctcctcccagcggcggcagcccagccggctccccaacctctaccgaggagggcacctctgagtccgccacccccgagagcggccctggcacctccaccgagcccagcgagggcagcgcacccggcagccctgccggcagccccacctccacagaggagggaaccagcaccgagcccagcgaaggcagcgccccaggcaccagcaccgagcctagtgagcaggagattaaacggatcaacaagatcagaagaagacttgtgaaagacagcaacaccaagaaggccggcaagacaggccccatgaaaaccctgctggttagagtgatgacacccgatctgagagagcggctggaaaacctgagaaagaagcctgaaaatatcccccagcccatcagcaatacatctagagccaacctgaataagctgctgaccgattacaccgaaatgaagaaggcgatcctgcatgtgtactgggaagagttccagaaggaccctgtgggcctgatgagccgggtggcccagcctgccagcaagaagatcgatcagaacaagctgaaacctgagatggacgagaagggcaacctgaccaccgccggctttgcctgctctcagtgtggccagcccctgttcgtgtacaagctggagcaggtgtctgagaagggcaaggcttacaccaactacttcggacggtgcaatgtggccgagcacgaaaagctgatcctgctggcccagctgaagcccgagaaggatagcgacgaagccgtgacatatagcctgggaaagtttgggcagagggccctggatttctacagcattcatgtgaccaaggagtccacccaccccgtgaagcccctggcccagatcgccggaaacagatacgcctccggacctgtgggaaaggccctgagcgacgcatgtatgggcacaatcgcctccttcctgtctaagtaccaggacatcatcatcgaacaccagaaggtggtgaagggcaaccagaagagactggagagcctgcgggagctggccggcaaggaaaacctggaataccctagcgtgaccctgccacctcagcctcacaccaaggagggcgttgatgcctacaacgaagtgatcgcccgggtgcgaatgtgggtgaacctgaacctgtggcagaagctgaagctaagcagagatgatgccaagcctctgctgagactgaagggattcccttcctttcctctggtcgagagacaggccaacgaagtggactggtgggacatggtgtgtaacgtgaagaagctgatcaacgagaaaaaggaggatggcaaggtgttttggcagaatctggctggctacaagagacaggaagccctgagaccatacctgagcagcgaggaagatcggaagaagggaaagaaattcgctcggtaccagctgggcgacctgctgctgcacctggaaaagaagcacggcgaggactggggaaaggtgtacgacgaggcctgggagcggattgacaagaaagtggaaggcctgagcaagcacatcaagctggaagaggaacggagaagcgaggacgcccagagcaaggccgccctgaccgactggctgcgggctaaggccagcttcgtgatcgagggcctgaaggaggccgacaaggacgagttctgcagatgcgagctgaagctgcagaagtggtacggggacctgcggggaaagcccttcgccatcgaagccgagaacagcatcctggacatcagcggcttcagcaagcagtacaactgtgccttcatctggcagaaggacggcgtgaagaagctgaacctgtacctgatcatcaactacttcaagggcggcaagctgcggttcaagaagatcaaacctgaagccttcgaagccaacagattctacaccgtgatcaacaaaaagagcggcgagatcgtgcccatggaggtgaacttcaacttcgacgaccccaacctgatcatcctgcctctggcctttggcaagagacagggcagagaattcatctggaacgacctgctgtccctggaaaccggcagcctgaagctggccaacggaagagtgatcgagaagacactgtacaacagaagaacccggcaggatgagcctgccctgttcgtggccctgaccttcgagcggcgggaggtcctggactcctccaatatcaaaccaatgaacctgatcggcgtggcaagaggcgaaaacatccccgccgtgatcgccctgaccgaccccgagggctgcccactgagccggtttaaggatagcctgggaaacccaacccacatcctgagaatcggcgagagctataaggagaagcagcggaccatccaggccaagaaggaggtggagcagcggagagccggcggctacagccggaagtacgccagcaaagccaagaatctggcagacgatatggtgagaaacaccgctagagatctgctgtactacgccgtgacccaggatgccatgctgatcttcgccaacctgagccggggcttcggccggcagggcaagcggaccttcatggccgagagacagtacacacggatggaggactggctgaccgccaagctggcctacgagggcctgagcaagacctacctgtccaagacactggcccagtacacctccaagacatgcagcaactgtgggtttaccatcaccagcgccgactacgacagggtgctggagaagctgaagaagacagcaacaggctggatgaccacaattaacggcaaggagctgaaggtggagggccagattacctactacaacagatacaagagacagaacgtagtcaaggacctgtccgtcgagctggatagactgagcgaagaatctgtgaacaacgacatctcctcctggacaaagggcagaagcggagaagctctgagcctcctgaagaaaagattctcccatagacccgtgcaggagaagttcgtgtgcctgaactgcggcttcgagacacacgcagccgagcaagccgccctgaacatcgccagatcctggctgttcctgcggagccaggagtacaagaaataccagacaaacaagacaaccggcaacaccgataagagagccttcgtcgagacctggcagtccttttaccggaagaagcttaaggaggtgtggaaacctgccgtgcggtctggcggatctggcggaggctccatgggcagcgtgagcttcgaggacatcagcctggacttcacctgggacgagtggcaggacctggacagcgcccagaggaccctgtacagggacgtgatgctggagaactacagcagcctgatgttcctgggccactgcaccaccaagcccgagctgatcttcaagctggagcacggcttcggcccctggagcctggccgaggccagcatccagagcctgcccggcgtgcacaagatgaccgtgggcggcccaagcagcggcgcccctcctcccagcggcggcagcccagccggctccccaacctctaccgaggagggcacctctgagtccgccacccccgagagcggccctggcacctccaccgagcccagcgagggcagcgcacccggcagccctgccggcagccccacctccacagaggagggaaccagcaccgagcccagcgaaggcagcgccccaggcaccagcaccgagcctagtgagcaggagattaaacggatcaacaagatcagaagaagacttgtgaaagacagcaacaccaagaaggccggcaagacaggccccatgaaaaccctgctggttagagtgatgacacccgatctgagagagcggctggaaaacctgagaaagaagcctgaaaatatcccccagcccatcagcaatacatctagagccaacctgaataagctgctgaccgattacaccgaaatgaagaaggcgatcctgcatgtgtactgggaagagttccagaaggaccctgtgggcctgatgagccgggtggcccagcctgccagcaagaagatcgatcagaacaagctgaaacctgagatggacgagaagggcaacctgaccaccgccggctttgcctgctctcagtgtggccagcccctgttcgtgtacaagctggagcaggtgtctgagaagggcaaggcttacaccaactacttcggacggtgcaatgtggccgagcacgaaaagctgatcctgctggcccagctgaagcccgagaaggatagcgacgaagccgtgacatatagcctgggaaagtttgggcagagggccctggatttctacagcattcatgtgaccaaggagtccacccaccccgtgaagcccctggcccagatcgccggaaacagatacgcctccggacctgtgggaaaggccctgagcgacgcatgtatgggcacaatcgcctccttcctgtctaagtaccaggacatcatcatcgaacaccagaaggtggtgaagggcaaccagaagagactggagagcctgcgggagctggccggcaaggaaaacctggaataccctagcgtgaccctgccacctcagcctcacaccaaggagggcgttgatgcctacaacgaagtgatcgcccgggtgcgaatgtgggtgaacctgaacctgtggcagaagctgaagctaagcagagatgatgccaagcctctgctgagactgaagggattcccttcctttcctctggtcgagagacaggccaacgaagtggactggtgggacatggtgtgtaacgtgaagaagctgatcaacgagaaaaaggaggatggcaaggtgttttggcagaatctggctggctacaagagacaggaagccctgagaccatacctgagcagcgaggaagatcggaagaagggaaagaaattcgctcggtaccagctgggcgacctgctgctgcacctggaaaagaagcacggcgaggactggggaaaggtgtacgacgaggcctgggagcggattgacaagaaagtggaaggcctgagcaagcacatcaagctggaagaggaacggagaagcgaggacgcccagagcaaggccgccctgaccgactggctgcgggctaaggccagcttcgtgatcgagggcctgaaggaggccgacaaggacgagttctgcagatgcgagctgaagctgcagaagtggtacggggacctgcggggaaagcccttcgccatcgaagccgagaacagcatcctggacatcagcggcttcagcaagcagtacaactgtgccttcatctggcagaaggacggcgtgaagaagctgaacctgtacctgatcatcaactacttcaagggcggcaagctgcggttcaagaagatcaaacctgaagccttcgaagccaacagattctacaccgtgatcaacaaaaagagcggcgagatcgtgcccatggaggtgaacttcaacttcgacgaccccaacctgatcatcctgcctctggcctttggcaagagacagggcagagaattcatctggaacgacctgctgtccctggaaaccggcagcctgaagctggccaacggaagagtgatcgagaagacactgtacaacagaagaacccggcaggatgagcctgccctgttcgtggccctgaccttcgagcggcgggaggtcctggactcctccaatatcaaaccaatgaacctgatcggcgtggcaagaggcgaaaacatccccgccgtgatcgccctgaccgaccccgagggctgcccactgagccggtttaaggatagcctgggaaacccaacccacatcctgagaatcggcgagagctataaggagaagcagcggaccatccaggccaagaaggaggtggagcagcggagagccggcggctacagccggaagtacgccagcaaagccaagaatctggcagacgatatggtgagaaacaccgctagagatctgctgtactacgccgtgacccaggatgccatgctgatcttcgccaacctgagccggggcttcggccggcagggcaagcggaccttcatggccgagagacagtacacacggatggaggactggctgaccgccaagctggcctacgagggcctgagcaagacctacctgtccaagacactggcccagtacacctccaagacatgcagcaactgtgggtttaccatcaccagcgccgactacgacagggtgctggagaagctgaagaagacagcaacaggctggatgaccacaattaacggcaaggagctgaaggtggagggccagattacctactacaacagatacaagagacagaacgtagtcaaggacctgtccgtcgagctggatagactgagcgaagaatctgtgaacaacgacatctcctcctggacaaagggcagaagcggagaagctctgagcctcctgaagaaaagattctcccatagacccgtgcaggagaagttcgtgtgcctgaactgcggcttcgagacacacgcagccgagcaagccgccctgaacatcgccagatcctggctgttcctgcggagccaggagtacaagaaataccagacaaacaagacaaccggcaacaccgataagagagccttcgtcgagacctggcagtccttttaccggaagaagcttaaggaggtgtggaaacctgccgtgcggtctggcggatctggcggaggctcctatgggcagcgtgagcttcgaggacatcagcctggacttcacctgggacgagtggcaggacctggacagcgcccagaggaccctgtacagggacgtgatgctggagaactacagcagcctgatgttcctgggccactgcaccaccaagcccgagctgatcttcaagctggagcacggcttcggcccctggagcctggccgaggccagcatccagagcctgcccggcgtgcacaagatgaccgtgggatctggctccggcagcggccccaagaaaaagagaaaagtctaagctgccttctgcggggcttgccttctggccatgcccttcttctctcccttgcacctgtacctcttggtctttgaataaagcctgagtaggaaggctagcaaaaaaaaaaaaaaaaaaaaaaaaaaaaaaaaaaaaaaaaaaaaaaaaaaaaaaaaaaaaaaaaaaaaaaaaaaaaaaaa

SEQ ID NO: 16200 - RNA, 9485 nt, synthetic construct
  source 1..9485: mol_type = other RNA
aggaaataagagagaaaagaagagtaagaagaaatataagagccaccatggcccctaagaagaagcgtaaagtgagccggatggaacgcctcgtctacgaggtgcggcagaagtgcagaaacatcgaggacatctgcatctcctgcggatctctgaacgtgaccctggagcacccactgttcatcggcggcatgtgccagaactgtaaaaactgttttctggagtgtgcctatcaatacgacgatgacggctaccagagctactgcaccatctgttgcggcggaagagaggtgctgatgtgtggaaataacaactgctgccggtgcttctgcgtggaatgcgtggacctgctggtgggccccggcgccgcccaggccgctattaaggaagatccttggaactgctacatgtgcggccacaagggcacatacggcctgctgagacggagagaggactggcctagcagactgcagatgttcttcgccaataaccacgaccaggagttcgacccccctaaggtgtaccctcccgtccccgccgagaagagaaagcccatccgggtcctgagcctgttcgatggcatcgccaccggtctgctggtgctgaaggacctgggcatccaggtggataggtacattgcctccgaggtgtgcgaggactccatcaccgtgggaatggtgcgtcatcagggcaagatcatgtacgtgggcgacgtgcggagcgtgacacagaagcatatccaggagtggggccctttcgacctggtgatcggcggcagcccttgcaatgacctgagcatcgtgaacccagcccggaagggcctgtacgagggaaccggcagactgttcttcgagttttacagactgctgcacgacgcccggcctaaggaaggcgacgaccggcccttcttttggctgttcgagaatgtggtggccatgggagtcagcgacaagcgggatattagccggttcctggagagcaaccccgtgatgatcgatgccaaggaagtgagcgccgcccaccgggccagatacttctggggcaatctgcctggcatgaacagacccctggccagcaccgtgaacgacaagctggagctgcaggagtgcctggagcacggccggatcgccaagttcagcaaggtgagaaccatcaccacccgaagcaacagcatcaaacaaggcaaggaccagcactttcctgtgttcatgaacgagaaggaggacatcctgtggtgtaccgagatggagagagtgttcgggttcccagtccactacacagatgtcagcaacatgtctagactggccagacagagactgctgggaagaagctggtccgtccctgtgatcagacacctgttcgcccctctgaaggagtacttcgcctgcgtgagcagcggcaacagcaacgccaacagccggggccccagcttctctagcggcctggtgccactgtccctgagagggagccacatgggccccatggagatctacaaaaccgtgagcgcctggaagcggcagcctgtgcgcgtgctgagcctgtttcggaatatcgataaagtcctgaaaagcctgggattcctggagagcggctctggctccggcggtggcaccctgaagtacgtggaggatgtgacaaacgtggtcagacgggatgtggagaagtggggccccttcgatctggtgtacggcagcacccaacccctgggcagctcttgtgaccggtgccctggctggtacatgtttcagttccaccggatcctgcagtacgccctgccgagacaggagtcccagcggccattcttttggattttcatggacaacttgctgctgaccgaggatgaccaggaaactaccactcggttcctgcagaccgaagccgtgaccctgcaggacgtgagaggccgggactaccagaacgccatgcgggtgtggtccaacatccctggactgaaaagcaagcacgcacctctgacccctaaagaagaggagtacctgcaggcccaggtgcggagcagaagcaagctggacgcccctaaggtggatctgctggtgaagaattgcctcctgcccctgagagagtacttcaagtatttcagccagaatagtctgcccctgggaggcagcggcggcggcgccctggtgacatttgaggacgtcgccgtgcggttcacccaggaggaatgggctctgctggatccttctcagaaaatcctgtaccgggacgtgatgagagagacataccggaatctgacctccgtgggcatcaactgggaatgttgggaccttgaagcctgcttcagaagcctgggaagaaacctgagagtgcaggtggtgaagagaaagtgcgagctgaccaacagcggcccctgcgccgagggcggcccaagcagcggcgcccctcctcccagcggcggcagcccagccggctccccaacctctaccgaggagggcacctctgagtccgccacccccgagagcggccctggcacctccaccgagcccagcgagggcagcgcacccggcagccctgccggcagccccacctccacagaggagggaaccagcaccgagcccagcgaaggcagcgccccaggcaccagcaccgagcctagtgagcaggagattaaacggatcaacaagatcagaagaagacttgtgaaagacagcaacaccaagaaggccggcaagacaggccccatgaaaaccctgctggttagagtgatgacacccgatctgagagagcggctggaaaacctgagaaagaagcctgaaaatatcccccagcccatcagcaatacatctagagccaacctgaataagctgctgaccgattacaccgaaatgaagaaggcgatcctgcatgtgtactgggaagagttccagaaggaccctgtgggcctgatgagccgggtggcccagcctgccagcaagaagatcgatcagaacaagctgaaacctgagatggacgagaagggcaacctgaccaccgccggctttgcctgctctcagtgtggccagcccctgttcgtgtacaagctggagcaggtgtctgagaagggcaaggcttacaccaactacttcggacggtgcaatgtggccgagcacgaaaagctgatcctgctggcccagctgaagcccgagaaggatagcgacgaagccgtgacatatagcctgggaaagtttgggcagagggccctggatttctacagcattcatgtgaccaaggagtccacccaccccgtgaagcccctggcccagatcgccggaaacagatacgcctccggacctgtgggaaaggccctgagcgacgcatgtatgggcacaatcgcctccttcctgtctaagtaccaggacatcatcatcgaacaccagaaggtggtgaagggcaaccagaagagactggagagcctgcgggagctggccggcaaggaaaacctggaataccctagcgtgaccctgccacctcagcctcacaccaaggagggcgttgatgcctacaacgaagtgatcgcccgggtgcgaatgtgggtgaacctgaacctgtggcagaagctgaagctaagcagagatgatgccaagcctctgctgagactgaagggattcccttcctttcctctggtcgagagacaggccaacgaagtggactggtgggacatggtgtgtaacgtgaagaagctgatcaacgagaaaaaggaggatggcaaggtgttttggcagaatctggctggctacaagagacaggaagccctgagaccatacctgagcagcgaggaagatcggaagaagggaaagaaattcgctcggtaccagctgggcgacctgctgctgcacctggaaaagaagcacggcgaggactggggaaaggtgtacgacgaggcctgggagcggattgacaagaaagtggaaggcctgagcaagcacatcaagctggaagaggaacggagaagcgaggacgcccagagcaaggccgccctgaccgactggctgcgggctaaggccagcttcgtgatcgagggcctgaaggaggccgacaaggacgagttctgcagatgcgagctgaagctgcagaagtggtacggggacctgcggggaaagcccttcgccatcgaagccgagaacagcatcctggacatcagcggcttcagcaagcagtacaactgtgccttcatctggcagaaggacggcgtgaagaagctgaacctgtacctgatcatcaactacttcaagggcggcaagctgcggttcaagaagatcaaacctgaagccttcgaagccaacagattctacaccgtgatcaacaaaaagagcggcgagatcgtgcccatggaggtgaacttcaacttcgacgaccccaacctgatcatcctgcctctggcctttggcaagagacagggcagagaattcatctggaacgacctgctgtccctggaaaccggcagcctgaagctggccaacggaagagtgatcgagaagacactgtacaacagaagaacccggcaggatgagcctgccctgttcgtggccctgaccttcgagcggcgggaggtcctggactcctccaatatcaaaccaatgaacctgatcggcgtggcaagaggcgaaaacatccccgccgtgatcgccctgaccgaccccgagggctgcccactgagccggtttaaggatagcctgggaaacccaacccacatcctgagaatcggcgagagctataaggagaagcagcggaccatccaggccaagaaggaggtggagcagcggagagccggcggctacagccggaagtacgccagcaaagccaagaatctggcagacgatatggtgagaaacaccgctagagatctgctgtactacgccgtgacccaggatgccatgctgatcttcgccaacctgagccggggcttcggccggcagggcaagcggaccttcatggccgagagacagtacacacggatggaggactggctgaccgccaagctggcctacgagggcctgagcaagacctacctgtccaagacactggcccagtacacctccaagacatgcagcaactgtgggtttaccatcaccagcgccgactacgacagggtgctggagaagctgaagaagacagcaacaggctggatgaccacaattaacggcaaggagctgaaggtggagggccagattacctactacaacagatacaagagacagaacgtagtcaaggacctgtccgtcgagctggatagactgagcgaagaatctgtgaacaacgacatctcctcctggacaaagggcagaagcggagaagctctgagcctcctgaagaaaagattctcccatagacccgtgcaggagaagttcgtgtgcctgaactgcggcttcgagacacacgcagccgagcaagccgccctgaacatcgccagatcctggctgttcctgcggagccaggagtacaagaaataccagacaaacaagacaaccggcaacaccgataagagagccttcgtcgagacctggcagtccttttaccggaagaagcttaaggaggtgtggaaacctgccgtgcggtctggcggatctggcggaggctccgtgcccgagcccgtgaccttcgaggacgtggccgtggacttcacccaggaggagtggggccagctggacctggtgcagaggaccctgtacagggacgtgatgctggagacctacggccacctgctgagcgtgggcaaccagatcgccaagcccgaggtgatcagcctgctggagcagggcgaggagccctggctggtggagcagacctgccccgagagcagctgccccgagtggatgagggacggcggcccaagcagcggcgcccctcctcccagcggcggcagcccagccggctccccaacctctaccgaggagggcacctctgagtccgccacccccgagagcggccctggcacctccaccgagcccagcgagggcagcgcacccggcagccctgccggcagccccacctccacagaggagggaaccagcaccgagcccagcgaaggcagcgccccaggcaccagcaccgagcctagtgagcaggagattaaacggatcaacaagatcagaagaagacttgtgaaagacagcaacaccaagaaggccggcaagacaggccccatgaaaaccctgctggttagagtgatgacacccgatctgagagagcggctggaaaacctgagaaagaagcctgaaaatatcccccagcccatcagcaatacatctagagccaacctgaataagctgctgaccgattacaccgaaatgaagaaggcgatcctgcatgtgtactgggaagagttccagaaggaccctgtgggcctgatgagccgggtggcccagcctgccagcaagaagatcgatcagaacaagctgaaacctgagatggacgagaagggcaacctgaccaccgccggctttgcctgctctcagtgtggccagcccctgttcgtgtacaagctggagcaggtgtctgagaagggcaaggcttacaccaactacttcggacggtgcaatgtggccgagcacgaaaagctgatcctgctggcccagctgaagcccgagaaggatagcgacgaagccgtgacatatagcctgggaaagtttgggcagagggccctggatttctacagcattcatgtgaccaaggagtccacccaccccgtgaagcccctggcccagatcgccggaaacagatacgcctccggacctgtgggaaaggccctgagcgacgcatgtatgggcacaatcgcctccttcctgtctaagtaccaggacatcatcatcgaacaccagaaggtggtgaagggcaaccagaagagactggagagcctgcgggagctggccggcaaggaaaacctggaataccctagcgtgaccctgccacctcagcctcacaccaaggagggcgttgatgcctacaacgaagtgatcgcccgggtgcgaatgtgggtgaacctgaacctgtggcagaagctgaagctaagcagagatgatgccaagcctctgctgagactgaagggattcccttcctttcctctggtcgagagacaggccaacgaagtggactggtgggacatggtgtgtaacgtgaagaagctgatcaacgagaaaaaggaggatggcaaggtgttttggcagaatctggctggctacaagagacaggaagccctgagaccatacctgagcagcgaggaagatcggaagaagggaaagaaattcgctcggtaccagctgggcgacctgctgctgcacctggaaaagaagcacggcgaggactggggaaaggtgtacgacgaggcctgggagcggattgacaagaaagtggaaggcctgagcaagcacatcaagctggaagaggaacggagaagcgaggacgcccagagcaaggccgccctgaccgactggctgcgggctaaggccagcttcgtgatcgagggcctgaaggaggccgacaaggacgagttctgcagatgcgagctgaagctgcagaagtggtacggggacctgcggggaaagcccttcgccatcgaagccgagaacagcatcctggacatcagcggcttcagcaagcagtacaactgtgccttcatctggcagaaggacggcgtgaagaagctgaacctgtacctgatcatcaactacttcaagggcggcaagctgcggttcaagaagatcaaacctgaagccttcgaagccaacagattctacaccgtgatcaacaaaaagagcggcgagatcgtgcccatggaggtgaacttcaacttcgacgaccccaacctgatcatcctgcctctggcctttggcaagagacagggcagagaattcatctggaacgacctgctgtccctggaaaccggcagcctgaagctggccaacggaagagtgatcgagaagacactgtacaacagaagaacccggcaggatgagcctgccctgttcgtggccctgaccttcgagcggcgggaggtcctggactcctccaatatcaaaccaatgaacctgatcggcgtggcaagaggcgaaaacatccccgccgtgatcgccctgaccgaccccgagggctgcccactgagccggtttaaggatagcctgggaaacccaacccacatcctgagaatcggcgagagctataaggagaagcagcggaccatccaggccaagaaggaggtggagcagcggagagccggcggctacagccggaagtacgccagcaaagccaagaatctggcagacgatatggtgagaaacaccgctagagatctgctgtactacgccgtgacccaggatgccatgctgatcttcgccaacctgagccggggcttcggccggcagggcaagcggaccttcatggccgagagacagtacacacggatggaggactggctgaccgccaagctggcctacgagggcctgagcaagacctacctgtccaagacactggcccagtacacctccaagacatgcagcaactgtgggtttaccatcaccagcgccgactacgacagggtgctggagaagctgaagaagacagcaacaggctggatgaccacaattaacggcaaggagctgaaggtggagggccagattacctactacaacagatacaagagacagaacgtagtcaaggacctgtccgtcgagctggatagactgagcgaagaatctgtgaacaacgacatctcctcctggacaaagggcagaagcggagaagctctgagcctcctgaagaaaagattctcccatagacccgtgcaggagaagttcgtgtgcctgaactgcggcttcgagacacacgcagccgagcaagccgccctgaacatcgccagatcctggctgttcctgcggagccaggagtacaagaaataccagacaaacaagacaaccggcaacaccgataagagagccttcgtcgagacctggcagtccttttaccggaagaagcttaaggaggtgtggaaacctgccgtgcggtctggcggatctggcggaggctcctgtgcccgagcccgtgaccttcgaggacgtggccgtggacttcacccaggaggagtggggccagctggacctggtgcagaggaccctgtacagggacgtgatgctggagacctacggccacctgctgagcgtgggcaaccagatcgccaagcccgaggtgatcagcctgctggagcagggcgaggagccctggctggtggagcagacctgccccgagagcagctgccccgagtggatgagggacggatctggctccggcagcggccccaagaaaaagagaaaagtctaagctgccttctgcggggcttgccttctggccatgcccttcttctctcccttgcacctgtacctcttggtctttgaataaagcctgagtaggaaggctagcaaaaaaaaaaaaaaaaaaaaaaaaaaaaaaaaaaaaaaaaaaaaaaaaaaaaaaaaaaaaaaaaaaaaaaaaaaaaaaaa

SEQ ID NO: 16201 - RNA, 9485 nt, synthetic construct
  source 1..9485: mol_type = other RNA
aggaaataagagagaaaagaagagtaagaagaaatataagagccaccatggcccctaagaagaagcgtaaagtgagccggatggaacgcctcgtctacgaggtgcggcagaagtgcagaaacatcgaggacatctgcatctcctgcggatctctgaacgtgaccctggagcacccactgttcatcggcggcatgtgccagaactgtaaaaactgttttctggagtgtgcctatcaatacgacgatgacggctaccagagctactgcaccatctgttgcggcggaagagaggtgctgatgtgtggaaataacaactgctgccggtgcttctgcgtggaatgcgtggacctgctggtgggccccggcgccgcccaggccgctattaaggaagatccttggaactgctacatgtgcggccacaagggcacatacggcctgctgagacggagagaggactggcctagcagactgcagatgttcttcgccaataaccacgaccaggagttcgacccccctaaggtgtaccctcccgtccccgccgagaagagaaagcccatccgggtcctgagcctgttcgatggcatcgccaccggtctgctggtgctgaaggacctgggcatccaggtggataggtacattgcctccgaggtgtgcgaggactccatcaccgtgggaatggtgcgtcatcagggcaagatcatgtacgtgggcgacgtgcggagcgtgacacagaagcatatccaggagtggggccctttcgacctggtgatcggcggcagcccttgcaatgacctgagcatcgtgaacccagcccggaagggcctgtacgagggaaccggcagactgttcttcgagttttacagactgctgcacgacgcccggcctaaggaaggcgacgaccggcccttcttttggctgttcgagaatgtggtggccatgggagtcagcgacaagcgggatattagccggttcctggagagcaaccccgtgatgatcgatgccaaggaagtgagcgccgcccaccgggccagatacttctggggcaatctgcctggcatgaacagacccctggccagcaccgtgaacgacaagctggagctgcaggagtgcctggagcacggccggatcgccaagttcagcaaggtgagaaccatcaccacccgaagcaacagcatcaaacaaggcaaggaccagcactttcctgtgttcatgaacgagaaggaggacatcctgtggtgtaccgagatggagagagtgttcgggttcccagtccactacacagatgtcagcaacatgtctagactggccagacagagactgctgggaagaagctggtccgtccctgtgatcagacacctgttcgcccctctgaaggagtacttcgcctgcgtgagcagcggcaacagcaacgccaacagccggggccccagcttctctagcggcctggtgccactgtccctgagagggagccacatgggccccatggagatctacaaaaccgtgagcgcctggaagcggcagcctgtgcgcgtgctgagcctgtttcggaatatcgataaagtcctgaaaagcctgggattcctggagagcggctctggctccggcggtggcaccctgaagtacgtggaggatgtgacaaacgtggtcagacgggatgtggagaagtggggccccttcgatctggtgtacggcagcacccaacccctgggcagctcttgtgaccggtgccctggctggtacatgtttcagttccaccggatcctgcagtacgccctgccgagacaggagtcccagcggccattcttttggattttcatggacaacttgctgctgaccgaggatgaccaggaaactaccactcggttcctgcagaccgaagccgtgaccctgcaggacgtgagaggccgggactaccagaacgccatgcgggtgtggtccaacatccctggactgaaaagcaagcacgcacctctgacccctaaagaagaggagtacctgcaggcccaggtgcggagcagaagcaagctggacgcccctaaggtggatctgctggtgaagaattgcctcctgcccctgagagagtacttcaagtatttcagccagaatagtctgcccctgggaggcagcggcggcggcgccctggtgacatttgaggacgtcgccgtgcggttcacccaggaggaatgggctctgctggatccttctcagaaaatcctgtaccgggacgtgatgagagagacataccggaatctgacctccgtgggcatcaactgggaatgttgggaccttgaagcctgcttcagaagcctgggaagaaacctgagagtgcaggtggtgaagagaaagtgcgagctgaccaacagcggcccctgcgccgagggcggcccaagcagcggcgcccctcctcccagcggcggcagcccagccggctccccaacctctaccgaggagggcacctctgagtccgccacccccgagagcggccctggcacctccaccgagcccagcgagggcagcgcacccggcagccctgccggcagccccacctccacagaggagggaaccagcaccgagcccagcgaaggcagcgccccaggcaccagcaccgagcctagtgagcaggagattaaacggatcaacaagatcagaagaagacttgtgaaagacagcaacaccaagaaggccggcaagacaggccccatgaaaaccctgctggttagagtgatgacacccgatctgagagagcggctggaaaacctgagaaagaagcctgaaaatatcccccagcccatcagcaatacatctagagccaacctgaataagctgctgaccgattacaccgaaatgaagaaggcgatcctgcatgtgtactgggaagagttccagaaggaccctgtgggcctgatgagccgggtggcccagcctgccagcaagaagatcgatcagaacaagctgaaacctgagatggacgagaagggcaacctgaccaccgccggctttgcctgctctcagtgtggccagcccctgttcgtgtacaagctggagcaggtgtctgagaagggcaaggcttacaccaactacttcggacggtgcaatgtggccgagcacgaaaagctgatcctgctggcccagctgaagcccgagaaggatagcgacgaagccgtgacatatagcctgggaaagtttgggcagagggccctggatttctacagcattcatgtgaccaaggagtccacccaccccgtgaagcccctggcccagatcgccggaaacagatacgcctccggacctgtgggaaaggccctgagcgacgcatgtatgggcacaatcgcctccttcctgtctaagtaccaggacatcatcatcgaacaccagaaggtggtgaagggcaaccagaagagactggagagcctgcgggagctggccggcaaggaaaacctggaataccctagcgtgaccctgccacctcagcctcacaccaaggagggcgttgatgcctacaacgaagtgatcgcccgggtgcgaatgtgggtgaacctgaacctgtggcagaagctgaagctaagcagagatgatgccaagcctctgctgagactgaagggattcccttcctttcctctggtcgagagacaggccaacgaagtggactggtgggacatggtgtgtaacgtgaagaagctgatcaacgagaaaaaggaggatggcaaggtgttttggcagaatctggctggctacaagagacaggaagccctgagaccatacctgagcagcgaggaagatcggaagaagggaaagaaattcgctcggtaccagctgggcgacctgctgctgcacctggaaaagaagcacggcgaggactggggaaaggtgtacgacgaggcctgggagcggattgacaagaaagtggaaggcctgagcaagcacatcaagctggaagaggaacggagaagcgaggacgcccagagcaaggccgccctgaccgactggctgcgggctaaggccagcttcgtgatcgagggcctgaaggaggccgacaaggacgagttctgcagatgcgagctgaagctgcagaagtggtacggggacctgcggggaaagcccttcgccatcgaagccgagaacagcatcctggacatcagcggcttcagcaagcagtacaactgtgccttcatctggcagaaggacggcgtgaagaagctgaacctgtacctgatcatcaactacttcaagggcggcaagctgcggttcaagaagatcaaacctgaagccttcgaagccaacagattctacaccgtgatcaacaaaaagagcggcgagatcgtgcccatggaggtgaacttcaacttcgacgaccccaacctgatcatcctgcctctggcctttggcaagagacagggcagagaattcatctggaacgacctgctgtccctggaaaccggcagcctgaagctggccaacggaagagtgatcgagaagacactgtacaacagaagaacccggcaggatgagcctgccctgttcgtggccctgaccttcgagcggcgggaggtcctggactcctccaatatcaaaccaatgaacctgatcggcgtggcaagaggcgaaaacatccccgccgtgatcgccctgaccgaccccgagggctgcccactgagccggtttaaggatagcctgggaaacccaacccacatcctgagaatcggcgagagctataaggagaagcagcggaccatccaggccaagaaggaggtggagcagcggagagccggcggctacagccggaagtacgccagcaaagccaagaatctggcagacgatatggtgagaaacaccgctagagatctgctgtactacgccgtgacccaggatgccatgctgatcttcgccaacctgagccggggcttcggccggcagggcaagcggaccttcatggccgagagacagtacacacggatggaggactggctgaccgccaagctggcctacgagggcctgagcaagacctacctgtccaagacactggcccagtacacctccaagacatgcagcaactgtgggtttaccatcaccagcgccgactacgacagggtgctggagaagctgaagaagacagcaacaggctggatgaccacaattaacggcaaggagctgaaggtggagggccagattacctactacaacagatacaagagacagaacgtagtcaaggacctgtccgtcgagctggatagactgagcgaagaatctgtgaacaacgacatctcctcctggacaaagggcagaagcggagaagctctgagcctcctgaagaaaagattctcccatagacccgtgcaggagaagttcgtgtgcctgaactgcggcttcgagacacacgcagccgagcaagccgccctgaacatcgccagatcctggctgttcctgcggagccaggagtacaagaaataccagacaaacaagacaaccggcaacaccgataagagagccttcgtcgagacctggcagtccttttaccggaagaagcttaaggaggtgtggaaacctgccgtgcggtctggcggatctggcggaggctccttccaggagagcgtgaccttcaaggacgtggccgtggagttcaccggcgaggagtggaggcagctggacagggcccagaggagcctgttcagggacgtgatgctggagaactacaggaacctggtgagcctgggcctgaccgtggccaagcccaacctgatcttcctgctggagaggggcgaggccccctggaccctgcagaggcagatccccggcggcaccagcagcgactgcccctgctggggcggcccaagcagcggcgcccctcctcccagcggcggcagcccagccggctccccaacctctaccgaggagggcacctctgagtccgccacccccgagagcggccctggcacctccaccgagcccagcgagggcagcgcacccggcagccctgccggcagccccacctccacagaggagggaaccagcaccgagcccagcgaaggcagcgccccaggcaccagcaccgagcctagtgagcaggagattaaacggatcaacaagatcagaagaagacttgtgaaagacagcaacaccaagaaggccggcaagacaggccccatgaaaaccctgctggttagagtgatgacacccgatctgagagagcggctggaaaacctgagaaagaagcctgaaaatatcccccagcccatcagcaatacatctagagccaacctgaataagctgctgaccgattacaccgaaatgaagaaggcgatcctgcatgtgtactgggaagagttccagaaggaccctgtgggcctgatgagccgggtggcccagcctgccagcaagaagatcgatcagaacaagctgaaacctgagatggacgagaagggcaacctgaccaccgccggctttgcctgctctcagtgtggccagcccctgttcgtgtacaagctggagcaggtgtctgagaagggcaaggcttacaccaactacttcggacggtgcaatgtggccgagcacgaaaagctgatcctgctggcccagctgaagcccgagaaggatagcgacgaagccgtgacatatagcctgggaaagtttgggcagagggccctggatttctacagcattcatgtgaccaaggagtccacccaccccgtgaagcccctggcccagatcgccggaaacagatacgcctccggacctgtgggaaaggccctgagcgacgcatgtatgggcacaatcgcctccttcctgtctaagtaccaggacatcatcatcgaacaccagaaggtggtgaagggcaaccagaagagactggagagcctgcgggagctggccggcaaggaaaacctggaataccctagcgtgaccctgccacctcagcctcacaccaaggagggcgttgatgcctacaacgaagtgatcgcccgggtgcgaatgtgggtgaacctgaacctgtggcagaagctgaagctaagcagagatgatgccaagcctctgctgagactgaagggattcccttcctttcctctggtcgagagacaggccaacgaagtggactggtgggacatggtgtgtaacgtgaagaagctgatcaacgagaaaaaggaggatggcaaggtgttttggcagaatctggctggctacaagagacaggaagccctgagaccatacctgagcagcgaggaagatcggaagaagggaaagaaattcgctcggtaccagctgggcgacctgctgctgcacctggaaaagaagcacggcgaggactggggaaaggtgtacgacgaggcctgggagcggattgacaagaaagtggaaggcctgagcaagcacatcaagctggaagaggaacggagaagcgaggacgcccagagcaaggccgccctgaccgactggctgcgggctaaggccagcttcgtgatcgagggcctgaaggaggccgacaaggacgagttctgcagatgcgagctgaagctgcagaagtggtacggggacctgcggggaaagcccttcgccatcgaagccgagaacagcatcctggacatcagcggcttcagcaagcagtacaactgtgccttcatctggcagaaggacggcgtgaagaagctgaacctgtacctgatcatcaactacttcaagggcggcaagctgcggttcaagaagatcaaacctgaagccttcgaagccaacagattctacaccgtgatcaacaaaaagagcggcgagatcgtgcccatggaggtgaacttcaacttcgacgaccccaacctgatcatcctgcctctggcctttggcaagagacagggcagagaattcatctggaacgacctgctgtccctggaaaccggcagcctgaagctggccaacggaagagtgatcgagaagacactgtacaacagaagaacccggcaggatgagcctgccctgttcgtggccctgaccttcgagcggcgggaggtcctggactcctccaatatcaaaccaatgaacctgatcggcgtggcaagaggcgaaaacatccccgccgtgatcgccctgaccgaccccgagggctgcccactgagccggtttaaggatagcctgggaaacccaacccacatcctgagaatcggcgagagctataaggagaagcagcggaccatccaggccaagaaggaggtggagcagcggagagccggcggctacagccggaagtacgccagcaaagccaagaatctggcagacgatatggtgagaaacaccgctagagatctgctgtactacgccgtgacccaggatgccatgctgatcttcgccaacctgagccggggcttcggccggcagggcaagcggaccttcatggccgagagacagtacacacggatggaggactggctgaccgccaagctggcctacgagggcctgagcaagacctacctgtccaagacactggcccagtacacctccaagacatgcagcaactgtgggtttaccatcaccagcgccgactacgacagggtgctggagaagctgaagaagacagcaacaggctggatgaccacaattaacggcaaggagctgaaggtggagggccagattacctactacaacagatacaagagacagaacgtagtcaaggacctgtccgtcgagctggatagactgagcgaagaatctgtgaacaacgacatctcctcctggacaaagggcagaagcggagaagctctgagcctcctgaagaaaagattctcccatagacccgtgcaggagaagttcgtgtgcctgaactgcggcttcgagacacacgcagccgagcaagccgccctgaacatcgccagatcctggctgttcctgcggagccaggagtacaagaaataccagacaaacaagacaaccggcaacaccgataagagagccttcgtcgagacctggcagtccttttaccggaagaagcttaaggaggtgtggaaacctgccgtgcggtctggcggatctggcggaggctcctttccaggagagcgtgaccttcaaggacgtggccgtggagttcaccggcgaggagtggaggcagctggacagggcccagaggagcctgttcagggacgtgatgctggagaactacaggaacctggtgagcctgggcctgaccgtggccaagcccaacctgatcttcctgctggagaggggcgaggccccctggaccctgcagaggcagatccccggcggcaccagcagcgactgcccctgctggggatctggctccggcagcggccccaagaaaaagagaaaagtctaagctgccttctgcggggcttgccttctggccatgcccttcttctctcccttgcacctgtacctcttggtctttgaataaagcctgagtaggaaggctagcaaaaaaaaaaaaaaaaaaaaaaaaaaaaaaaaaaaaaaaaaaaaaaaaaaaaaaaaaaaaaaaaaaaaaaaaaaaaaaaa

SEQ ID NO: 16202 - RNA, 9485 nt, synthetic construct
  source 1..9485: mol_type = other RNA
aggaaataagagagaaaagaagagtaagaagaaatataagagccaccatggcccctaagaagaagcgtaaagtgagccggatggaacgcctcgtctacgaggtgcggcagaagtgcagaaacatcgaggacatctgcatctcctgcggatctctgaacgtgaccctggagcacccactgttcatcggcggcatgtgccagaactgtaaaaactgttttctggagtgtgcctatcaatacgacgatgacggctaccagagctactgcaccatctgttgcggcggaagagaggtgctgatgtgtggaaataacaactgctgccggtgcttctgcgtggaatgcgtggacctgctggtgggccccggcgccgcccaggccgctattaaggaagatccttggaactgctacatgtgcggccacaagggcacatacggcctgctgagacggagagaggactggcctagcagactgcagatgttcttcgccaataaccacgaccaggagttcgacccccctaaggtgtaccctcccgtccccgccgagaagagaaagcccatccgggtcctgagcctgttcgatggcatcgccaccggtctgctggtgctgaaggacctgggcatccaggtggataggtacattgcctccgaggtgtgcgaggactccatcaccgtgggaatggtgcgtcatcagggcaagatcatgtacgtgggcgacgtgcggagcgtgacacagaagcatatccaggagtggggccctttcgacctggtgatcggcggcagcccttgcaatgacctgagcatcgtgaacccagcccggaagggcctgtacgagggaaccggcagactgttcttcgagttttacagactgctgcacgacgcccggcctaaggaaggcgacgaccggcccttcttttggctgttcgagaatgtggtggccatgggagtcagcgacaagcgggatattagccggttcctggagagcaaccccgtgatgatcgatgccaaggaagtgagcgccgcccaccgggccagatacttctggggcaatctgcctggcatgaacagacccctggccagcaccgtgaacgacaagctggagctgcaggagtgcctggagcacggccggatcgccaagttcagcaaggtgagaaccatcaccacccgaagcaacagcatcaaacaaggcaaggaccagcactttcctgtgttcatgaacgagaaggaggacatcctgtggtgtaccgagatggagagagtgttcgggttcccagtccactacacagatgtcagcaacatgtctagactggccagacagagactgctgggaagaagctggtccgtccctgtgatcagacacctgttcgcccctctgaaggagtacttcgcctgcgtgagcagcggcaacagcaacgccaacagccggggccccagcttctctagcggcctggtgccactgtccctgagagggagccacatgggccccatggagatctacaaaaccgtgagcgcctggaagcggcagcctgtgcgcgtgctgagcctgtttcggaatatcgataaagtcctgaaaagcctgggattcctggagagcggctctggctccggcggtggcaccctgaagtacgtggaggatgtgacaaacgtggtcagacgggatgtggagaagtggggccccttcgatctggtgtacggcagcacccaacccctgggcagctcttgtgaccggtgccctggctggtacatgtttcagttccaccggatcctgcagtacgccctgccgagacaggagtcccagcggccattcttttggattttcatggacaacttgctgctgaccgaggatgaccaggaaactaccactcggttcctgcagaccgaagccgtgaccctgcaggacgtgagaggccgggactaccagaacgccatgcgggtgtggtccaacatccctggactgaaaagcaagcacgcacctctgacccctaaagaagaggagtacctgcaggcccaggtgcggagcagaagcaagctggacgcccctaaggtggatctgctggtgaagaattgcctcctgcccctgagagagtacttcaagtatttcagccagaatagtctgcccctgggaggcagcggcggcggcgccctggtgacatttgaggacgtcgccgtgcggttcacccaggaggaatgggctctgctggatccttctcagaaaatcctgtaccgggacgtgatgagagagacataccggaatctgacctccgtgggcatcaactgggaatgttgggaccttgaagcctgcttcagaagcctgggaagaaacctgagagtgcaggtggtgaagagaaagtgcgagctgaccaacagcggcccctgcgccgagggcggcccaagcagcggcgcccctcctcccagcggcggcagcccagccggctccccaacctctaccgaggagggcacctctgagtccgccacccccgagagcggccctggcacctccaccgagcccagcgagggcagcgcacccggcagccctgccggcagccccacctccacagaggagggaaccagcaccgagcccagcgaaggcagcgccccaggcaccagcaccgagcctagtgagcaggagattaaacggatcaacaagatcagaagaagacttgtgaaagacagcaacaccaagaaggccggcaagacaggccccatgaaaaccctgctggttagagtgatgacacccgatctgagagagcggctggaaaacctgagaaagaagcctgaaaatatcccccagcccatcagcaatacatctagagccaacctgaataagctgctgaccgattacaccgaaatgaagaaggcgatcctgcatgtgtactgggaagagttccagaaggaccctgtgggcctgatgagccgggtggcccagcctgccagcaagaagatcgatcagaacaagctgaaacctgagatggacgagaagggcaacctgaccaccgccggctttgcctgctctcagtgtggccagcccctgttcgtgtacaagctggagcaggtgtctgagaagggcaaggcttacaccaactacttcggacggtgcaatgtggccgagcacgaaaagctgatcctgctggcccagctgaagcccgagaaggatagcgacgaagccgtgacatatagcctgggaaagtttgggcagagggccctggatttctacagcattcatgtgaccaaggagtccacccaccccgtgaagcccctggcccagatcgccggaaacagatacgcctccggacctgtgggaaaggccctgagcgacgcatgtatgggcacaatcgcctccttcctgtctaagtaccaggacatcatcatcgaacaccagaaggtggtgaagggcaaccagaagagactggagagcctgcgggagctggccggcaaggaaaacctggaataccctagcgtgaccctgccacctcagcctcacaccaaggagggcgttgatgcctacaacgaagtgatcgcccgggtgcgaatgtgggtgaacctgaacctgtggcagaagctgaagctaagcagagatgatgccaagcctctgctgagactgaagggattcccttcctttcctctggtcgagagacaggccaacgaagtggactggtgggacatggtgtgtaacgtgaagaagctgatcaacgagaaaaaggaggatggcaaggtgttttggcagaatctggctggctacaagagacaggaagccctgagaccatacctgagcagcgaggaagatcggaagaagggaaagaaattcgctcggtaccagctgggcgacctgctgctgcacctggaaaagaagcacggcgaggactggggaaaggtgtacgacgaggcctgggagcggattgacaagaaagtggaaggcctgagcaagcacatcaagctggaagaggaacggagaagcgaggacgcccagagcaaggccgccctgaccgactggctgcgggctaaggccagcttcgtgatcgagggcctgaaggaggccgacaaggacgagttctgcagatgcgagctgaagctgcagaagtggtacggggacctgcggggaaagcccttcgccatcgaagccgagaacagcatcctggacatcagcggcttcagcaagcagtacaactgtgccttcatctggcagaaggacggcgtgaagaagctgaacctgtacctgatcatcaactacttcaagggcggcaagctgcggttcaagaagatcaaacctgaagccttcgaagccaacagattctacaccgtgatcaacaaaaagagcggcgagatcgtgcccatggaggtgaacttcaacttcgacgaccccaacctgatcatcctgcctctggcctttggcaagagacagggcagagaattcatctggaacgacctgctgtccctggaaaccggcagcctgaagctggccaacggaagagtgatcgagaagacactgtacaacagaagaacccggcaggatgagcctgccctgttcgtggccctgaccttcgagcggcgggaggtcctggactcctccaatatcaaaccaatgaacctgatcggcgtggcaagaggcgaaaacatccccgccgtgatcgccctgaccgaccccgagggctgcccactgagccggtttaaggatagcctgggaaacccaacccacatcctgagaatcggcgagagctataaggagaagcagcggaccatccaggccaagaaggaggtggagcagcggagagccggcggctacagccggaagtacgccagcaaagccaagaatctggcagacgatatggtgagaaacaccgctagagatctgctgtactacgccgtgacccaggatgccatgctgatcttcgccaacctgagccggggcttcggccggcagggcaagcggaccttcatggccgagagacagtacacacggatggaggactggctgaccgccaagctggcctacgagggcctgagcaagacctacctgtccaagacactggcccagtacacctccaagacatgcagcaactgtgggtttaccatcaccagcgccgactacgacagggtgctggagaagctgaagaagacagcaacaggctggatgaccacaattaacggcaaggagctgaaggtggagggccagattacctactacaacagatacaagagacagaacgtagtcaaggacctgtccgtcgagctggatagactgagcgaagaatctgtgaacaacgacatctcctcctggacaaagggcagaagcggagaagctctgagcctcctgaagaaaagattctcccatagacccgtgcaggagaagttcgtgtgcctgaactgcggcttcgagacacacgcagccgagcaagccgccctgaacatcgccagatcctggctgttcctgcggagccaggagtacaagaaataccagacaaacaagacaaccggcaacaccgataagagagccttcgtcgagacctggcagtccttttaccggaagaagcttaaggaggtgtggaaacctgccgtgcggtctggcggatctggcggaggctccctgcagggcagcgtgagcttcaaggacgtgaccgtggacttcacccaggaggagtggcaccagctgaaccccgcccagaaggccctgtacagggacgtgatgctggagaactactgccacttcatcagcgtgggcttccacatgaccaagcccgacatgatcaggaagctggagcagggcgaggagctgtggaccgagaggatcttcagcaggcagagccacctggaggaggacggcaaggccggcggcccaagcagcggcgcccctcctcccagcggcggcagcccagccggctccccaacctctaccgaggagggcacctctgagtccgccacccccgagagcggccctggcacctccaccgagcccagcgagggcagcgcacccggcagccctgccggcagccccacctccacagaggagggaaccagcaccgagcccagcgaaggcagcgccccaggcaccagcaccgagcctagtgagcaggagattaaacggatcaacaagatcagaagaagacttgtgaaagacagcaacaccaagaaggccggcaagacaggccccatgaaaaccctgctggttagagtgatgacacccgatctgagagagcggctggaaaacctgagaaagaagcctgaaaatatcccccagcccatcagcaatacatctagagccaacctgaataagctgctgaccgattacaccgaaatgaagaaggcgatcctgcatgtgtactgggaagagttccagaaggaccctgtgggcctgatgagccgggtggcccagcctgccagcaagaagatcgatcagaacaagctgaaacctgagatggacgagaagggcaacctgaccaccgccggctttgcctgctctcagtgtggccagcccctgttcgtgtacaagctggagcaggtgtctgagaagggcaaggcttacaccaactacttcggacggtgcaatgtggccgagcacgaaaagctgatcctgctggcccagctgaagcccgagaaggatagcgacgaagccgtgacatatagcctgggaaagtttgggcagagggccctggatttctacagcattcatgtgaccaaggagtccacccaccccgtgaagcccctggcccagatcgccggaaacagatacgcctccggacctgtgggaaaggccctgagcgacgcatgtatgggcacaatcgcctccttcctgtctaagtaccaggacatcatcatcgaacaccagaaggtggtgaagggcaaccagaagagactggagagcctgcgggagctggccggcaaggaaaacctggaataccctagcgtgaccctgccacctcagcctcacaccaaggagggcgttgatgcctacaacgaagtgatcgcccgggtgcgaatgtgggtgaacctgaacctgtggcagaagctgaagctaagcagagatgatgccaagcctctgctgagactgaagggattcccttcctttcctctggtcgagagacaggccaacgaagtggactggtgggacatggtgtgtaacgtgaagaagctgatcaacgagaaaaaggaggatggcaaggtgttttggcagaatctggctggctacaagagacaggaagccctgagaccatacctgagcagcgaggaagatcggaagaagggaaagaaattcgctcggtaccagctgggcgacctgctgctgcacctggaaaagaagcacggcgaggactggggaaaggtgtacgacgaggcctgggagcggattgacaagaaagtggaaggcctgagcaagcacatcaagctggaagaggaacggagaagcgaggacgcccagagcaaggccgccctgaccgactggctgcgggctaaggccagcttcgtgatcgagggcctgaaggaggccgacaaggacgagttctgcagatgcgagctgaagctgcagaagtggtacggggacctgcggggaaagcccttcgccatcgaagccgagaacagcatcctggacatcagcggcttcagcaagcagtacaactgtgccttcatctggcagaaggacggcgtgaagaagctgaacctgtacctgatcatcaactacttcaagggcggcaagctgcggttcaagaagatcaaacctgaagccttcgaagccaacagattctacaccgtgatcaacaaaaagagcggcgagatcgtgcccatggaggtgaacttcaacttcgacgaccccaacctgatcatcctgcctctggcctttggcaagagacagggcagagaattcatctggaacgacctgctgtccctggaaaccggcagcctgaagctggccaacggaagagtgatcgagaagacactgtacaacagaagaacccggcaggatgagcctgccctgttcgtggccctgaccttcgagcggcgggaggtcctggactcctccaatatcaaaccaatgaacctgatcggcgtggcaagaggcgaaaacatccccgccgtgatcgccctgaccgaccccgagggctgcccactgagccggtttaaggatagcctgggaaacccaacccacatcctgagaatcggcgagagctataaggagaagcagcggaccatccaggccaagaaggaggtggagcagcggagagccggcggctacagccggaagtacgccagcaaagccaagaatctggcagacgatatggtgagaaacaccgctagagatctgctgtactacgccgtgacccaggatgccatgctgatcttcgccaacctgagccggggcttcggccggcagggcaagcggaccttcatggccgagagacagtacacacggatggaggactggctgaccgccaagctggcctacgagggcctgagcaagacctacctgtccaagacactggcccagtacacctccaagacatgcagcaactgtgggtttaccatcaccagcgccgactacgacagggtgctggagaagctgaagaagacagcaacaggctggatgaccacaattaacggcaaggagctgaaggtggagggccagattacctactacaacagatacaagagacagaacgtagtcaaggacctgtccgtcgagctggatagactgagcgaagaatctgtgaacaacgacatctcctcctggacaaagggcagaagcggagaagctctgagcctcctgaagaaaagattctcccatagacccgtgcaggagaagttcgtgtgcctgaactgcggcttcgagacacacgcagccgagcaagccgccctgaacatcgccagatcctggctgttcctgcggagccaggagtacaagaaataccagacaaacaagacaaccggcaacaccgataagagagccttcgtcgagacctggcagtccttttaccggaagaagcttaaggaggtgtggaaacctgccgtgcggtctggcggatctggcggaggctcctctgcagggcagcgtgagcttcaaggacgtgaccgtggacttcacccaggaggagtggcaccagctgaaccccgcccagaaggccctgtacagggacgtgatgctggagaactactgccacttcatcagcgtgggcttccacatgaccaagcccgacatgatcaggaagctggagcagggcgaggagctgtggaccgagaggatcttcagcaggcagagccacctggaggaggacggcaaggccggatctggctccggcagcggccccaagaaaaagagaaaagtctaagctgccttctgcggggcttgccttctggccatgcccttcttctctcccttgcacctgtacctcttggtctttgaataaagcctgagtaggaaggctagcaaaaaaaaaaaaaaaaaaaaaaaaaaaaaaaaaaaaaaaaaaaaaaaaaaaaaaaaaaaaaaaaaaaaaaaaaaaaaaaa

SEQ ID NO: 16203 - RNA, 9485 nt, synthetic construct
  source 1..9485: mol_type = other RNA
aggaaataagagagaaaagaagagtaagaagaaatataagagccaccatggcccctaagaagaagcgtaaagtgagccggatggaacgcctcgtctacgaggtgcggcagaagtgcagaaacatcgaggacatctgcatctcctgcggatctctgaacgtgaccctggagcacccactgttcatcggcggcatgtgccagaactgtaaaaactgttttctggagtgtgcctatcaatacgacgatgacggctaccagagctactgcaccatctgttgcggcggaagagaggtgctgatgtgtggaaataacaactgctgccggtgcttctgcgtggaatgcgtggacctgctggtgggccccggcgccgcccaggccgctattaaggaagatccttggaactgctacatgtgcggccacaagggcacatacggcctgctgagacggagagaggactggcctagcagactgcagatgttcttcgccaataaccacgaccaggagttcgacccccctaaggtgtaccctcccgtccccgccgagaagagaaagcccatccgggtcctgagcctgttcgatggcatcgccaccggtctgctggtgctgaaggacctgggcatccaggtggataggtacattgcctccgaggtgtgcgaggactccatcaccgtgggaatggtgcgtcatcagggcaagatcatgtacgtgggcgacgtgcggagcgtgacacagaagcatatccaggagtggggccctttcgacctggtgatcggcggcagcccttgcaatgacctgagcatcgtgaacccagcccggaagggcctgtacgagggaaccggcagactgttcttcgagttttacagactgctgcacgacgcccggcctaaggaaggcgacgaccggcccttcttttggctgttcgagaatgtggtggccatgggagtcagcgacaagcgggatattagccggttcctggagagcaaccccgtgatgatcgatgccaaggaagtgagcgccgcccaccgggccagatacttctggggcaatctgcctggcatgaacagacccctggccagcaccgtgaacgacaagctggagctgcaggagtgcctggagcacggccggatcgccaagttcagcaaggtgagaaccatcaccacccgaagcaacagcatcaaacaaggcaaggaccagcactttcctgtgttcatgaacgagaaggaggacatcctgtggtgtaccgagatggagagagtgttcgggttcccagtccactacacagatgtcagcaacatgtctagactggccagacagagactgctgggaagaagctggtccgtccctgtgatcagacacctgttcgcccctctgaaggagtacttcgcctgcgtgagcagcggcaacagcaacgccaacagccggggccccagcttctctagcggcctggtgccactgtccctgagagggagccacatgggccccatggagatctacaaaaccgtgagcgcctggaagcggcagcctgtgcgcgtgctgagcctgtttcggaatatcgataaagtcctgaaaagcctgggattcctggagagcggctctggctccggcggtggcaccctgaagtacgtggaggatgtgacaaacgtggtcagacgggatgtggagaagtggggccccttcgatctggtgtacggcagcacccaacccctgggcagctcttgtgaccggtgccctggctggtacatgtttcagttccaccggatcctgcagtacgccctgccgagacaggagtcccagcggccattcttttggattttcatggacaacttgctgctgaccgaggatgaccaggaaactaccactcggttcctgcagaccgaagccgtgaccctgcaggacgtgagaggccgggactaccagaacgccatgcgggtgtggtccaacatccctggactgaaaagcaagcacgcacctctgacccctaaagaagaggagtacctgcaggcccaggtgcggagcagaagcaagctggacgcccctaaggtggatctgctggtgaagaattgcctcctgcccctgagagagtacttcaagtatttcagccagaatagtctgcccctgggaggcagcggcggcggcgccctggtgacatttgaggacgtcgccgtgcggttcacccaggaggaatgggctctgctggatccttctcagaaaatcctgtaccgggacgtgatgagagagacataccggaatctgacctccgtgggcatcaactgggaatgttgggaccttgaagcctgcttcagaagcctgggaagaaacctgagagtgcaggtggtgaagagaaagtgcgagctgaccaacagcggcccctgcgccgagggcggcccaagcagcggcgcccctcctcccagcggcggcagcccagccggctccccaacctctaccgaggagggcacctctgagtccgccacccccgagagcggccctggcacctccaccgagcccagcgagggcagcgcacccggcagccctgccggcagccccacctccacagaggagggaaccagcaccgagcccagcgaaggcagcgccccaggcaccagcaccgagcctagtgagcaggagattaaacggatcaacaagatcagaagaagacttgtgaaagacagcaacaccaagaaggccggcaagacaggccccatgaaaaccctgctggttagagtgatgacacccgatctgagagagcggctggaaaacctgagaaagaagcctgaaaatatcccccagcccatcagcaatacatctagagccaacctgaataagctgctgaccgattacaccgaaatgaagaaggcgatcctgcatgtgtactgggaagagttccagaaggaccctgtgggcctgatgagccgggtggcccagcctgccagcaagaagatcgatcagaacaagctgaaacctgagatggacgagaagggcaacctgaccaccgccggctttgcctgctctcagtgtggccagcccctgttcgtgtacaagctggagcaggtgtctgagaagggcaaggcttacaccaactacttcggacggtgcaatgtggccgagcacgaaaagctgatcctgctggcccagctgaagcccgagaaggatagcgacgaagccgtgacatatagcctgggaaagtttgggcagagggccctggatttctacagcattcatgtgaccaaggagtccacccaccccgtgaagcccctggcccagatcgccggaaacagatacgcctccggacctgtgggaaaggccctgagcgacgcatgtatgggcacaatcgcctccttcctgtctaagtaccaggacatcatcatcgaacaccagaaggtggtgaagggcaaccagaagagactggagagcctgcgggagctggccggcaaggaaaacctggaataccctagcgtgaccctgccacctcagcctcacaccaaggagggcgttgatgcctacaacgaagtgatcgcccgggtgcgaatgtgggtgaacctgaacctgtggcagaagctgaagctaagcagagatgatgccaagcctctgctgagactgaagggattcccttcctttcctctggtcgagagacaggccaacgaagtggactggtgggacatggtgtgtaacgtgaagaagctgatcaacgagaaaaaggaggatggcaaggtgttttggcagaatctggctggctacaagagacaggaagccctgagaccatacctgagcagcgaggaagatcggaagaagggaaagaaattcgctcggtaccagctgggcgacctgctgctgcacctggaaaagaagcacggcgaggactggggaaaggtgtacgacgaggcctgggagcggattgacaagaaagtggaaggcctgagcaagcacatcaagctggaagaggaacggagaagcgaggacgcccagagcaaggccgccctgaccgactggctgcgggctaaggccagcttcgtgatcgagggcctgaaggaggccgacaaggacgagttctgcagatgcgagctgaagctgcagaagtggtacggggacctgcggggaaagcccttcgccatcgaagccgagaacagcatcctggacatcagcggcttcagcaagcagtacaactgtgccttcatctggcagaaggacggcgtgaagaagctgaacctgtacctgatcatcaactacttcaagggcggcaagctgcggttcaagaagatcaaacctgaagccttcgaagccaacagattctacaccgtgatcaacaaaaagagcggcgagatcgtgcccatggaggtgaacttcaacttcgacgaccccaacctgatcatcctgcctctggcctttggcaagagacagggcagagaattcatctggaacgacctgctgtccctggaaaccggcagcctgaagctggccaacggaagagtgatcgagaagacactgtacaacagaagaacccggcaggatgagcctgccctgttcgtggccctgaccttcgagcggcgggaggtcctggactcctccaatatcaaaccaatgaacctgatcggcgtggcaagaggcgaaaacatccccgccgtgatcgccctgaccgaccccgagggctgcccactgagccggtttaaggatagcctgggaaacccaacccacatcctgagaatcggcgagagctataaggagaagcagcggaccatccaggccaagaaggaggtggagcagcggagagccggcggctacagccggaagtacgccagcaaagccaagaatctggcagacgatatggtgagaaacaccgctagagatctgctgtactacgccgtgacccaggatgccatgctgatcttcgccaacctgagccggggcttcggccggcagggcaagcggaccttcatggccgagagacagtacacacggatggaggactggctgaccgccaagctggcctacgagggcctgagcaagacctacctgtccaagacactggcccagtacacctccaagacatgcagcaactgtgggtttaccatcaccagcgccgactacgacagggtgctggagaagctgaagaagacagcaacaggctggatgaccacaattaacggcaaggagctgaaggtggagggccagattacctactacaacagatacaagagacagaacgtagtcaaggacctgtccgtcgagctggatagactgagcgaagaatctgtgaacaacgacatctcctcctggacaaagggcagaagcggagaagctctgagcctcctgaagaaaagattctcccatagacccgtgcaggagaagttcgtgtgcctgaactgcggcttcgagacacacgcagccgagcaagccgccctgaacatcgccagatcctggctgttcctgcggagccaggagtacaagaaataccagacaaacaagacaaccggcaacaccgataagagagccttcgtcgagacctggcagtccttttaccggaagaagcttaaggaggtgtggaaacctgccgtgcggtctggcggatctggcggaggctccgccagcgtggtgttcgaggacgtggccgtgaacttcacccccgaggagtgggccctgctgaaccccggccagaggaagctgtacagggacgtgatgctggagacctgcaggaacctgagcgccgtgggctgcaggagccagggcaacaccagcacccccaggccccagtggagcatcctgctgaacgagccccccggcgaggacaagaccggcatcttcaccaggaaggacagctgcagcgtgggcggcccaagcagcggcgcccctcctcccagcggcggcagcccagccggctccccaacctctaccgaggagggcacctctgagtccgccacccccgagagcggccctggcacctccaccgagcccagcgagggcagcgcacccggcagccctgccggcagccccacctccacagaggagggaaccagcaccgagcccagcgaaggcagcgccccaggcaccagcaccgagcctagtgagcaggagattaaacggatcaacaagatcagaagaagacttgtgaaagacagcaacaccaagaaggccggcaagacaggccccatgaaaaccctgctggttagagtgatgacacccgatctgagagagcggctggaaaacctgagaaagaagcctgaaaatatcccccagcccatcagcaatacatctagagccaacctgaataagctgctgaccgattacaccgaaatgaagaaggcgatcctgcatgtgtactgggaagagttccagaaggaccctgtgggcctgatgagccgggtggcccagcctgccagcaagaagatcgatcagaacaagctgaaacctgagatggacgagaagggcaacctgaccaccgccggctttgcctgctctcagtgtggccagcccctgttcgtgtacaagctggagcaggtgtctgagaagggcaaggcttacaccaactacttcggacggtgcaatgtggccgagcacgaaaagctgatcctgctggcccagctgaagcccgagaaggatagcgacgaagccgtgacatatagcctgggaaagtttgggcagagggccctggatttctacagcattcatgtgaccaaggagtccacccaccccgtgaagcccctggcccagatcgccggaaacagatacgcctccggacctgtgggaaaggccctgagcgacgcatgtatgggcacaatcgcctccttcctgtctaagtaccaggacatcatcatcgaacaccagaaggtggtgaagggcaaccagaagagactggagagcctgcgggagctggccggcaaggaaaacctggaataccctagcgtgaccctgccacctcagcctcacaccaaggagggcgttgatgcctacaacgaagtgatcgcccgggtgcgaatgtgggtgaacctgaacctgtggcagaagctgaagctaagcagagatgatgccaagcctctgctgagactgaagggattcccttcctttcctctggtcgagagacaggccaacgaagtggactggtgggacatggtgtgtaacgtgaagaagctgatcaacgagaaaaaggaggatggcaaggtgttttggcagaatctggctggctacaagagacaggaagccctgagaccatacctgagcagcgaggaagatcggaagaagggaaagaaattcgctcggtaccagctgggcgacctgctgctgcacctggaaaagaagcacggcgaggactggggaaaggtgtacgacgaggcctgggagcggattgacaagaaagtggaaggcctgagcaagcacatcaagctggaagaggaacggagaagcgaggacgcccagagcaaggccgccctgaccgactggctgcgggctaaggccagcttcgtgatcgagggcctgaaggaggccgacaaggacgagttctgcagatgcgagctgaagctgcagaagtggtacggggacctgcggggaaagcccttcgccatcgaagccgagaacagcatcctggacatcagcggcttcagcaagcagtacaactgtgccttcatctggcagaaggacggcgtgaagaagctgaacctgtacctgatcatcaactacttcaagggcggcaagctgcggttcaagaagatcaaacctgaagccttcgaagccaacagattctacaccgtgatcaacaaaaagagcggcgagatcgtgcccatggaggtgaacttcaacttcgacgaccccaacctgatcatcctgcctctggcctttggcaagagacagggcagagaattcatctggaacgacctgctgtccctggaaaccggcagcctgaagctggccaacggaagagtgatcgagaagacactgtacaacagaagaacccggcaggatgagcctgccctgttcgtggccctgaccttcgagcggcgggaggtcctggactcctccaatatcaaaccaatgaacctgatcggcgtggcaagaggcgaaaacatccccgccgtgatcgccctgaccgaccccgagggctgcccactgagccggtttaaggatagcctgggaaacccaacccacatcctgagaatcggcgagagctataaggagaagcagcggaccatccaggccaagaaggaggtggagcagcggagagccggcggctacagccggaagtacgccagcaaagccaagaatctggcagacgatatggtgagaaacaccgctagagatctgctgtactacgccgtgacccaggatgccatgctgatcttcgccaacctgagccggggcttcggccggcagggcaagcggaccttcatggccgagagacagtacacacggatggaggactggctgaccgccaagctggcctacgagggcctgagcaagacctacctgtccaagacactggcccagtacacctccaagacatgcagcaactgtgggtttaccatcaccagcgccgactacgacagggtgctggagaagctgaagaagacagcaacaggctggatgaccacaattaacggcaaggagctgaaggtggagggccagattacctactacaacagatacaagagacagaacgtagtcaaggacctgtccgtcgagctggatagactgagcgaagaatctgtgaacaacgacatctcctcctggacaaagggcagaagcggagaagctctgagcctcctgaagaaaagattctcccatagacccgtgcaggagaagttcgtgtgcctgaactgcggcttcgagacacacgcagccgagcaagccgccctgaacatcgccagatcctggctgttcctgcggagccaggagtacaagaaataccagacaaacaagacaaccggcaacaccgataagagagccttcgtcgagacctggcagtccttttaccggaagaagcttaaggaggtgtggaaacctgccgtgcggtctggcggatctggcggaggctcctgccagcgtggtgttcgaggacgtggccgtgaacttcacccccgaggagtgggccctgctgaaccccggccagaggaagctgtacagggacgtgatgctggagacctgcaggaacctgagcgccgtgggctgcaggagccagggcaacaccagcacccccaggccccagtggagcatcctgctgaacgagccccccggcgaggacaagaccggcatcttcaccaggaaggacagctgcagcgtgggatctggctccggcagcggccccaagaaaaagagaaaagtctaagctgccttctgcggggcttgccttctggccatgcccttcttctctcccttgcacctgtacctcttggtctttgaataaagcctgagtaggaaggctagcaaaaaaaaaaaaaaaaaaaaaaaaaaaaaaaaaaaaaaaaaaaaaaaaaaaaaaaaaaaaaaaaaaaaaaaaaaaaaaaa

SEQ ID NO: 16204 - RNA, 9485 nt, synthetic construct
  source 1..9485: mol_type = other RNA
aggaaataagagagaaaagaagagtaagaagaaatataagagccaccatggcccctaagaagaagcgtaaagtgagccggatggaacgcctcgtctacgaggtgcggcagaagtgcagaaacatcgaggacatctgcatctcctgcggatctctgaacgtgaccctggagcacccactgttcatcggcggcatgtgccagaactgtaaaaactgttttctggagtgtgcctatcaatacgacgatgacggctaccagagctactgcaccatctgttgcggcggaagagaggtgctgatgtgtggaaataacaactgctgccggtgcttctgcgtggaatgcgtggacctgctggtgggccccggcgccgcccaggccgctattaaggaagatccttggaactgctacatgtgcggccacaagggcacatacggcctgctgagacggagagaggactggcctagcagactgcagatgttcttcgccaataaccacgaccaggagttcgacccccctaaggtgtaccctcccgtccccgccgagaagagaaagcccatccgggtcctgagcctgttcgatggcatcgccaccggtctgctggtgctgaaggacctgggcatccaggtggataggtacattgcctccgaggtgtgcgaggactccatcaccgtgggaatggtgcgtcatcagggcaagatcatgtacgtgggcgacgtgcggagcgtgacacagaagcatatccaggagtggggccctttcgacctggtgatcggcggcagcccttgcaatgacctgagcatcgtgaacccagcccggaagggcctgtacgagggaaccggcagactgttcttcgagttttacagactgctgcacgacgcccggcctaaggaaggcgacgaccggcccttcttttggctgttcgagaatgtggtggccatgggagtcagcgacaagcgggatattagccggttcctggagagcaaccccgtgatgatcgatgccaaggaagtgagcgccgcccaccgggccagatacttctggggcaatctgcctggcatgaacagacccctggccagcaccgtgaacgacaagctggagctgcaggagtgcctggagcacggccggatcgccaagttcagcaaggtgagaaccatcaccacccgaagcaacagcatcaaacaaggcaaggaccagcactttcctgtgttcatgaacgagaaggaggacatcctgtggtgtaccgagatggagagagtgttcgggttcccagtccactacacagatgtcagcaacatgtctagactggccagacagagactgctgggaagaagctggtccgtccctgtgatcagacacctgttcgcccctctgaaggagtacttcgcctgcgtgagcagcggcaacagcaacgccaacagccggggccccagcttctctagcggcctggtgccactgtccctgagagggagccacatgggccccatggagatctacaaaaccgtgagcgcctggaagcggcagcctgtgcgcgtgctgagcctgtttcggaatatcgataaagtcctgaaaagcctgggattcctggagagcggctctggctccggcggtggcaccctgaagtacgtggaggatgtgacaaacgtggtcagacgggatgtggagaagtggggccccttcgatctggtgtacggcagcacccaacccctgggcagctcttgtgaccggtgccctggctggtacatgtttcagttccaccggatcctgcagtacgccctgccgagacaggagtcccagcggccattcttttggattttcatggacaacttgctgctgaccgaggatgaccaggaaactaccactcggttcctgcagaccgaagccgtgaccctgcaggacgtgagaggccgggactaccagaacgccatgcgggtgtggtccaacatccctggactgaaaagcaagcacgcacctctgacccctaaagaagaggagtacctgcaggcccaggtgcggagcagaagcaagctggacgcccctaaggtggatctgctggtgaagaattgcctcctgcccctgagagagtacttcaagtatttcagccagaatagtctgcccctgggaggcagcggcggcggcgccctggtgacatttgaggacgtcgccgtgcggttcacccaggaggaatgggctctgctggatccttctcagaaaatcctgtaccgggacgtgatgagagagacataccggaatctgacctccgtgggcatcaactgggaatgttgggaccttgaagcctgcttcagaagcctgggaagaaacctgagagtgcaggtggtgaagagaaagtgcgagctgaccaacagcggcccctgcgccgagggcggcccaagcagcggcgcccctcctcccagcggcggcagcccagccggctccccaacctctaccgaggagggcacctctgagtccgccacccccgagagcggccctggcacctccaccgagcccagcgagggcagcgcacccggcagccctgccggcagccccacctccacagaggagggaaccagcaccgagcccagcgaaggcagcgccccaggcaccagcaccgagcctagtgagcaggagattaaacggatcaacaagatcagaagaagacttgtgaaagacagcaacaccaagaaggccggcaagacaggccccatgaaaaccctgctggttagagtgatgacacccgatctgagagagcggctggaaaacctgagaaagaagcctgaaaatatcccccagcccatcagcaatacatctagagccaacctgaataagctgctgaccgattacaccgaaatgaagaaggcgatcctgcatgtgtactgggaagagttccagaaggaccctgtgggcctgatgagccgggtggcccagcctgccagcaagaagatcgatcagaacaagctgaaacctgagatggacgagaagggcaacctgaccaccgccggctttgcctgctctcagtgtggccagcccctgttcgtgtacaagctggagcaggtgtctgagaagggcaaggcttacaccaactacttcggacggtgcaatgtggccgagcacgaaaagctgatcctgctggcccagctgaagcccgagaaggatagcgacgaagccgtgacatatagcctgggaaagtttgggcagagggccctggatttctacagcattcatgtgaccaaggagtccacccaccccgtgaagcccctggcccagatcgccggaaacagatacgcctccggacctgtgggaaaggccctgagcgacgcatgtatgggcacaatcgcctccttcctgtctaagtaccaggacatcatcatcgaacaccagaaggtggtgaagggcaaccagaagagactggagagcctgcgggagctggccggcaaggaaaacctggaataccctagcgtgaccctgccacctcagcctcacaccaaggagggcgttgatgcctacaacgaagtgatcgcccgggtgcgaatgtgggtgaacctgaacctgtggcagaagctgaagctaagcagagatgatgccaagcctctgctgagactgaagggattcccttcctttcctctggtcgagagacaggccaacgaagtggactggtgggacatggtgtgtaacgtgaagaagctgatcaacgagaaaaaggaggatggcaaggtgttttggcagaatctggctggctacaagagacaggaagccctgagaccatacctgagcagcgaggaagatcggaagaagggaaagaaattcgctcggtaccagctgggcgacctgctgctgcacctggaaaagaagcacggcgaggactggggaaaggtgtacgacgaggcctgggagcggattgacaagaaagtggaaggcctgagcaagcacatcaagctggaagaggaacggagaagcgaggacgcccagagcaaggccgccctgaccgactggctgcgggctaaggccagcttcgtgatcgagggcctgaaggaggccgacaaggacgagttctgcagatgcgagctgaagctgcagaagtggtacggggacctgcggggaaagcccttcgccatcgaagccgagaacagcatcctggacatcagcggcttcagcaagcagtacaactgtgccttcatctggcagaaggacggcgtgaagaagctgaacctgtacctgatcatcaactacttcaagggcggcaagctgcggttcaagaagatcaaacctgaagccttcgaagccaacagattctacaccgtgatcaacaaaaagagcggcgagatcgtgcccatggaggtgaacttcaacttcgacgaccccaacctgatcatcctgcctctggcctttggcaagagacagggcagagaattcatctggaacgacctgctgtccctggaaaccggcagcctgaagctggccaacggaagagtgatcgagaagacactgtacaacagaagaacccggcaggatgagcctgccctgttcgtggccctgaccttcgagcggcgggaggtcctggactcctccaatatcaaaccaatgaacctgatcggcgtggcaagaggcgaaaacatccccgccgtgatcgccctgaccgaccccgagggctgcccactgagccggtttaaggatagcctgggaaacccaacccacatcctgagaatcggcgagagctataaggagaagcagcggaccatccaggccaagaaggaggtggagcagcggagagccggcggctacagccggaagtacgccagcaaagccaagaatctggcagacgatatggtgagaaacaccgctagagatctgctgtactacgccgtgacccaggatgccatgctgatcttcgccaacctgagccggggcttcggccggcagggcaagcggaccttcatggccgagagacagtacacacggatggaggactggctgaccgccaagctggcctacgagggcctgagcaagacctacctgtccaagacactggcccagtacacctccaagacatgcagcaactgtgggtttaccatcaccagcgccgactacgacagggtgctggagaagctgaagaagacagcaacaggctggatgaccacaattaacggcaaggagctgaaggtggagggccagattacctactacaacagatacaagagacagaacgtagtcaaggacctgtccgtcgagctggatagactgagcgaagaatctgtgaacaacgacatctcctcctggacaaagggcagaagcggagaagctctgagcctcctgaagaaaagattctcccatagacccgtgcaggagaagttcgtgtgcctgaactgcggcttcgagacacacgcagccgagcaagccgccctgaacatcgccagatcctggctgttcctgcggagccaggagtacaagaaataccagacaaacaagacaaccggcaacaccgataagagagccttcgtcgagacctggcagtccttttaccggaagaagcttaaggaggtgtggaaacctgccgtgcggtctggcggatctggcggaggctccagcctgaccctggaggacgtggccgtggacttcacctgggaggagtggcagctgctgggccccgcccagaaggacctgtacagggacgtgatgctggagaactacagcaacctggtggccgtgggctaccaggccagcaagcccgacgccctgagcaagctggagcagggcgaggagccctgcaccaccgaggacgagatctacaccaggatctgctgcggcggccagccccagacctgcagcggcggcccaagcagcggcgcccctcctcccagcggcggcagcccagccggctccccaacctctaccgaggagggcacctctgagtccgccacccccgagagcggccctggcacctccaccgagcccagcgagggcagcgcacccggcagccctgccggcagccccacctccacagaggagggaaccagcaccgagcccagcgaaggcagcgccccaggcaccagcaccgagcctagtgagcaggagattaaacggatcaacaagatcagaagaagacttgtgaaagacagcaacaccaagaaggccggcaagacaggccccatgaaaaccctgctggttagagtgatgacacccgatctgagagagcggctggaaaacctgagaaagaagcctgaaaatatcccccagcccatcagcaatacatctagagccaacctgaataagctgctgaccgattacaccgaaatgaagaaggcgatcctgcatgtgtactgggaagagttccagaaggaccctgtgggcctgatgagccgggtggcccagcctgccagcaagaagatcgatcagaacaagctgaaacctgagatggacgagaagggcaacctgaccaccgccggctttgcctgctctcagtgtggccagcccctgttcgtgtacaagctggagcaggtgtctgagaagggcaaggcttacaccaactacttcggacggtgcaatgtggccgagcacgaaaagctgatcctgctggcccagctgaagcccgagaaggatagcgacgaagccgtgacatatagcctgggaaagtttgggcagagggccctggatttctacagcattcatgtgaccaaggagtccacccaccccgtgaagcccctggcccagatcgccggaaacagatacgcctccggacctgtgggaaaggccctgagcgacgcatgtatgggcacaatcgcctccttcctgtctaagtaccaggacatcatcatcgaacaccagaaggtggtgaagggcaaccagaagagactggagagcctgcgggagctggccggcaaggaaaacctggaataccctagcgtgaccctgccacctcagcctcacaccaaggagggcgttgatgcctacaacgaagtgatcgcccgggtgcgaatgtgggtgaacctgaacctgtggcagaagctgaagctaagcagagatgatgccaagcctctgctgagactgaagggattcccttcctttcctctggtcgagagacaggccaacgaagtggactggtgggacatggtgtgtaacgtgaagaagctgatcaacgagaaaaaggaggatggcaaggtgttttggcagaatctggctggctacaagagacaggaagccctgagaccatacctgagcagcgaggaagatcggaagaagggaaagaaattcgctcggtaccagctgggcgacctgctgctgcacctggaaaagaagcacggcgaggactggggaaaggtgtacgacgaggcctgggagcggattgacaagaaagtggaaggcctgagcaagcacatcaagctggaagaggaacggagaagcgaggacgcccagagcaaggccgccctgaccgactggctgcgggctaaggccagcttcgtgatcgagggcctgaaggaggccgacaaggacgagttctgcagatgcgagctgaagctgcagaagtggtacggggacctgcggggaaagcccttcgccatcgaagccgagaacagcatcctggacatcagcggcttcagcaagcagtacaactgtgccttcatctggcagaaggacggcgtgaagaagctgaacctgtacctgatcatcaactacttcaagggcggcaagctgcggttcaagaagatcaaacctgaagccttcgaagccaacagattctacaccgtgatcaacaaaaagagcggcgagatcgtgcccatggaggtgaacttcaacttcgacgaccccaacctgatcatcctgcctctggcctttggcaagagacagggcagagaattcatctggaacgacctgctgtccctggaaaccggcagcctgaagctggccaacggaagagtgatcgagaagacactgtacaacagaagaacccggcaggatgagcctgccctgttcgtggccctgaccttcgagcggcgggaggtcctggactcctccaatatcaaaccaatgaacctgatcggcgtggcaagaggcgaaaacatccccgccgtgatcgccctgaccgaccccgagggctgcccactgagccggtttaaggatagcctgggaaacccaacccacatcctgagaatcggcgagagctataaggagaagcagcggaccatccaggccaagaaggaggtggagcagcggagagccggcggctacagccggaagtacgccagcaaagccaagaatctggcagacgatatggtgagaaacaccgctagagatctgctgtactacgccgtgacccaggatgccatgctgatcttcgccaacctgagccggggcttcggccggcagggcaagcggaccttcatggccgagagacagtacacacggatggaggactggctgaccgccaagctggcctacgagggcctgagcaagacctacctgtccaagacactggcccagtacacctccaagacatgcagcaactgtgggtttaccatcaccagcgccgactacgacagggtgctggagaagctgaagaagacagcaacaggctggatgaccacaattaacggcaaggagctgaaggtggagggccagattacctactacaacagatacaagagacagaacgtagtcaaggacctgtccgtcgagctggatagactgagcgaagaatctgtgaacaacgacatctcctcctggacaaagggcagaagcggagaagctctgagcctcctgaagaaaagattctcccatagacccgtgcaggagaagttcgtgtgcctgaactgcggcttcgagacacacgcagccgagcaagccgccctgaacatcgccagatcctggctgttcctgcggagccaggagtacaagaaataccagacaaacaagacaaccggcaacaccgataagagagccttcgtcgagacctggcagtccttttaccggaagaagcttaaggaggtgtggaaacctgccgtgcggtctggcggatctggcggaggctcctagcctgaccctggaggacgtggccgtggacttcacctgggaggagtggcagctgctgggccccgcccagaaggacctgtacagggacgtgatgctggagaactacagcaacctggtggccgtgggctaccaggccagcaagcccgacgccctgagcaagctggagcagggcgaggagccctgcaccaccgaggacgagatctacaccaggatctgctgcggcggccagccccagacctgcagcggatctggctccggcagcggccccaagaaaaagagaaaagtctaagctgccttctgcggggcttgccttctggccatgcccttcttctctcccttgcacctgtacctcttggtctttgaataaagcctgagtaggaaggctagcaaaaaaaaaaaaaaaaaaaaaaaaaaaaaaaaaaaaaaaaaaaaaaaaaaaaaaaaaaaaaaaaaaaaaaaaaaaaaaaa

SEQ ID NO: 16205 - RNA, 9485 nt, synthetic construct
  source 1..9485: mol_type = other RNA
aggaaataagagagaaaagaagagtaagaagaaatataagagccaccatggcccctaagaagaagcgtaaagtgagccggatggaacgcctcgtctacgaggtgcggcagaagtgcagaaacatcgaggacatctgcatctcctgcggatctctgaacgtgaccctggagcacccactgttcatcggcggcatgtgccagaactgtaaaaactgttttctggagtgtgcctatcaatacgacgatgacggctaccagagctactgcaccatctgttgcggcggaagagaggtgctgatgtgtggaaataacaactgctgccggtgcttctgcgtggaatgcgtggacctgctggtgggccccggcgccgcccaggccgctattaaggaagatccttggaactgctacatgtgcggccacaagggcacatacggcctgctgagacggagagaggactggcctagcagactgcagatgttcttcgccaataaccacgaccaggagttcgacccccctaaggtgtaccctcccgtccccgccgagaagagaaagcccatccgggtcctgagcctgttcgatggcatcgccaccggtctgctggtgctgaaggacctgggcatccaggtggataggtacattgcctccgaggtgtgcgaggactccatcaccgtgggaatggtgcgtcatcagggcaagatcatgtacgtgggcgacgtgcggagcgtgacacagaagcatatccaggagtggggccctttcgacctggtgatcggcggcagcccttgcaatgacctgagcatcgtgaacccagcccggaagggcctgtacgagggaaccggcagactgttcttcgagttttacagactgctgcacgacgcccggcctaaggaaggcgacgaccggcccttcttttggctgttcgagaatgtggtggccatgggagtcagcgacaagcgggatattagccggttcctggagagcaaccccgtgatgatcgatgccaaggaagtgagcgccgcccaccgggccagatacttctggggcaatctgcctggcatgaacagacccctggccagcaccgtgaacgacaagctggagctgcaggagtgcctggagcacggccggatcgccaagttcagcaaggtgagaaccatcaccacccgaagcaacagcatcaaacaaggcaaggaccagcactttcctgtgttcatgaacgagaaggaggacatcctgtggtgtaccgagatggagagagtgttcgggttcccagtccactacacagatgtcagcaacatgtctagactggccagacagagactgctgggaagaagctggtccgtccctgtgatcagacacctgttcgcccctctgaaggagtacttcgcctgcgtgagcagcggcaacagcaacgccaacagccggggccccagcttctctagcggcctggtgccactgtccctgagagggagccacatgggccccatggagatctacaaaaccgtgagcgcctggaagcggcagcctgtgcgcgtgctgagcctgtttcggaatatcgataaagtcctgaaaagcctgggattcctggagagcggctctggctccggcggtggcaccctgaagtacgtggaggatgtgacaaacgtggtcagacgggatgtggagaagtggggccccttcgatctggtgtacggcagcacccaacccctgggcagctcttgtgaccggtgccctggctggtacatgtttcagttccaccggatcctgcagtacgccctgccgagacaggagtcccagcggccattcttttggattttcatggacaacttgctgctgaccgaggatgaccaggaaactaccactcggttcctgcagaccgaagccgtgaccctgcaggacgtgagaggccgggactaccagaacgccatgcgggtgtggtccaacatccctggactgaaaagcaagcacgcacctctgacccctaaagaagaggagtacctgcaggcccaggtgcggagcagaagcaagctggacgcccctaaggtggatctgctggtgaagaattgcctcctgcccctgagagagtacttcaagtatttcagccagaatagtctgcccctgggaggcagcggcggcggcgccctggtgacatttgaggacgtcgccgtgcggttcacccaggaggaatgggctctgctggatccttctcagaaaatcctgtaccgggacgtgatgagagagacataccggaatctgacctccgtgggcatcaactgggaatgttgggaccttgaagcctgcttcagaagcctgggaagaaacctgagagtgcaggtggtgaagagaaagtgcgagctgaccaacagcggcccctgcgccgagggcggcccaagcagcggcgcccctcctcccagcggcggcagcccagccggctccccaacctctaccgaggagggcacctctgagtccgccacccccgagagcggccctggcacctccaccgagcccagcgagggcagcgcacccggcagccctgccggcagccccacctccacagaggagggaaccagcaccgagcccagcgaaggcagcgccccaggcaccagcaccgagcctagtgagcaggagattaaacggatcaacaagatcagaagaagacttgtgaaagacagcaacaccaagaaggccggcaagacaggccccatgaaaaccctgctggttagagtgatgacacccgatctgagagagcggctggaaaacctgagaaagaagcctgaaaatatcccccagcccatcagcaatacatctagagccaacctgaataagctgctgaccgattacaccgaaatgaagaaggcgatcctgcatgtgtactgggaagagttccagaaggaccctgtgggcctgatgagccgggtggcccagcctgccagcaagaagatcgatcagaacaagctgaaacctgagatggacgagaagggcaacctgaccaccgccggctttgcctgctctcagtgtggccagcccctgttcgtgtacaagctggagcaggtgtctgagaagggcaaggcttacaccaactacttcggacggtgcaatgtggccgagcacgaaaagctgatcctgctggcccagctgaagcccgagaaggatagcgacgaagccgtgacatatagcctgggaaagtttgggcagagggccctggatttctacagcattcatgtgaccaaggagtccacccaccccgtgaagcccctggcccagatcgccggaaacagatacgcctccggacctgtgggaaaggccctgagcgacgcatgtatgggcacaatcgcctccttcctgtctaagtaccaggacatcatcatcgaacaccagaaggtggtgaagggcaaccagaagagactggagagcctgcgggagctggccggcaaggaaaacctggaataccctagcgtgaccctgccacctcagcctcacaccaaggagggcgttgatgcctacaacgaagtgatcgcccgggtgcgaatgtgggtgaacctgaacctgtggcagaagctgaagctaagcagagatgatgccaagcctctgctgagactgaagggattcccttcctttcctctggtcgagagacaggccaacgaagtggactggtgggacatggtgtgtaacgtgaagaagctgatcaacgagaaaaaggaggatggcaaggtgttttggcagaatctggctggctacaagagacaggaagccctgagaccatacctgagcagcgaggaagatcggaagaagggaaagaaattcgctcggtaccagctgggcgacctgctgctgcacctggaaaagaagcacggcgaggactggggaaaggtgtacgacgaggcctgggagcggattgacaagaaagtggaaggcctgagcaagcacatcaagctggaagaggaacggagaagcgaggacgcccagagcaaggccgccctgaccgactggctgcgggctaaggccagcttcgtgatcgagggcctgaaggaggccgacaaggacgagttctgcagatgcgagctgaagctgcagaagtggtacggggacctgcggggaaagcccttcgccatcgaagccgagaacagcatcctggacatcagcggcttcagcaagcagtacaactgtgccttcatctggcagaaggacggcgtgaagaagctgaacctgtacctgatcatcaactacttcaagggcggcaagctgcggttcaagaagatcaaacctgaagccttcgaagccaacagattctacaccgtgatcaacaaaaagagcggcgagatcgtgcccatggaggtgaacttcaacttcgacgaccccaacctgatcatcctgcctctggcctttggcaagagacagggcagagaattcatctggaacgacctgctgtccctggaaaccggcagcctgaagctggccaacggaagagtgatcgagaagacactgtacaacagaagaacccggcaggatgagcctgccctgttcgtggccctgaccttcgagcggcgggaggtcctggactcctccaatatcaaaccaatgaacctgatcggcgtggcaagaggcgaaaacatccccgccgtgatcgccctgaccgaccccgagggctgcccactgagccggtttaaggatagcctgggaaacccaacccacatcctgagaatcggcgagagctataaggagaagcagcggaccatccaggccaagaaggaggtggagcagcggagagccggcggctacagccggaagtacgccagcaaagccaagaatctggcagacgatatggtgagaaacaccgctagagatctgctgtactacgccgtgacccaggatgccatgctgatcttcgccaacctgagccggggcttcggccggcagggcaagcggaccttcatggccgagagacagtacacacggatggaggactggctgaccgccaagctggcctacgagggcctgagcaagacctacctgtccaagacactggcccagtacacctccaagacatgcagcaactgtgggtttaccatcaccagcgccgactacgacagggtgctggagaagctgaagaagacagcaacaggctggatgaccacaattaacggcaaggagctgaaggtggagggccagattacctactacaacagatacaagagacagaacgtagtcaaggacctgtccgtcgagctggatagactgagcgaagaatctgtgaacaacgacatctcctcctggacaaagggcagaagcggagaagctctgagcctcctgaagaaaagattctcccatagacccgtgcaggagaagttcgtgtgcctgaactgcggcttcgagacacacgcagccgagcaagccgccctgaacatcgccagatcctggctgttcctgcggagccaggagtacaagaaataccagacaaacaagacaaccggcaacaccgataagagagccttcgtcgagacctggcagtccttttaccggaagaagcttaaggaggtgtggaaacctgccgtgcggtctggcggatctggcggaggctccttccaggccagcgtgagcttccaggacgtgaccgtggagttcagccaggaggagtggcagcacctgggccccgtggagaggaccctgtacagggacgtgatgctggagaactacagccacctggtgagcgtgggctactgcttcaccaagcccgagctgatcttcaccctggagcagggcgaggacccctggctgctggagaaggagaagggcttcctgagcaggaacagccccgaggacagcggcggcccaagcagcggcgcccctcctcccagcggcggcagcccagccggctccccaacctctaccgaggagggcacctctgagtccgccacccccgagagcggccctggcacctccaccgagcccagcgagggcagcgcacccggcagccctgccggcagccccacctccacagaggagggaaccagcaccgagcccagcgaaggcagcgccccaggcaccagcaccgagcctagtgagcaggagattaaacggatcaacaagatcagaagaagacttgtgaaagacagcaacaccaagaaggccggcaagacaggccccatgaaaaccctgctggttagagtgatgacacccgatctgagagagcggctggaaaacctgagaaagaagcctgaaaatatcccccagcccatcagcaatacatctagagccaacctgaataagctgctgaccgattacaccgaaatgaagaaggcgatcctgcatgtgtactgggaagagttccagaaggaccctgtgggcctgatgagccgggtggcccagcctgccagcaagaagatcgatcagaacaagctgaaacctgagatggacgagaagggcaacctgaccaccgccggctttgcctgctctcagtgtggccagcccctgttcgtgtacaagctggagcaggtgtctgagaagggcaaggcttacaccaactacttcggacggtgcaatgtggccgagcacgaaaagctgatcctgctggcccagctgaagcccgagaaggatagcgacgaagccgtgacatatagcctgggaaagtttgggcagagggccctggatttctacagcattcatgtgaccaaggagtccacccaccccgtgaagcccctggcccagatcgccggaaacagatacgcctccggacctgtgggaaaggccctgagcgacgcatgtatgggcacaatcgcctccttcctgtctaagtaccaggacatcatcatcgaacaccagaaggtggtgaagggcaaccagaagagactggagagcctgcgggagctggccggcaaggaaaacctggaataccctagcgtgaccctgccacctcagcctcacaccaaggagggcgttgatgcctacaacgaagtgatcgcccgggtgcgaatgtgggtgaacctgaacctgtggcagaagctgaagctaagcagagatgatgccaagcctctgctgagactgaagggattcccttcctttcctctggtcgagagacaggccaacgaagtggactggtgggacatggtgtgtaacgtgaagaagctgatcaacgagaaaaaggaggatggcaaggtgttttggcagaatctggctggctacaagagacaggaagccctgagaccatacctgagcagcgaggaagatcggaagaagggaaagaaattcgctcggtaccagctgggcgacctgctgctgcacctggaaaagaagcacggcgaggactggggaaaggtgtacgacgaggcctgggagcggattgacaagaaagtggaaggcctgagcaagcacatcaagctggaagaggaacggagaagcgaggacgcccagagcaaggccgccctgaccgactggctgcgggctaaggccagcttcgtgatcgagggcctgaaggaggccgacaaggacgagttctgcagatgcgagctgaagctgcagaagtggtacggggacctgcggggaaagcccttcgccatcgaagccgagaacagcatcctggacatcagcggcttcagcaagcagtacaactgtgccttcatctggcagaaggacggcgtgaagaagctgaacctgtacctgatcatcaactacttcaagggcggcaagctgcggttcaagaagatcaaacctgaagccttcgaagccaacagattctacaccgtgatcaacaaaaagagcggcgagatcgtgcccatggaggtgaacttcaacttcgacgaccccaacctgatcatcctgcctctggcctttggcaagagacagggcagagaattcatctggaacgacctgctgtccctggaaaccggcagcctgaagctggccaacggaagagtgatcgagaagacactgtacaacagaagaacccggcaggatgagcctgccctgttcgtggccctgaccttcgagcggcgggaggtcctggactcctccaatatcaaaccaatgaacctgatcggcgtggcaagaggcgaaaacatccccgccgtgatcgccctgaccgaccccgagggctgcccactgagccggtttaaggatagcctgggaaacccaacccacatcctgagaatcggcgagagctataaggagaagcagcggaccatccaggccaagaaggaggtggagcagcggagagccggcggctacagccggaagtacgccagcaaagccaagaatctggcagacgatatggtgagaaacaccgctagagatctgctgtactacgccgtgacccaggatgccatgctgatcttcgccaacctgagccggggcttcggccggcagggcaagcggaccttcatggccgagagacagtacacacggatggaggactggctgaccgccaagctggcctacgagggcctgagcaagacctacctgtccaagacactggcccagtacacctccaagacatgcagcaactgtgggtttaccatcaccagcgccgactacgacagggtgctggagaagctgaagaagacagcaacaggctggatgaccacaattaacggcaaggagctgaaggtggagggccagattacctactacaacagatacaagagacagaacgtagtcaaggacctgtccgtcgagctggatagactgagcgaagaatctgtgaacaacgacatctcctcctggacaaagggcagaagcggagaagctctgagcctcctgaagaaaagattctcccatagacccgtgcaggagaagttcgtgtgcctgaactgcggcttcgagacacacgcagccgagcaagccgccctgaacatcgccagatcctggctgttcctgcggagccaggagtacaagaaataccagacaaacaagacaaccggcaacaccgataagagagccttcgtcgagacctggcagtccttttaccggaagaagcttaaggaggtgtggaaacctgccgtgcggtctggcggatctggcggaggctcctttccaggccagcgtgagcttccaggacgtgaccgtggagttcagccaggaggagtggcagcacctgggccccgtggagaggaccctgtacagggacgtgatgctggagaactacagccacctggtgagcgtgggctactgcttcaccaagcccgagctgatcttcaccctggagcagggcgaggacccctggctgctggagaaggagaagggcttcctgagcaggaacagccccgaggacagcggatctggctccggcagcggccccaagaaaaagagaaaagtctaagctgccttctgcggggcttgccttctggccatgcccttcttctctcccttgcacctgtacctcttggtctttgaataaagcctgagtaggaaggctagcaaaaaaaaaaaaaaaaaaaaaaaaaaaaaaaaaaaaaaaaaaaaaaaaaaaaaaaaaaaaaaaaaaaaaaaaaaaaaaaa

SEQ ID NO: 16206 - RNA, 9485 nt, synthetic construct
  source 1..9485: mol_type = other RNA
aggaaataagagagaaaagaagagtaagaagaaatataagagccaccatggcccctaagaagaagcgtaaagtgagccggatggaacgcctcgtctacgaggtgcggcagaagtgcagaaacatcgaggacatctgcatctcctgcggatctctgaacgtgaccctggagcacccactgttcatcggcggcatgtgccagaactgtaaaaactgttttctggagtgtgcctatcaatacgacgatgacggctaccagagctactgcaccatctgttgcggcggaagagaggtgctgatgtgtggaaataacaactgctgccggtgcttctgcgtggaatgcgtggacctgctggtgggccccggcgccgcccaggccgctattaaggaagatccttggaactgctacatgtgcggccacaagggcacatacggcctgctgagacggagagaggactggcctagcagactgcagatgttcttcgccaataaccacgaccaggagttcgacccccctaaggtgtaccctcccgtccccgccgagaagagaaagcccatccgggtcctgagcctgttcgatggcatcgccaccggtctgctggtgctgaaggacctgggcatccaggtggataggtacattgcctccgaggtgtgcgaggactccatcaccgtgggaatggtgcgtcatcagggcaagatcatgtacgtgggcgacgtgcggagcgtgacacagaagcatatccaggagtggggccctttcgacctggtgatcggcggcagcccttgcaatgacctgagcatcgtgaacccagcccggaagggcctgtacgagggaaccggcagactgttcttcgagttttacagactgctgcacgacgcccggcctaaggaaggcgacgaccggcccttcttttggctgttcgagaatgtggtggccatgggagtcagcgacaagcgggatattagccggttcctggagagcaaccccgtgatgatcgatgccaaggaagtgagcgccgcccaccgggccagatacttctggggcaatctgcctggcatgaacagacccctggccagcaccgtgaacgacaagctggagctgcaggagtgcctggagcacggccggatcgccaagttcagcaaggtgagaaccatcaccacccgaagcaacagcatcaaacaaggcaaggaccagcactttcctgtgttcatgaacgagaaggaggacatcctgtggtgtaccgagatggagagagtgttcgggttcccagtccactacacagatgtcagcaacatgtctagactggccagacagagactgctgggaagaagctggtccgtccctgtgatcagacacctgttcgcccctctgaaggagtacttcgcctgcgtgagcagcggcaacagcaacgccaacagccggggccccagcttctctagcggcctggtgccactgtccctgagagggagccacatgggccccatggagatctacaaaaccgtgagcgcctggaagcggcagcctgtgcgcgtgctgagcctgtttcggaatatcgataaagtcctgaaaagcctgggattcctggagagcggctctggctccggcggtggcaccctgaagtacgtggaggatgtgacaaacgtggtcagacgggatgtggagaagtggggccccttcgatctggtgtacggcagcacccaacccctgggcagctcttgtgaccggtgccctggctggtacatgtttcagttccaccggatcctgcagtacgccctgccgagacaggagtcccagcggccattcttttggattttcatggacaacttgctgctgaccgaggatgaccaggaaactaccactcggttcctgcagaccgaagccgtgaccctgcaggacgtgagaggccgggactaccagaacgccatgcgggtgtggtccaacatccctggactgaaaagcaagcacgcacctctgacccctaaagaagaggagtacctgcaggcccaggtgcggagcagaagcaagctggacgcccctaaggtggatctgctggtgaagaattgcctcctgcccctgagagagtacttcaagtatttcagccagaatagtctgcccctgggaggcagcggcggcggcgccctggtgacatttgaggacgtcgccgtgcggttcacccaggaggaatgggctctgctggatccttctcagaaaatcctgtaccgggacgtgatgagagagacataccggaatctgacctccgtgggcatcaactgggaatgttgggaccttgaagcctgcttcagaagcctgggaagaaacctgagagtgcaggtggtgaagagaaagtgcgagctgaccaacagcggcccctgcgccgagggcggcccaagcagcggcgcccctcctcccagcggcggcagcccagccggctccccaacctctaccgaggagggcacctctgagtccgccacccccgagagcggccctggcacctccaccgagcccagcgagggcagcgcacccggcagccctgccggcagccccacctccacagaggagggaaccagcaccgagcccagcgaaggcagcgccccaggcaccagcaccgagcctagtgagcaggagattaaacggatcaacaagatcagaagaagacttgtgaaagacagcaacaccaagaaggccggcaagacaggccccatgaaaaccctgctggttagagtgatgacacccgatctgagagagcggctggaaaacctgagaaagaagcctgaaaatatcccccagcccatcagcaatacatctagagccaacctgaataagctgctgaccgattacaccgaaatgaagaaggcgatcctgcatgtgtactgggaagagttccagaaggaccctgtgggcctgatgagccgggtggcccagcctgccagcaagaagatcgatcagaacaagctgaaacctgagatggacgagaagggcaacctgaccaccgccggctttgcctgctctcagtgtggccagcccctgttcgtgtacaagctggagcaggtgtctgagaagggcaaggcttacaccaactacttcggacggtgcaatgtggccgagcacgaaaagctgatcctgctggcccagctgaagcccgagaaggatagcgacgaagccgtgacatatagcctgggaaagtttgggcagagggccctggatttctacagcattcatgtgaccaaggagtccacccaccccgtgaagcccctggcccagatcgccggaaacagatacgcctccggacctgtgggaaaggccctgagcgacgcatgtatgggcacaatcgcctccttcctgtctaagtaccaggacatcatcatcgaacaccagaaggtggtgaagggcaaccagaagagactggagagcctgcgggagctggccggcaaggaaaacctggaataccctagcgtgaccctgccacctcagcctcacaccaaggagggcgttgatgcctacaacgaagtgatcgcccgggtgcgaatgtgggtgaacctgaacctgtggcagaagctgaagctaagcagagatgatgccaagcctctgctgagactgaagggattcccttcctttcctctggtcgagagacaggccaacgaagtggactggtgggacatggtgtgtaacgtgaagaagctgatcaacgagaaaaaggaggatggcaaggtgttttggcagaatctggctggctacaagagacaggaagccctgagaccatacctgagcagcgaggaagatcggaagaagggaaagaaattcgctcggtaccagctgggcgacctgctgctgcacctggaaaagaagcacggcgaggactggggaaaggtgtacgacgaggcctgggagcggattgacaagaaagtggaaggcctgagcaagcacatcaagctggaagaggaacggagaagcgaggacgcccagagcaaggccgccctgaccgactggctgcgggctaaggccagcttcgtgatcgagggcctgaaggaggccgacaaggacgagttctgcagatgcgagctgaagctgcagaagtggtacggggacctgcggggaaagcccttcgccatcgaagccgagaacagcatcctggacatcagcggcttcagcaagcagtacaactgtgccttcatctggcagaaggacggcgtgaagaagctgaacctgtacctgatcatcaactacttcaagggcggcaagctgcggttcaagaagatcaaacctgaagccttcgaagccaacagattctacaccgtgatcaacaaaaagagcggcgagatcgtgcccatggaggtgaacttcaacttcgacgaccccaacctgatcatcctgcctctggcctttggcaagagacagggcagagaattcatctggaacgacctgctgtccctggaaaccggcagcctgaagctggccaacggaagagtgatcgagaagacactgtacaacagaagaacccggcaggatgagcctgccctgttcgtggccctgaccttcgagcggcgggaggtcctggactcctccaatatcaaaccaatgaacctgatcggcgtggcaagaggcgaaaacatccccgccgtgatcgccctgaccgaccccgagggctgcccactgagccggtttaaggatagcctgggaaacccaacccacatcctgagaatcggcgagagctataaggagaagcagcggaccatccaggccaagaaggaggtggagcagcggagagccggcggctacagccggaagtacgccagcaaagccaagaatctggcagacgatatggtgagaaacaccgctagagatctgctgtactacgccgtgacccaggatgccatgctgatcttcgccaacctgagccggggcttcggccggcagggcaagcggaccttcatggccgagagacagtacacacggatggaggactggctgaccgccaagctggcctacgagggcctgagcaagacctacctgtccaagacactggcccagtacacctccaagacatgcagcaactgtgggtttaccatcaccagcgccgactacgacagggtgctggagaagctgaagaagacagcaacaggctggatgaccacaattaacggcaaggagctgaaggtggagggccagattacctactacaacagatacaagagacagaacgtagtcaaggacctgtccgtcgagctggatagactgagcgaagaatctgtgaacaacgacatctcctcctggacaaagggcagaagcggagaagctctgagcctcctgaagaaaagattctcccatagacccgtgcaggagaagttcgtgtgcctgaactgcggcttcgagacacacgcagccgagcaagccgccctgaacatcgccagatcctggctgttcctgcggagccaggagtacaagaaataccagacaaacaagacaaccggcaacaccgataagagagccttcgtcgagacctggcagtccttttaccggaagaagcttaaggaggtgtggaaacctgccgtgcggtctggcggatctggcggaggctccccccaggtgagcctgaccttcgaggacgtggccgtgctgttcaccagggacgagtggaggaagctggcccccagccagaggaacctgtacagggacgtgatgctggagaactacaggaacctggtgagcctgggcctgcccttcaccaagcccaaggtgatcagcctgctgcagcagggcgaggacccctggaaggtggagaaggactgcttcggcggcagcttcctgggctgcaagagcaacggcggcccaagcagcggcgcccctcctcccagcggcggcagcccagccggctccccaacctctaccgaggagggcacctctgagtccgccacccccgagagcggccctggcacctccaccgagcccagcgagggcagcgcacccggcagccctgccggcagccccacctccacagaggagggaaccagcaccgagcccagcgaaggcagcgccccaggcaccagcaccgagcctagtgagcaggagattaaacggatcaacaagatcagaagaagacttgtgaaagacagcaacaccaagaaggccggcaagacaggccccatgaaaaccctgctggttagagtgatgacacccgatctgagagagcggctggaaaacctgagaaagaagcctgaaaatatcccccagcccatcagcaatacatctagagccaacctgaataagctgctgaccgattacaccgaaatgaagaaggcgatcctgcatgtgtactgggaagagttccagaaggaccctgtgggcctgatgagccgggtggcccagcctgccagcaagaagatcgatcagaacaagctgaaacctgagatggacgagaagggcaacctgaccaccgccggctttgcctgctctcagtgtggccagcccctgttcgtgtacaagctggagcaggtgtctgagaagggcaaggcttacaccaactacttcggacggtgcaatgtggccgagcacgaaaagctgatcctgctggcccagctgaagcccgagaaggatagcgacgaagccgtgacatatagcctgggaaagtttgggcagagggccctggatttctacagcattcatgtgaccaaggagtccacccaccccgtgaagcccctggcccagatcgccggaaacagatacgcctccggacctgtgggaaaggccctgagcgacgcatgtatgggcacaatcgcctccttcctgtctaagtaccaggacatcatcatcgaacaccagaaggtggtgaagggcaaccagaagagactggagagcctgcgggagctggccggcaaggaaaacctggaataccctagcgtgaccctgccacctcagcctcacaccaaggagggcgttgatgcctacaacgaagtgatcgcccgggtgcgaatgtgggtgaacctgaacctgtggcagaagctgaagctaagcagagatgatgccaagcctctgctgagactgaagggattcccttcctttcctctggtcgagagacaggccaacgaagtggactggtgggacatggtgtgtaacgtgaagaagctgatcaacgagaaaaaggaggatggcaaggtgttttggcagaatctggctggctacaagagacaggaagccctgagaccatacctgagcagcgaggaagatcggaagaagggaaagaaattcgctcggtaccagctgggcgacctgctgctgcacctggaaaagaagcacggcgaggactggggaaaggtgtacgacgaggcctgggagcggattgacaagaaagtggaaggcctgagcaagcacatcaagctggaagaggaacggagaagcgaggacgcccagagcaaggccgccctgaccgactggctgcgggctaaggccagcttcgtgatcgagggcctgaaggaggccgacaaggacgagttctgcagatgcgagctgaagctgcagaagtggtacggggacctgcggggaaagcccttcgccatcgaagccgagaacagcatcctggacatcagcggcttcagcaagcagtacaactgtgccttcatctggcagaaggacggcgtgaagaagctgaacctgtacctgatcatcaactacttcaagggcggcaagctgcggttcaagaagatcaaacctgaagccttcgaagccaacagattctacaccgtgatcaacaaaaagagcggcgagatcgtgcccatggaggtgaacttcaacttcgacgaccccaacctgatcatcctgcctctggcctttggcaagagacagggcagagaattcatctggaacgacctgctgtccctggaaaccggcagcctgaagctggccaacggaagagtgatcgagaagacactgtacaacagaagaacccggcaggatgagcctgccctgttcgtggccctgaccttcgagcggcgggaggtcctggactcctccaatatcaaaccaatgaacctgatcggcgtggcaagaggcgaaaacatccccgccgtgatcgccctgaccgaccccgagggctgcccactgagccggtttaaggatagcctgggaaacccaacccacatcctgagaatcggcgagagctataaggagaagcagcggaccatccaggccaagaaggaggtggagcagcggagagccggcggctacagccggaagtacgccagcaaagccaagaatctggcagacgatatggtgagaaacaccgctagagatctgctgtactacgccgtgacccaggatgccatgctgatcttcgccaacctgagccggggcttcggccggcagggcaagcggaccttcatggccgagagacagtacacacggatggaggactggctgaccgccaagctggcctacgagggcctgagcaagacctacctgtccaagacactggcccagtacacctccaagacatgcagcaactgtgggtttaccatcaccagcgccgactacgacagggtgctggagaagctgaagaagacagcaacaggctggatgaccacaattaacggcaaggagctgaaggtggagggccagattacctactacaacagatacaagagacagaacgtagtcaaggacctgtccgtcgagctggatagactgagcgaagaatctgtgaacaacgacatctcctcctggacaaagggcagaagcggagaagctctgagcctcctgaagaaaagattctcccatagacccgtgcaggagaagttcgtgtgcctgaactgcggcttcgagacacacgcagccgagcaagccgccctgaacatcgccagatcctggctgttcctgcggagccaggagtacaagaaataccagacaaacaagacaaccggcaacaccgataagagagccttcgtcgagacctggcagtccttttaccggaagaagcttaaggaggtgtggaaacctgccgtgcggtctggcggatctggcggaggctcctccccaggtgagcctgaccttcgaggacgtggccgtgctgttcaccagggacgagtggaggaagctggcccccagccagaggaacctgtacagggacgtgatgctggagaactacaggaacctggtgagcctgggcctgcccttcaccaagcccaaggtgatcagcctgctgcagcagggcgaggacccctggaaggtggagaaggactgcttcggcggcagcttcctgggctgcaagagcaacggatctggctccggcagcggccccaagaaaaagagaaaagtctaagctgccttctgcggggcttgccttctggccatgcccttcttctctcccttgcacctgtacctcttggtctttgaataaagcctgagtaggaaggctagcaaaaaaaaaaaaaaaaaaaaaaaaaaaaaaaaaaaaaaaaaaaaaaaaaaaaaaaaaaaaaaaaaaaaaaaaaaaaaaaa

SEQ ID NO: 16207 - RNA, 9479 nt, synthetic construct
  source 1..9479: mol_type = other RNA
aggaaataagagagaaaagaagagtaagaagaaatataagagccaccatggcccctaagaagaagcgtaaagtgagccggatggaacgcctcgtctacgaggtgcggcagaagtgcagaaacatcgaggacatctgcatctcctgcggatctctgaacgtgaccctggagcacccactgttcatcggcggcatgtgccagaactgtaaaaactgttttctggagtgtgcctatcaatacgacgatgacggctaccagagctactgcaccatctgttgcggcggaagagaggtgctgatgtgtggaaataacaactgctgccggtgcttctgcgtggaatgcgtggacctgctggtgggccccggcgccgcccaggccgctattaaggaagatccttggaactgctacatgtgcggccacaagggcacatacggcctgctgagacggagagaggactggcctagcagactgcagatgttcttcgccaataaccacgaccaggagttcgacccccctaaggtgtaccctcccgtccccgccgagaagagaaagcccatccgggtcctgagcctgttcgatggcatcgccaccggtctgctggtgctgaaggacctgggcatccaggtggataggtacattgcctccgaggtgtgcgaggactccatcaccgtgggaatggtgcgtcatcagggcaagatcatgtacgtgggcgacgtgcggagcgtgacacagaagcatatccaggagtggggccctttcgacctggtgatcggcggcagcccttgcaatgacctgagcatcgtgaacccagcccggaagggcctgtacgagggaaccggcagactgttcttcgagttttacagactgctgcacgacgcccggcctaaggaaggcgacgaccggcccttcttttggctgttcgagaatgtggtggccatgggagtcagcgacaagcgggatattagccggttcctggagagcaaccccgtgatgatcgatgccaaggaagtgagcgccgcccaccgggccagatacttctggggcaatctgcctggcatgaacagacccctggccagcaccgtgaacgacaagctggagctgcaggagtgcctggagcacggccggatcgccaagttcagcaaggtgagaaccatcaccacccgaagcaacagcatcaaacaaggcaaggaccagcactttcctgtgttcatgaacgagaaggaggacatcctgtggtgtaccgagatggagagagtgttcgggttcccagtccactacacagatgtcagcaacatgtctagactggccagacagagactgctgggaagaagctggtccgtccctgtgatcagacacctgttcgcccctctgaaggagtacttcgcctgcgtgagcagcggcaacagcaacgccaacagccggggccccagcttctctagcggcctggtgccactgtccctgagagggagccacatgggccccatggagatctacaaaaccgtgagcgcctggaagcggcagcctgtgcgcgtgctgagcctgtttcggaatatcgataaagtcctgaaaagcctgggattcctggagagcggctctggctccggcggtggcaccctgaagtacgtggaggatgtgacaaacgtggtcagacgggatgtggagaagtggggccccttcgatctggtgtacggcagcacccaacccctgggcagctcttgtgaccggtgccctggctggtacatgtttcagttccaccggatcctgcagtacgccctgccgagacaggagtcccagcggccattcttttggattttcatggacaacttgctgctgaccgaggatgaccaggaaactaccactcggttcctgcagaccgaagccgtgaccctgcaggacgtgagaggccgggactaccagaacgccatgcgggtgtggtccaacatccctggactgaaaagcaagcacgcacctctgacccctaaagaagaggagtacctgcaggcccaggtgcggagcagaagcaagctggacgcccctaaggtggatctgctggtgaagaattgcctcctgcccctgagagagtacttcaagtatttcagccagaatagtctgcccctgggaggcagcggcggcggcgccctggtgacatttgaggacgtcgccgtgcggttcacccaggaggaatgggctctgctggatccttctcagaaaatcctgtaccgggacgtgatgagagagacataccggaatctgacctccgtgggcatcaactgggaatgttgggaccttgaagcctgcttcagaagcctgggaagaaacctgagagtgcaggtggtgaagagaaagtgcgagctgaccaacagcggcccctgcgccgagggcggcccaagcagcggcgcccctcctcccagcggcggcagcccagccggctccccaacctctaccgaggagggcacctctgagtccgccacccccgagagcggccctggcacctccaccgagcccagcgagggcagcgcacccggcagccctgccggcagccccacctccacagaggagggaaccagcaccgagcccagcgaaggcagcgccccaggcaccagcaccgagcctagtgagcaggagattaaacggatcaacaagatcagaagaagacttgtgaaagacagcaacaccaagaaggccggcaagacaggccccatgaaaaccctgctggttagagtgatgacacccgatctgagagagcggctggaaaacctgagaaagaagcctgaaaatatcccccagcccatcagcaatacatctagagccaacctgaataagctgctgaccgattacaccgaaatgaagaaggcgatcctgcatgtgtactgggaagagttccagaaggaccctgtgggcctgatgagccgggtggcccagcctgccagcaagaagatcgatcagaacaagctgaaacctgagatggacgagaagggcaacctgaccaccgccggctttgcctgctctcagtgtggccagcccctgttcgtgtacaagctggagcaggtgtctgagaagggcaaggcttacaccaactacttcggacggtgcaatgtggccgagcacgaaaagctgatcctgctggcccagctgaagcccgagaaggatagcgacgaagccgtgacatatagcctgggaaagtttgggcagagggccctggatttctacagcattcatgtgaccaaggagtccacccaccccgtgaagcccctggcccagatcgccggaaacagatacgcctccggacctgtgggaaaggccctgagcgacgcatgtatgggcacaatcgcctccttcctgtctaagtaccaggacatcatcatcgaacaccagaaggtggtgaagggcaaccagaagagactggagagcctgcgggagctggccggcaaggaaaacctggaataccctagcgtgaccctgccacctcagcctcacaccaaggagggcgttgatgcctacaacgaagtgatcgcccgggtgcgaatgtgggtgaacctgaacctgtggcagaagctgaagctaagcagagatgatgccaagcctctgctgagactgaagggattcccttcctttcctctggtcgagagacaggccaacgaagtggactggtgggacatggtgtgtaacgtgaagaagctgatcaacgagaaaaaggaggatggcaaggtgttttggcagaatctggctggctacaagagacaggaagccctgagaccatacctgagcagcgaggaagatcggaagaagggaaagaaattcgctcggtaccagctgggcgacctgctgctgcacctggaaaagaagcacggcgaggactggggaaaggtgtacgacgaggcctgggagcggattgacaagaaagtggaaggcctgagcaagcacatcaagctggaagaggaacggagaagcgaggacgcccagagcaaggccgccctgaccgactggctgcgggctaaggccagcttcgtgatcgagggcctgaaggaggccgacaaggacgagttctgcagatgcgagctgaagctgcagaagtggtacggggacctgcggggaaagcccttcgccatcgaagccgagaacagcatcctggacatcagcggcttcagcaagcagtacaactgtgccttcatctggcagaaggacggcgtgaagaagctgaacctgtacctgatcatcaactacttcaagggcggcaagctgcggttcaagaagatcaaacctgaagccttcgaagccaacagattctacaccgtgatcaacaaaaagagcggcgagatcgtgcccatggaggtgaacttcaacttcgacgaccccaacctgatcatcctgcctctggcctttggcaagagacagggcagagaattcatctggaacgacctgctgtccctggaaaccggcagcctgaagctggccaacggaagagtgatcgagaagacactgtacaacagaagaacccggcaggatgagcctgccctgttcgtggccctgaccttcgagcggcgggaggtcctggactcctccaatatcaaaccaatgaacctgatcggcgtggcaagaggcgaaaacatccccgccgtgatcgccctgaccgaccccgagggctgcccactgagccggtttaaggatagcctgggaaacccaacccacatcctgagaatcggcgagagctataaggagaagcagcggaccatccaggccaagaaggaggtggagcagcggagagccggcggctacagccggaagtacgccagcaaagccaagaatctggcagacgatatggtgagaaacaccgctagagatctgctgtactacgccgtgacccaggatgccatgctgatcttcgccaacctgagccggggcttcggccggcagggcaagcggaccttcatggccgagagacagtacacacggatggaggactggctgaccgccaagctggcctacgagggcctgagcaagacctacctgtccaagacactggcccagtacacctccaagacatgcagcaactgtgggtttaccatcaccagcgccgactacgacagggtgctggagaagctgaagaagacagcaacaggctggatgaccacaattaacggcaaggagctgaaggtggagggccagattacctactacaacagatacaagagacagaacgtagtcaaggacctgtccgtcgagctggatagactgagcgaagaatctgtgaacaacgacatctcctcctggacaaagggcagaagcggagaagctctgagcctcctgaagaaaagattctcccatagacccgtgcaggagaagttcgtgtgcctgaactgcggcttcgagacacacgcagccgagcaagccgccctgaacatcgccagatcctggctgttcctgcggagccaggagtacaagaaataccagacaaacaagacaaccggcaacaccgataagagagccttcgtcgagacctggcagtccttttaccggaagaagcttaaggaggtgtggaaacctgccgtgcggtctggcggatctggcggaggctccgacagcgtggccttcgaggacgtggccgtgaacttcacccaggaggagtgggccctgctgagccccagccagaagaacctgtacagagacgtgaccctggagaccttcagaaacctggccagcgtgggcatccagtggaaggaccaggacatcgagaacctgtaccagaacctgggcatcaagctgagaagcctggtggagagactgtgcggcagaaaggagggcaacgagcacagagagggcggcccaagcagcggcgcccctcctcccagcggcggcagcccagccggctccccaacctctaccgaggagggcacctctgagtccgccacccccgagagcggccctggcacctccaccgagcccagcgagggcagcgcacccggcagccctgccggcagccccacctccacagaggagggaaccagcaccgagcccagcgaaggcagcgccccaggcaccagcaccgagcctagtgagcaggagattaaacggatcaacaagatcagaagaagacttgtgaaagacagcaacaccaagaaggccggcaagacaggccccatgaaaaccctgctggttagagtgatgacacccgatctgagagagcggctggaaaacctgagaaagaagcctgaaaatatcccccagcccatcagcaatacatctagagccaacctgaataagctgctgaccgattacaccgaaatgaagaaggcgatcctgcatgtgtactgggaagagttccagaaggaccctgtgggcctgatgagccgggtggcccagcctgccagcaagaagatcgatcagaacaagctgaaacctgagatggacgagaagggcaacctgaccaccgccggctttgcctgctctcagtgtggccagcccctgttcgtgtacaagctggagcaggtgtctgagaagggcaaggcttacaccaactacttcggacggtgcaatgtggccgagcacgaaaagctgatcctgctggcccagctgaagcccgagaaggatagcgacgaagccgtgacatatagcctgggaaagtttgggcagagggccctggatttctacagcattcatgtgaccaaggagtccacccaccccgtgaagcccctggcccagatcgccggaaacagatacgcctccggacctgtgggaaaggccctgagcgacgcatgtatgggcacaatcgcctccttcctgtctaagtaccaggacatcatcatcgaacaccagaaggtggtgaagggcaaccagaagagactggagagcctgcgggagctggccggcaaggaaaacctggaataccctagcgtgaccctgccacctcagcctcacaccaaggagggcgttgatgcctacaacgaagtgatcgcccgggtgcgaatgtgggtgaacctgaacctgtggcagaagctgaagctaagcagagatgatgccaagcctctgctgagactgaagggattcccttcctttcctctggtcgagagacaggccaacgaagtggactggtgggacatggtgtgtaacgtgaagaagctgatcaacgagaaaaaggaggatggcaaggtgttttggcagaatctggctggctacaagagacaggaagccctgagaccatacctgagcagcgaggaagatcggaagaagggaaagaaattcgctcggtaccagctgggcgacctgctgctgcacctggaaaagaagcacggcgaggactggggaaaggtgtacgacgaggcctgggagcggattgacaagaaagtggaaggcctgagcaagcacatcaagctggaagaggaacggagaagcgaggacgcccagagcaaggccgccctgaccgactggctgcgggctaaggccagcttcgtgatcgagggcctgaaggaggccgacaaggacgagttctgcagatgcgagctgaagctgcagaagtggtacggggacctgcggggaaagcccttcgccatcgaagccgagaacagcatcctggacatcagcggcttcagcaagcagtacaactgtgccttcatctggcagaaggacggcgtgaagaagctgaacctgtacctgatcatcaactacttcaagggcggcaagctgcggttcaagaagatcaaacctgaagccttcgaagccaacagattctacaccgtgatcaacaaaaagagcggcgagatcgtgcccatggaggtgaacttcaacttcgacgaccccaacctgatcatcctgcctctggcctttggcaagagacagggcagagaattcatctggaacgacctgctgtccctggaaaccggcagcctgaagctggccaacggaagagtgatcgagaagacactgtacaacagaagaacccggcaggatgagcctgccctgttcgtggccctgaccttcgagcggcgggaggtcctggactcctccaatatcaaaccaatgaacctgatcggcgtggcaagaggcgaaaacatccccgccgtgatcgccctgaccgaccccgagggctgcccactgagccggtttaaggatagcctgggaaacccaacccacatcctgagaatcggcgagagctataaggagaagcagcggaccatccaggccaagaaggaggtggagcagcggagagccggcggctacagccggaagtacgccagcaaagccaagaatctggcagacgatatggtgagaaacaccgctagagatctgctgtactacgccgtgacccaggatgccatgctgatcttcgccaacctgagccggggcttcggccggcagggcaagcggaccttcatggccgagagacagtacacacggatggaggactggctgaccgccaagctggcctacgagggcctgagcaagacctacctgtccaagacactggcccagtacacctccaagacatgcagcaactgtgggtttaccatcaccagcgccgactacgacagggtgctggagaagctgaagaagacagcaacaggctggatgaccacaattaacggcaaggagctgaaggtggagggccagattacctactacaacagatacaagagacagaacgtagtcaaggacctgtccgtcgagctggatagactgagcgaagaatctgtgaacaacgacatctcctcctggacaaagggcagaagcggagaagctctgagcctcctgaagaaaagattctcccatagacccgtgcaggagaagttcgtgtgcctgaactgcggcttcgagacacacgcagccgagcaagccgccctgaacatcgccagatcctggctgttcctgcggagccaggagtacaagaaataccagacaaacaagacaaccggcaacaccgataagagagccttcgtcgagacctggcagtccttttaccggaagaagcttaaggaggtgtggaaacctgccgtgcggtctggcggatctggcggaggctcctgacagcgtggccttcgaggacgtggccgtgaacttcacccaggaggagtgggccctgctgagccccagccagaagaacctgtacagagacgtgaccctggagaccttcagaaacctggccagcgtgggcatccagtggaaggaccaggacatcgagaacctgtaccagaacctgggcatcaagctgagaagcctggtggagagactgtgcggcagaaaggagggcaacgagcacagagagggatctggctccggcagcggccccaagaaaaagagaaaagtctaagctgccttctgcggggcttgccttctggccatgcccttcttctctcccttgcacctgtacctcttggtctttgaataaagcctgagtaggaaggctagcaaaaaaaaaaaaaaaaaaaaaaaaaaaaaaaaaaaaaaaaaaaaaaaaaaaaaaaaaaaaaaaaaaaaaaaaaaaaaaaa

SEQ ID NO: 16208 - RNA, 9485 nt, synthetic construct
  source 1..9485: mol_type = other RNA
aggaaataagagagaaaagaagagtaagaagaaatataagagccaccatggcccctaagaagaagcgtaaagtgagccggatggaacgcctcgtctacgaggtgcggcagaagtgcagaaacatcgaggacatctgcatctcctgcggatctctgaacgtgaccctggagcacccactgttcatcggcggcatgtgccagaactgtaaaaactgttttctggagtgtgcctatcaatacgacgatgacggctaccagagctactgcaccatctgttgcggcggaagagaggtgctgatgtgtggaaataacaactgctgccggtgcttctgcgtggaatgcgtggacctgctggtgggccccggcgccgcccaggccgctattaaggaagatccttggaactgctacatgtgcggccacaagggcacatacggcctgctgagacggagagaggactggcctagcagactgcagatgttcttcgccaataaccacgaccaggagttcgacccccctaaggtgtaccctcccgtccccgccgagaagagaaagcccatccgggtcctgagcctgttcgatggcatcgccaccggtctgctggtgctgaaggacctgggcatccaggtggataggtacattgcctccgaggtgtgcgaggactccatcaccgtgggaatggtgcgtcatcagggcaagatcatgtacgtgggcgacgtgcggagcgtgacacagaagcatatccaggagtggggccctttcgacctggtgatcggcggcagcccttgcaatgacctgagcatcgtgaacccagcccggaagggcctgtacgagggaaccggcagactgttcttcgagttttacagactgctgcacgacgcccggcctaaggaaggcgacgaccggcccttcttttggctgttcgagaatgtggtggccatgggagtcagcgacaagcgggatattagccggttcctggagagcaaccccgtgatgatcgatgccaaggaagtgagcgccgcccaccgggccagatacttctggggcaatctgcctggcatgaacagacccctggccagcaccgtgaacgacaagctggagctgcaggagtgcctggagcacggccggatcgccaagttcagcaaggtgagaaccatcaccacccgaagcaacagcatcaaacaaggcaaggaccagcactttcctgtgttcatgaacgagaaggaggacatcctgtggtgtaccgagatggagagagtgttcgggttcccagtccactacacagatgtcagcaacatgtctagactggccagacagagactgctgggaagaagctggtccgtccctgtgatcagacacctgttcgcccctctgaaggagtacttcgcctgcgtgagcagcggcaacagcaacgccaacagccggggccccagcttctctagcggcctggtgccactgtccctgagagggagccacatgggccccatggagatctacaaaaccgtgagcgcctggaagcggcagcctgtgcgcgtgctgagcctgtttcggaatatcgataaagtcctgaaaagcctgggattcctggagagcggctctggctccggcggtggcaccctgaagtacgtggaggatgtgacaaacgtggtcagacgggatgtggagaagtggggccccttcgatctggtgtacggcagcacccaacccctgggcagctcttgtgaccggtgccctggctggtacatgtttcagttccaccggatcctgcagtacgccctgccgagacaggagtcccagcggccattcttttggattttcatggacaacttgctgctgaccgaggatgaccaggaaactaccactcggttcctgcagaccgaagccgtgaccctgcaggacgtgagaggccgggactaccagaacgccatgcgggtgtggtccaacatccctggactgaaaagcaagcacgcacctctgacccctaaagaagaggagtacctgcaggcccaggtgcggagcagaagcaagctggacgcccctaaggtggatctgctggtgaagaattgcctcctgcccctgagagagtacttcaagtatttcagccagaatagtctgcccctgggaggcagcggcggcggcgccctggtgacatttgaggacgtcgccgtgcggttcacccaggaggaatgggctctgctggatccttctcagaaaatcctgtaccgggacgtgatgagagagacataccggaatctgacctccgtgggcatcaactgggaatgttgggaccttgaagcctgcttcagaagcctgggaagaaacctgagagtgcaggtggtgaagagaaagtgcgagctgaccaacagcggcccctgcgccgagggcggcccaagcagcggcgcccctcctcccagcggcggcagcccagccggctccccaacctctaccgaggagggcacctctgagtccgccacccccgagagcggccctggcacctccaccgagcccagcgagggcagcgcacccggcagccctgccggcagccccacctccacagaggagggaaccagcaccgagcccagcgaaggcagcgccccaggcaccagcaccgagcctagtgagcaggagattaaacggatcaacaagatcagaagaagacttgtgaaagacagcaacaccaagaaggccggcaagacaggccccatgaaaaccctgctggttagagtgatgacacccgatctgagagagcggctggaaaacctgagaaagaagcctgaaaatatcccccagcccatcagcaatacatctagagccaacctgaataagctgctgaccgattacaccgaaatgaagaaggcgatcctgcatgtgtactgggaagagttccagaaggaccctgtgggcctgatgagccgggtggcccagcctgccagcaagaagatcgatcagaacaagctgaaacctgagatggacgagaagggcaacctgaccaccgccggctttgcctgctctcagtgtggccagcccctgttcgtgtacaagctggagcaggtgtctgagaagggcaaggcttacaccaactacttcggacggtgcaatgtggccgagcacgaaaagctgatcctgctggcccagctgaagcccgagaaggatagcgacgaagccgtgacatatagcctgggaaagtttgggcagagggccctggatttctacagcattcatgtgaccaaggagtccacccaccccgtgaagcccctggcccagatcgccggaaacagatacgcctccggacctgtgggaaaggccctgagcgacgcatgtatgggcacaatcgcctccttcctgtctaagtaccaggacatcatcatcgaacaccagaaggtggtgaagggcaaccagaagagactggagagcctgcgggagctggccggcaaggaaaacctggaataccctagcgtgaccctgccacctcagcctcacaccaaggagggcgttgatgcctacaacgaagtgatcgcccgggtgcgaatgtgggtgaacctgaacctgtggcagaagctgaagctaagcagagatgatgccaagcctctgctgagactgaagggattcccttcctttcctctggtcgagagacaggccaacgaagtggactggtgggacatggtgtgtaacgtgaagaagctgatcaacgagaaaaaggaggatggcaaggtgttttggcagaatctggctggctacaagagacaggaagccctgagaccatacctgagcagcgaggaagatcggaagaagggaaagaaattcgctcggtaccagctgggcgacctgctgctgcacctggaaaagaagcacggcgaggactggggaaaggtgtacgacgaggcctgggagcggattgacaagaaagtggaaggcctgagcaagcacatcaagctggaagaggaacggagaagcgaggacgcccagagcaaggccgccctgaccgactggctgcgggctaaggccagcttcgtgatcgagggcctgaaggaggccgacaaggacgagttctgcagatgcgagctgaagctgcagaagtggtacggggacctgcggggaaagcccttcgccatcgaagccgagaacagcatcctggacatcagcggcttcagcaagcagtacaactgtgccttcatctggcagaaggacggcgtgaagaagctgaacctgtacctgatcatcaactacttcaagggcggcaagctgcggttcaagaagatcaaacctgaagccttcgaagccaacagattctacaccgtgatcaacaaaaagagcggcgagatcgtgcccatggaggtgaacttcaacttcgacgaccccaacctgatcatcctgcctctggcctttggcaagagacagggcagagaattcatctggaacgacctgctgtccctggaaaccggcagcctgaagctggccaacggaagagtgatcgagaagacactgtacaacagaagaacccggcaggatgagcctgccctgttcgtggccctgaccttcgagcggcgggaggtcctggactcctccaatatcaaaccaatgaacctgatcggcgtggcaagaggcgaaaacatccccgccgtgatcgccctgaccgaccccgagggctgcccactgagccggtttaaggatagcctgggaaacccaacccacatcctgagaatcggcgagagctataaggagaagcagcggaccatccaggccaagaaggaggtggagcagcggagagccggcggctacagccggaagtacgccagcaaagccaagaatctggcagacgatatggtgagaaacaccgctagagatctgctgtactacgccgtgacccaggatgccatgctgatcttcgccaacctgagccggggcttcggccggcagggcaagcggaccttcatggccgagagacagtacacacggatggaggactggctgaccgccaagctggcctacgagggcctgagcaagacctacctgtccaagacactggcccagtacacctccaagacatgcagcaactgtgggtttaccatcaccagcgccgactacgacagggtgctggagaagctgaagaagacagcaacaggctggatgaccacaattaacggcaaggagctgaaggtggagggccagattacctactacaacagatacaagagacagaacgtagtcaaggacctgtccgtcgagctggatagactgagcgaagaatctgtgaacaacgacatctcctcctggacaaagggcagaagcggagaagctctgagcctcctgaagaaaagattctcccatagacccgtgcaggagaagttcgtgtgcctgaactgcggcttcgagacacacgcagccgagcaagccgccctgaacatcgccagatcctggctgttcctgcggagccaggagtacaagaaataccagacaaacaagacaaccggcaacaccgataagagagccttcgtcgagacctggcagtccttttaccggaagaagcttaaggaggtgtggaaacctgccgtgcggtctggcggatctggcggaggctccatggccgccgccgccctgagggagcccgcccagggctacgtgaccttcgaggacgtggccgtgtacttcagccaggaggagtggaggctgctggacgaggcccagaggctgctgtacaggaacgtgatgctggagaacttcagcctgatggccagcctgggcctggccagcagcaagacccacgagatcacccagctggagagctgggaggagcccttcgtgcccgcctgggacgtgatgaccggcggcccaagcagcggcgcccctcctcccagcggcggcagcccagccggctccccaacctctaccgaggagggcacctctgagtccgccacccccgagagcggccctggcacctccaccgagcccagcgagggcagcgcacccggcagccctgccggcagccccacctccacagaggagggaaccagcaccgagcccagcgaaggcagcgccccaggcaccagcaccgagcctagtgagcaggagattaaacggatcaacaagatcagaagaagacttgtgaaagacagcaacaccaagaaggccggcaagacaggccccatgaaaaccctgctggttagagtgatgacacccgatctgagagagcggctggaaaacctgagaaagaagcctgaaaatatcccccagcccatcagcaatacatctagagccaacctgaataagctgctgaccgattacaccgaaatgaagaaggcgatcctgcatgtgtactgggaagagttccagaaggaccctgtgggcctgatgagccgggtggcccagcctgccagcaagaagatcgatcagaacaagctgaaacctgagatggacgagaagggcaacctgaccaccgccggctttgcctgctctcagtgtggccagcccctgttcgtgtacaagctggagcaggtgtctgagaagggcaaggcttacaccaactacttcggacggtgcaatgtggccgagcacgaaaagctgatcctgctggcccagctgaagcccgagaaggatagcgacgaagccgtgacatatagcctgggaaagtttgggcagagggccctggatttctacagcattcatgtgaccaaggagtccacccaccccgtgaagcccctggcccagatcgccggaaacagatacgcctccggacctgtgggaaaggccctgagcgacgcatgtatgggcacaatcgcctccttcctgtctaagtaccaggacatcatcatcgaacaccagaaggtggtgaagggcaaccagaagagactggagagcctgcgggagctggccggcaaggaaaacctggaataccctagcgtgaccctgccacctcagcctcacaccaaggagggcgttgatgcctacaacgaagtgatcgcccgggtgcgaatgtgggtgaacctgaacctgtggcagaagctgaagctaagcagagatgatgccaagcctctgctgagactgaagggattcccttcctttcctctggtcgagagacaggccaacgaagtggactggtgggacatggtgtgtaacgtgaagaagctgatcaacgagaaaaaggaggatggcaaggtgttttggcagaatctggctggctacaagagacaggaagccctgagaccatacctgagcagcgaggaagatcggaagaagggaaagaaattcgctcggtaccagctgggcgacctgctgctgcacctggaaaagaagcacggcgaggactggggaaaggtgtacgacgaggcctgggagcggattgacaagaaagtggaaggcctgagcaagcacatcaagctggaagaggaacggagaagcgaggacgcccagagcaaggccgccctgaccgactggctgcgggctaaggccagcttcgtgatcgagggcctgaaggaggccgacaaggacgagttctgcagatgcgagctgaagctgcagaagtggtacggggacctgcggggaaagcccttcgccatcgaagccgagaacagcatcctggacatcagcggcttcagcaagcagtacaactgtgccttcatctggcagaaggacggcgtgaagaagctgaacctgtacctgatcatcaactacttcaagggcggcaagctgcggttcaagaagatcaaacctgaagccttcgaagccaacagattctacaccgtgatcaacaaaaagagcggcgagatcgtgcccatggaggtgaacttcaacttcgacgaccccaacctgatcatcctgcctctggcctttggcaagagacagggcagagaattcatctggaacgacctgctgtccctggaaaccggcagcctgaagctggccaacggaagagtgatcgagaagacactgtacaacagaagaacccggcaggatgagcctgccctgttcgtggccctgaccttcgagcggcgggaggtcctggactcctccaatatcaaaccaatgaacctgatcggcgtggcaagaggcgaaaacatccccgccgtgatcgccctgaccgaccccgagggctgcccactgagccggtttaaggatagcctgggaaacccaacccacatcctgagaatcggcgagagctataaggagaagcagcggaccatccaggccaagaaggaggtggagcagcggagagccggcggctacagccggaagtacgccagcaaagccaagaatctggcagacgatatggtgagaaacaccgctagagatctgctgtactacgccgtgacccaggatgccatgctgatcttcgccaacctgagccggggcttcggccggcagggcaagcggaccttcatggccgagagacagtacacacggatggaggactggctgaccgccaagctggcctacgagggcctgagcaagacctacctgtccaagacactggcccagtacacctccaagacatgcagcaactgtgggtttaccatcaccagcgccgactacgacagggtgctggagaagctgaagaagacagcaacaggctggatgaccacaattaacggcaaggagctgaaggtggagggccagattacctactacaacagatacaagagacagaacgtagtcaaggacctgtccgtcgagctggatagactgagcgaagaatctgtgaacaacgacatctcctcctggacaaagggcagaagcggagaagctctgagcctcctgaagaaaagattctcccatagacccgtgcaggagaagttcgtgtgcctgaactgcggcttcgagacacacgcagccgagcaagccgccctgaacatcgccagatcctggctgttcctgcggagccaggagtacaagaaataccagacaaacaagacaaccggcaacaccgataagagagccttcgtcgagacctggcagtccttttaccggaagaagcttaaggaggtgtggaaacctgccgtgcggtctggcggatctggcggaggctcctatggccgccgccgccctgagggagcccgcccagggctacgtgaccttcgaggacgtggccgtgtacttcagccaggaggagtggaggctgctggacgaggcccagaggctgctgtacaggaacgtgatgctggagaacttcagcctgatggccagcctgggcctggccagcagcaagacccacgagatcacccagctggagagctgggaggagcccttcgtgcccgcctgggacgtgatgaccggatctggctccggcagcggccccaagaaaaagagaaaagtctaagctgccttctgcggggcttgccttctggccatgcccttcttctctcccttgcacctgtacctcttggtctttgaataaagcctgagtaggaaggctagcaaaaaaaaaaaaaaaaaaaaaaaaaaaaaaaaaaaaaaaaaaaaaaaaaaaaaaaaaaaaaaaaaaaaaaaaaaaaaaaa

SEQ ID NO: 16209 - RNA, 9485 nt, synthetic construct
  source 1..9485: mol_type = other RNA
aggaaataagagagaaaagaagagtaagaagaaatataagagccaccatggcccctaagaagaagcgtaaagtgagccggatggaacgcctcgtctacgaggtgcggcagaagtgcagaaacatcgaggacatctgcatctcctgcggatctctgaacgtgaccctggagcacccactgttcatcggcggcatgtgccagaactgtaaaaactgttttctggagtgtgcctatcaatacgacgatgacggctaccagagctactgcaccatctgttgcggcggaagagaggtgctgatgtgtggaaataacaactgctgccggtgcttctgcgtggaatgcgtggacctgctggtgggccccggcgccgcccaggccgctattaaggaagatccttggaactgctacatgtgcggccacaagggcacatacggcctgctgagacggagagaggactggcctagcagactgcagatgttcttcgccaataaccacgaccaggagttcgacccccctaaggtgtaccctcccgtccccgccgagaagagaaagcccatccgggtcctgagcctgttcgatggcatcgccaccggtctgctggtgctgaaggacctgggcatccaggtggataggtacattgcctccgaggtgtgcgaggactccatcaccgtgggaatggtgcgtcatcagggcaagatcatgtacgtgggcgacgtgcggagcgtgacacagaagcatatccaggagtggggccctttcgacctggtgatcggcggcagcccttgcaatgacctgagcatcgtgaacccagcccggaagggcctgtacgagggaaccggcagactgttcttcgagttttacagactgctgcacgacgcccggcctaaggaaggcgacgaccggcccttcttttggctgttcgagaatgtggtggccatgggagtcagcgacaagcgggatattagccggttcctggagagcaaccccgtgatgatcgatgccaaggaagtgagcgccgcccaccgggccagatacttctggggcaatctgcctggcatgaacagacccctggccagcaccgtgaacgacaagctggagctgcaggagtgcctggagcacggccggatcgccaagttcagcaaggtgagaaccatcaccacccgaagcaacagcatcaaacaaggcaaggaccagcactttcctgtgttcatgaacgagaaggaggacatcctgtggtgtaccgagatggagagagtgttcgggttcccagtccactacacagatgtcagcaacatgtctagactggccagacagagactgctgggaagaagctggtccgtccctgtgatcagacacctgttcgcccctctgaaggagtacttcgcctgcgtgagcagcggcaacagcaacgccaacagccggggccccagcttctctagcggcctggtgccactgtccctgagagggagccacatgggccccatggagatctacaaaaccgtgagcgcctggaagcggcagcctgtgcgcgtgctgagcctgtttcggaatatcgataaagtcctgaaaagcctgggattcctggagagcggctctggctccggcggtggcaccctgaagtacgtggaggatgtgacaaacgtggtcagacgggatgtggagaagtggggccccttcgatctggtgtacggcagcacccaacccctgggcagctcttgtgaccggtgccctggctggtacatgtttcagttccaccggatcctgcagtacgccctgccgagacaggagtcccagcggccattcttttggattttcatggacaacttgctgctgaccgaggatgaccaggaaactaccactcggttcctgcagaccgaagccgtgaccctgcaggacgtgagaggccgggactaccagaacgccatgcgggtgtggtccaacatccctggactgaaaagcaagcacgcacctctgacccctaaagaagaggagtacctgcaggcccaggtgcggagcagaagcaagctggacgcccctaaggtggatctgctggtgaagaattgcctcctgcccctgagagagtacttcaagtatttcagccagaatagtctgcccctgggaggcagcggcggcggcgccctggtgacatttgaggacgtcgccgtgcggttcacccaggaggaatgggctctgctggatccttctcagaaaatcctgtaccgggacgtgatgagagagacataccggaatctgacctccgtgggcatcaactgggaatgttgggaccttgaagcctgcttcagaagcctgggaagaaacctgagagtgcaggtggtgaagagaaagtgcgagctgaccaacagcggcccctgcgccgagggcggcccaagcagcggcgcccctcctcccagcggcggcagcccagccggctccccaacctctaccgaggagggcacctctgagtccgccacccccgagagcggccctggcacctccaccgagcccagcgagggcagcgcacccggcagccctgccggcagccccacctccacagaggagggaaccagcaccgagcccagcgaaggcagcgccccaggcaccagcaccgagcctagtgagcaggagattaaacggatcaacaagatcagaagaagacttgtgaaagacagcaacaccaagaaggccggcaagacaggccccatgaaaaccctgctggttagagtgatgacacccgatctgagagagcggctggaaaacctgagaaagaagcctgaaaatatcccccagcccatcagcaatacatctagagccaacctgaataagctgctgaccgattacaccgaaatgaagaaggcgatcctgcatgtgtactgggaagagttccagaaggaccctgtgggcctgatgagccgggtggcccagcctgccagcaagaagatcgatcagaacaagctgaaacctgagatggacgagaagggcaacctgaccaccgccggctttgcctgctctcagtgtggccagcccctgttcgtgtacaagctggagcaggtgtctgagaagggcaaggcttacaccaactacttcggacggtgcaatgtggccgagcacgaaaagctgatcctgctggcccagctgaagcccgagaaggatagcgacgaagccgtgacatatagcctgggaaagtttgggcagagggccctggatttctacagcattcatgtgaccaaggagtccacccaccccgtgaagcccctggcccagatcgccggaaacagatacgcctccggacctgtgggaaaggccctgagcgacgcatgtatgggcacaatcgcctccttcctgtctaagtaccaggacatcatcatcgaacaccagaaggtggtgaagggcaaccagaagagactggagagcctgcgggagctggccggcaaggaaaacctggaataccctagcgtgaccctgccacctcagcctcacaccaaggagggcgttgatgcctacaacgaagtgatcgcccgggtgcgaatgtgggtgaacctgaacctgtggcagaagctgaagctaagcagagatgatgccaagcctctgctgagactgaagggattcccttcctttcctctggtcgagagacaggccaacgaagtggactggtgggacatggtgtgtaacgtgaagaagctgatcaacgagaaaaaggaggatggcaaggtgttttggcagaatctggctggctacaagagacaggaagccctgagaccatacctgagcagcgaggaagatcggaagaagggaaagaaattcgctcggtaccagctgggcgacctgctgctgcacctggaaaagaagcacggcgaggactggggaaaggtgtacgacgaggcctgggagcggattgacaagaaagtggaaggcctgagcaagcacatcaagctggaagaggaacggagaagcgaggacgcccagagcaaggccgccctgaccgactggctgcgggctaaggccagcttcgtgatcgagggcctgaaggaggccgacaaggacgagttctgcagatgcgagctgaagctgcagaagtggtacggggacctgcggggaaagcccttcgccatcgaagccgagaacagcatcctggacatcagcggcttcagcaagcagtacaactgtgccttcatctggcagaaggacggcgtgaagaagctgaacctgtacctgatcatcaactacttcaagggcggcaagctgcggttcaagaagatcaaacctgaagccttcgaagccaacagattctacaccgtgatcaacaaaaagagcggcgagatcgtgcccatggaggtgaacttcaacttcgacgaccccaacctgatcatcctgcctctggcctttggcaagagacagggcagagaattcatctggaacgacctgctgtccctggaaaccggcagcctgaagctggccaacggaagagtgatcgagaagacactgtacaacagaagaacccggcaggatgagcctgccctgttcgtggccctgaccttcgagcggcgggaggtcctggactcctccaatatcaaaccaatgaacctgatcggcgtggcaagaggcgaaaacatccccgccgtgatcgccctgaccgaccccgagggctgcccactgagccggtttaaggatagcctgggaaacccaacccacatcctgagaatcggcgagagctataaggagaagcagcggaccatccaggccaagaaggaggtggagcagcggagagccggcggctacagccggaagtacgccagcaaagccaagaatctggcagacgatatggtgagaaacaccgctagagatctgctgtactacgccgtgacccaggatgccatgctgatcttcgccaacctgagccggggcttcggccggcagggcaagcggaccttcatggccgagagacagtacacacggatggaggactggctgaccgccaagctggcctacgagggcctgagcaagacctacctgtccaagacactggcccagtacacctccaagacatgcagcaactgtgggtttaccatcaccagcgccgactacgacagggtgctggagaagctgaagaagacagcaacaggctggatgaccacaattaacggcaaggagctgaaggtggagggccagattacctactacaacagatacaagagacagaacgtagtcaaggacctgtccgtcgagctggatagactgagcgaagaatctgtgaacaacgacatctcctcctggacaaagggcagaagcggagaagctctgagcctcctgaagaaaagattctcccatagacccgtgcaggagaagttcgtgtgcctgaactgcggcttcgagacacacgcagccgagcaagccgccctgaacatcgccagatcctggctgttcctgcggagccaggagtacaagaaataccagacaaacaagacaaccggcaacaccgataagagagccttcgtcgagacctggcagtccttttaccggaagaagcttaaggaggtgtggaaacctgccgtgcggtctggcggatctggcggaggctccctgcagggcggcgtgaccttcgaggacgtggccgtggacttcacccaggaggagtggcagaggctgagccccgagcagagggacctgtacagggacgtgaccctggagaactacaggaacctggtgagcatgggcgagcaggacagcaccaagcccgaggtgatcctgaggctggagaacggcgaggagccctggatggtgggcacccaggagctgaggagctgcagccccgccggcaaggacggcggcccaagcagcggcgcccctcctcccagcggcggcagcccagccggctccccaacctctaccgaggagggcacctctgagtccgccacccccgagagcggccctggcacctccaccgagcccagcgagggcagcgcacccggcagccctgccggcagccccacctccacagaggagggaaccagcaccgagcccagcgaaggcagcgccccaggcaccagcaccgagcctagtgagcaggagattaaacggatcaacaagatcagaagaagacttgtgaaagacagcaacaccaagaaggccggcaagacaggccccatgaaaaccctgctggttagagtgatgacacccgatctgagagagcggctggaaaacctgagaaagaagcctgaaaatatcccccagcccatcagcaatacatctagagccaacctgaataagctgctgaccgattacaccgaaatgaagaaggcgatcctgcatgtgtactgggaagagttccagaaggaccctgtgggcctgatgagccgggtggcccagcctgccagcaagaagatcgatcagaacaagctgaaacctgagatggacgagaagggcaacctgaccaccgccggctttgcctgctctcagtgtggccagcccctgttcgtgtacaagctggagcaggtgtctgagaagggcaaggcttacaccaactacttcggacggtgcaatgtggccgagcacgaaaagctgatcctgctggcccagctgaagcccgagaaggatagcgacgaagccgtgacatatagcctgggaaagtttgggcagagggccctggatttctacagcattcatgtgaccaaggagtccacccaccccgtgaagcccctggcccagatcgccggaaacagatacgcctccggacctgtgggaaaggccctgagcgacgcatgtatgggcacaatcgcctccttcctgtctaagtaccaggacatcatcatcgaacaccagaaggtggtgaagggcaaccagaagagactggagagcctgcgggagctggccggcaaggaaaacctggaataccctagcgtgaccctgccacctcagcctcacaccaaggagggcgttgatgcctacaacgaagtgatcgcccgggtgcgaatgtgggtgaacctgaacctgtggcagaagctgaagctaagcagagatgatgccaagcctctgctgagactgaagggattcccttcctttcctctggtcgagagacaggccaacgaagtggactggtgggacatggtgtgtaacgtgaagaagctgatcaacgagaaaaaggaggatggcaaggtgttttggcagaatctggctggctacaagagacaggaagccctgagaccatacctgagcagcgaggaagatcggaagaagggaaagaaattcgctcggtaccagctgggcgacctgctgctgcacctggaaaagaagcacggcgaggactggggaaaggtgtacgacgaggcctgggagcggattgacaagaaagtggaaggcctgagcaagcacatcaagctggaagaggaacggagaagcgaggacgcccagagcaaggccgccctgaccgactggctgcgggctaaggccagcttcgtgatcgagggcctgaaggaggccgacaaggacgagttctgcagatgcgagctgaagctgcagaagtggtacggggacctgcggggaaagcccttcgccatcgaagccgagaacagcatcctggacatcagcggcttcagcaagcagtacaactgtgccttcatctggcagaaggacggcgtgaagaagctgaacctgtacctgatcatcaactacttcaagggcggcaagctgcggttcaagaagatcaaacctgaagccttcgaagccaacagattctacaccgtgatcaacaaaaagagcggcgagatcgtgcccatggaggtgaacttcaacttcgacgaccccaacctgatcatcctgcctctggcctttggcaagagacagggcagagaattcatctggaacgacctgctgtccctggaaaccggcagcctgaagctggccaacggaagagtgatcgagaagacactgtacaacagaagaacccggcaggatgagcctgccctgttcgtggccctgaccttcgagcggcgggaggtcctggactcctccaatatcaaaccaatgaacctgatcggcgtggcaagaggcgaaaacatccccgccgtgatcgccctgaccgaccccgagggctgcccactgagccggtttaaggatagcctgggaaacccaacccacatcctgagaatcggcgagagctataaggagaagcagcggaccatccaggccaagaaggaggtggagcagcggagagccggcggctacagccggaagtacgccagcaaagccaagaatctggcagacgatatggtgagaaacaccgctagagatctgctgtactacgccgtgacccaggatgccatgctgatcttcgccaacctgagccggggcttcggccggcagggcaagcggaccttcatggccgagagacagtacacacggatggaggactggctgaccgccaagctggcctacgagggcctgagcaagacctacctgtccaagacactggcccagtacacctccaagacatgcagcaactgtgggtttaccatcaccagcgccgactacgacagggtgctggagaagctgaagaagacagcaacaggctggatgaccacaattaacggcaaggagctgaaggtggagggccagattacctactacaacagatacaagagacagaacgtagtcaaggacctgtccgtcgagctggatagactgagcgaagaatctgtgaacaacgacatctcctcctggacaaagggcagaagcggagaagctctgagcctcctgaagaaaagattctcccatagacccgtgcaggagaagttcgtgtgcctgaactgcggcttcgagacacacgcagccgagcaagccgccctgaacatcgccagatcctggctgttcctgcggagccaggagtacaagaaataccagacaaacaagacaaccggcaacaccgataagagagccttcgtcgagacctggcagtccttttaccggaagaagcttaaggaggtgtggaaacctgccgtgcggtctggcggatctggcggaggctcctctgcagggcggcgtgaccttcgaggacgtggccgtggacttcacccaggaggagtggcagaggctgagccccgagcagagggacctgtacagggacgtgaccctggagaactacaggaacctggtgagcatgggcgagcaggacagcaccaagcccgaggtgatcctgaggctggagaacggcgaggagccctggatggtgggcacccaggagctgaggagctgcagccccgccggcaaggacggatctggctccggcagcggccccaagaaaaagagaaaagtctaagctgccttctgcggggcttgccttctggccatgcccttcttctctcccttgcacctgtacctcttggtctttgaataaagcctgagtaggaaggctagcaaaaaaaaaaaaaaaaaaaaaaaaaaaaaaaaaaaaaaaaaaaaaaaaaaaaaaaaaaaaaaaaaaaaaaaaaaaaaaaa

SEQ ID NO: 16210 - RNA, 9485 nt, synthetic construct
  source 1..9485: mol_type = other RNA
aggaaataagagagaaaagaagagtaagaagaaatataagagccaccatggcccctaagaagaagcgtaaagtgagccggatggaacgcctcgtctacgaggtgcggcagaagtgcagaaacatcgaggacatctgcatctcctgcggatctctgaacgtgaccctggagcacccactgttcatcggcggcatgtgccagaactgtaaaaactgttttctggagtgtgcctatcaatacgacgatgacggctaccagagctactgcaccatctgttgcggcggaagagaggtgctgatgtgtggaaataacaactgctgccggtgcttctgcgtggaatgcgtggacctgctggtgggccccggcgccgcccaggccgctattaaggaagatccttggaactgctacatgtgcggccacaagggcacatacggcctgctgagacggagagaggactggcctagcagactgcagatgttcttcgccaataaccacgaccaggagttcgacccccctaaggtgtaccctcccgtccccgccgagaagagaaagcccatccgggtcctgagcctgttcgatggcatcgccaccggtctgctggtgctgaaggacctgggcatccaggtggataggtacattgcctccgaggtgtgcgaggactccatcaccgtgggaatggtgcgtcatcagggcaagatcatgtacgtgggcgacgtgcggagcgtgacacagaagcatatccaggagtggggccctttcgacctggtgatcggcggcagcccttgcaatgacctgagcatcgtgaacccagcccggaagggcctgtacgagggaaccggcagactgttcttcgagttttacagactgctgcacgacgcccggcctaaggaaggcgacgaccggcccttcttttggctgttcgagaatgtggtggccatgggagtcagcgacaagcgggatattagccggttcctggagagcaaccccgtgatgatcgatgccaaggaagtgagcgccgcccaccgggccagatacttctggggcaatctgcctggcatgaacagacccctggccagcaccgtgaacgacaagctggagctgcaggagtgcctggagcacggccggatcgccaagttcagcaaggtgagaaccatcaccacccgaagcaacagcatcaaacaaggcaaggaccagcactttcctgtgttcatgaacgagaaggaggacatcctgtggtgtaccgagatggagagagtgttcgggttcccagtccactacacagatgtcagcaacatgtctagactggccagacagagactgctgggaagaagctggtccgtccctgtgatcagacacctgttcgcccctctgaaggagtacttcgcctgcgtgagcagcggcaacagcaacgccaacagccggggccccagcttctctagcggcctggtgccactgtccctgagagggagccacatgggccccatggagatctacaaaaccgtgagcgcctggaagcggcagcctgtgcgcgtgctgagcctgtttcggaatatcgataaagtcctgaaaagcctgggattcctggagagcggctctggctccggcggtggcaccctgaagtacgtggaggatgtgacaaacgtggtcagacgggatgtggagaagtggggccccttcgatctggtgtacggcagcacccaacccctgggcagctcttgtgaccggtgccctggctggtacatgtttcagttccaccggatcctgcagtacgccctgccgagacaggagtcccagcggccattcttttggattttcatggacaacttgctgctgaccgaggatgaccaggaaactaccactcggttcctgcagaccgaagccgtgaccctgcaggacgtgagaggccgggactaccagaacgccatgcgggtgtggtccaacatccctggactgaaaagcaagcacgcacctctgacccctaaagaagaggagtacctgcaggcccaggtgcggagcagaagcaagctggacgcccctaaggtggatctgctggtgaagaattgcctcctgcccctgagagagtacttcaagtatttcagccagaatagtctgcccctgggaggcagcggcggcggcgccctggtgacatttgaggacgtcgccgtgcggttcacccaggaggaatgggctctgctggatccttctcagaaaatcctgtaccgggacgtgatgagagagacataccggaatctgacctccgtgggcatcaactgggaatgttgggaccttgaagcctgcttcagaagcctgggaagaaacctgagagtgcaggtggtgaagagaaagtgcgagctgaccaacagcggcccctgcgccgagggcggcccaagcagcggcgcccctcctcccagcggcggcagcccagccggctccccaacctctaccgaggagggcacctctgagtccgccacccccgagagcggccctggcacctccaccgagcccagcgagggcagcgcacccggcagccctgccggcagccccacctccacagaggagggaaccagcaccgagcccagcgaaggcagcgccccaggcaccagcaccgagcctagtgagcaggagattaaacggatcaacaagatcagaagaagacttgtgaaagacagcaacaccaagaaggccggcaagacaggccccatgaaaaccctgctggttagagtgatgacacccgatctgagagagcggctggaaaacctgagaaagaagcctgaaaatatcccccagcccatcagcaatacatctagagccaacctgaataagctgctgaccgattacaccgaaatgaagaaggcgatcctgcatgtgtactgggaagagttccagaaggaccctgtgggcctgatgagccgggtggcccagcctgccagcaagaagatcgatcagaacaagctgaaacctgagatggacgagaagggcaacctgaccaccgccggctttgcctgctctcagtgtggccagcccctgttcgtgtacaagctggagcaggtgtctgagaagggcaaggcttacaccaactacttcggacggtgcaatgtggccgagcacgaaaagctgatcctgctggcccagctgaagcccgagaaggatagcgacgaagccgtgacatatagcctgggaaagtttgggcagagggccctggatttctacagcattcatgtgaccaaggagtccacccaccccgtgaagcccctggcccagatcgccggaaacagatacgcctccggacctgtgggaaaggccctgagcgacgcatgtatgggcacaatcgcctccttcctgtctaagtaccaggacatcatcatcgaacaccagaaggtggtgaagggcaaccagaagagactggagagcctgcgggagctggccggcaaggaaaacctggaataccctagcgtgaccctgccacctcagcctcacaccaaggagggcgttgatgcctacaacgaagtgatcgcccgggtgcgaatgtgggtgaacctgaacctgtggcagaagctgaagctaagcagagatgatgccaagcctctgctgagactgaagggattcccttcctttcctctggtcgagagacaggccaacgaagtggactggtgggacatggtgtgtaacgtgaagaagctgatcaacgagaaaaaggaggatggcaaggtgttttggcagaatctggctggctacaagagacaggaagccctgagaccatacctgagcagcgaggaagatcggaagaagggaaagaaattcgctcggtaccagctgggcgacctgctgctgcacctggaaaagaagcacggcgaggactggggaaaggtgtacgacgaggcctgggagcggattgacaagaaagtggaaggcctgagcaagcacatcaagctggaagaggaacggagaagcgaggacgcccagagcaaggccgccctgaccgactggctgcgggctaaggccagcttcgtgatcgagggcctgaaggaggccgacaaggacgagttctgcagatgcgagctgaagctgcagaagtggtacggggacctgcggggaaagcccttcgccatcgaagccgagaacagcatcctggacatcagcggcttcagcaagcagtacaactgtgccttcatctggcagaaggacggcgtgaagaagctgaacctgtacctgatcatcaactacttcaagggcggcaagctgcggttcaagaagatcaaacctgaagccttcgaagccaacagattctacaccgtgatcaacaaaaagagcggcgagatcgtgcccatggaggtgaacttcaacttcgacgaccccaacctgatcatcctgcctctggcctttggcaagagacagggcagagaattcatctggaacgacctgctgtccctggaaaccggcagcctgaagctggccaacggaagagtgatcgagaagacactgtacaacagaagaacccggcaggatgagcctgccctgttcgtggccctgaccttcgagcggcgggaggtcctggactcctccaatatcaaaccaatgaacctgatcggcgtggcaagaggcgaaaacatccccgccgtgatcgccctgaccgaccccgagggctgcccactgagccggtttaaggatagcctgggaaacccaacccacatcctgagaatcggcgagagctataaggagaagcagcggaccatccaggccaagaaggaggtggagcagcggagagccggcggctacagccggaagtacgccagcaaagccaagaatctggcagacgatatggtgagaaacaccgctagagatctgctgtactacgccgtgacccaggatgccatgctgatcttcgccaacctgagccggggcttcggccggcagggcaagcggaccttcatggccgagagacagtacacacggatggaggactggctgaccgccaagctggcctacgagggcctgagcaagacctacctgtccaagacactggcccagtacacctccaagacatgcagcaactgtgggtttaccatcaccagcgccgactacgacagggtgctggagaagctgaagaagacagcaacaggctggatgaccacaattaacggcaaggagctgaaggtggagggccagattacctactacaacagatacaagagacagaacgtagtcaaggacctgtccgtcgagctggatagactgagcgaagaatctgtgaacaacgacatctcctcctggacaaagggcagaagcggagaagctctgagcctcctgaagaaaagattctcccatagacccgtgcaggagaagttcgtgtgcctgaactgcggcttcgagacacacgcagccgagcaagccgccctgaacatcgccagatcctggctgttcctgcggagccaggagtacaagaaataccagacaaacaagacaaccggcaacaccgataagagagccttcgtcgagacctggcagtccttttaccggaagaagcttaaggaggtgtggaaacctgccgtgcggtctggcggatctggcggaggctcctaccagacccccgtgagcttcaaggacgtggtggtgggcttcacccaggaggagtggcactggctgagccccgcccagagggccctgtacagggacgtgatgctggagacctacagcaacctggtgagcgtgggctacgagggcaccaagcccgacgtgatcctgaggctggagcaggaggaggccccctggatcggcgaggccgcctgccccggctgccactgctggggcatcagcaagctgggcggcccaagcagcggcgcccctcctcccagcggcggcagcccagccggctccccaacctctaccgaggagggcacctctgagtccgccacccccgagagcggccctggcacctccaccgagcccagcgagggcagcgcacccggcagccctgccggcagccccacctccacagaggagggaaccagcaccgagcccagcgaaggcagcgccccaggcaccagcaccgagcctagtgagcaggagattaaacggatcaacaagatcagaagaagacttgtgaaagacagcaacaccaagaaggccggcaagacaggccccatgaaaaccctgctggttagagtgatgacacccgatctgagagagcggctggaaaacctgagaaagaagcctgaaaatatcccccagcccatcagcaatacatctagagccaacctgaataagctgctgaccgattacaccgaaatgaagaaggcgatcctgcatgtgtactgggaagagttccagaaggaccctgtgggcctgatgagccgggtggcccagcctgccagcaagaagatcgatcagaacaagctgaaacctgagatggacgagaagggcaacctgaccaccgccggctttgcctgctctcagtgtggccagcccctgttcgtgtacaagctggagcaggtgtctgagaagggcaaggcttacaccaactacttcggacggtgcaatgtggccgagcacgaaaagctgatcctgctggcccagctgaagcccgagaaggatagcgacgaagccgtgacatatagcctgggaaagtttgggcagagggccctggatttctacagcattcatgtgaccaaggagtccacccaccccgtgaagcccctggcccagatcgccggaaacagatacgcctccggacctgtgggaaaggccctgagcgacgcatgtatgggcacaatcgcctccttcctgtctaagtaccaggacatcatcatcgaacaccagaaggtggtgaagggcaaccagaagagactggagagcctgcgggagctggccggcaaggaaaacctggaataccctagcgtgaccctgccacctcagcctcacaccaaggagggcgttgatgcctacaacgaagtgatcgcccgggtgcgaatgtgggtgaacctgaacctgtggcagaagctgaagctaagcagagatgatgccaagcctctgctgagactgaagggattcccttcctttcctctggtcgagagacaggccaacgaagtggactggtgggacatggtgtgtaacgtgaagaagctgatcaacgagaaaaaggaggatggcaaggtgttttggcagaatctggctggctacaagagacaggaagccctgagaccatacctgagcagcgaggaagatcggaagaagggaaagaaattcgctcggtaccagctgggcgacctgctgctgcacctggaaaagaagcacggcgaggactggggaaaggtgtacgacgaggcctgggagcggattgacaagaaagtggaaggcctgagcaagcacatcaagctggaagaggaacggagaagcgaggacgcccagagcaaggccgccctgaccgactggctgcgggctaaggccagcttcgtgatcgagggcctgaaggaggccgacaaggacgagttctgcagatgcgagctgaagctgcagaagtggtacggggacctgcggggaaagcccttcgccatcgaagccgagaacagcatcctggacatcagcggcttcagcaagcagtacaactgtgccttcatctggcagaaggacggcgtgaagaagctgaacctgtacctgatcatcaactacttcaagggcggcaagctgcggttcaagaagatcaaacctgaagccttcgaagccaacagattctacaccgtgatcaacaaaaagagcggcgagatcgtgcccatggaggtgaacttcaacttcgacgaccccaacctgatcatcctgcctctggcctttggcaagagacagggcagagaattcatctggaacgacctgctgtccctggaaaccggcagcctgaagctggccaacggaagagtgatcgagaagacactgtacaacagaagaacccggcaggatgagcctgccctgttcgtggccctgaccttcgagcggcgggaggtcctggactcctccaatatcaaaccaatgaacctgatcggcgtggcaagaggcgaaaacatccccgccgtgatcgccctgaccgaccccgagggctgcccactgagccggtttaaggatagcctgggaaacccaacccacatcctgagaatcggcgagagctataaggagaagcagcggaccatccaggccaagaaggaggtggagcagcggagagccggcggctacagccggaagtacgccagcaaagccaagaatctggcagacgatatggtgagaaacaccgctagagatctgctgtactacgccgtgacccaggatgccatgctgatcttcgccaacctgagccggggcttcggccggcagggcaagcggaccttcatggccgagagacagtacacacggatggaggactggctgaccgccaagctggcctacgagggcctgagcaagacctacctgtccaagacactggcccagtacacctccaagacatgcagcaactgtgggtttaccatcaccagcgccgactacgacagggtgctggagaagctgaagaagacagcaacaggctggatgaccacaattaacggcaaggagctgaaggtggagggccagattacctactacaacagatacaagagacagaacgtagtcaaggacctgtccgtcgagctggatagactgagcgaagaatctgtgaacaacgacatctcctcctggacaaagggcagaagcggagaagctctgagcctcctgaagaaaagattctcccatagacccgtgcaggagaagttcgtgtgcctgaactgcggcttcgagacacacgcagccgagcaagccgccctgaacatcgccagatcctggctgttcctgcggagccaggagtacaagaaataccagacaaacaagacaaccggcaacaccgataagagagccttcgtcgagacctggcagtccttttaccggaagaagcttaaggaggtgtggaaacctgccgtgcggtctggcggatctggcggaggctccttaccagacccccgtgagcttcaaggacgtggtggtgggcttcacccaggaggagtggcactggctgagccccgcccagagggccctgtacagggacgtgatgctggagacctacagcaacctggtgagcgtgggctacgagggcaccaagcccgacgtgatcctgaggctggagcaggaggaggccccctggatcggcgaggccgcctgccccggctgccactgctggggcatcagcaagctgggatctggctccggcagcggccccaagaaaaagagaaaagtctaagctgccttctgcggggcttgccttctggccatgcccttcttctctcccttgcacctgtacctcttggtctttgaataaagcctgagtaggaaggctagcaaaaaaaaaaaaaaaaaaaaaaaaaaaaaaaaaaaaaaaaaaaaaaaaaaaaaaaaaaaaaaaaaaaaaaaaaaaaaaaa

SEQ ID NO: 16211 - RNA, 9485 nt, synthetic construct
  source 1..9485: mol_type = other RNA
aggaaataagagagaaaagaagagtaagaagaaatataagagccaccatggcccctaagaagaagcgtaaagtgagccggatggaacgcctcgtctacgaggtgcggcagaagtgcagaaacatcgaggacatctgcatctcctgcggatctctgaacgtgaccctggagcacccactgttcatcggcggcatgtgccagaactgtaaaaactgttttctggagtgtgcctatcaatacgacgatgacggctaccagagctactgcaccatctgttgcggcggaagagaggtgctgatgtgtggaaataacaactgctgccggtgcttctgcgtggaatgcgtggacctgctggtgggccccggcgccgcccaggccgctattaaggaagatccttggaactgctacatgtgcggccacaagggcacatacggcctgctgagacggagagaggactggcctagcagactgcagatgttcttcgccaataaccacgaccaggagttcgacccccctaaggtgtaccctcccgtccccgccgagaagagaaagcccatccgggtcctgagcctgttcgatggcatcgccaccggtctgctggtgctgaaggacctgggcatccaggtggataggtacattgcctccgaggtgtgcgaggactccatcaccgtgggaatggtgcgtcatcagggcaagatcatgtacgtgggcgacgtgcggagcgtgacacagaagcatatccaggagtggggccctttcgacctggtgatcggcggcagcccttgcaatgacctgagcatcgtgaacccagcccggaagggcctgtacgagggaaccggcagactgttcttcgagttttacagactgctgcacgacgcccggcctaaggaaggcgacgaccggcccttcttttggctgttcgagaatgtggtggccatgggagtcagcgacaagcgggatattagccggttcctggagagcaaccccgtgatgatcgatgccaaggaagtgagcgccgcccaccgggccagatacttctggggcaatctgcctggcatgaacagacccctggccagcaccgtgaacgacaagctggagctgcaggagtgcctggagcacggccggatcgccaagttcagcaaggtgagaaccatcaccacccgaagcaacagcatcaaacaaggcaaggaccagcactttcctgtgttcatgaacgagaaggaggacatcctgtggtgtaccgagatggagagagtgttcgggttcccagtccactacacagatgtcagcaacatgtctagactggccagacagagactgctgggaagaagctggtccgtccctgtgatcagacacctgttcgcccctctgaaggagtacttcgcctgcgtgagcagcggcaacagcaacgccaacagccggggccccagcttctctagcggcctggtgccactgtccctgagagggagccacatgggccccatggagatctacaaaaccgtgagcgcctggaagcggcagcctgtgcgcgtgctgagcctgtttcggaatatcgataaagtcctgaaaagcctgggattcctggagagcggctctggctccggcggtggcaccctgaagtacgtggaggatgtgacaaacgtggtcagacgggatgtggagaagtggggccccttcgatctggtgtacggcagcacccaacccctgggcagctcttgtgaccggtgccctggctggtacatgtttcagttccaccggatcctgcagtacgccctgccgagacaggagtcccagcggccattcttttggattttcatggacaacttgctgctgaccgaggatgaccaggaaactaccactcggttcctgcagaccgaagccgtgaccctgcaggacgtgagaggccgggactaccagaacgccatgcgggtgtggtccaacatccctggactgaaaagcaagcacgcacctctgacccctaaagaagaggagtacctgcaggcccaggtgcggagcagaagcaagctggacgcccctaaggtggatctgctggtgaagaattgcctcctgcccctgagagagtacttcaagtatttcagccagaatagtctgcccctgggaggcagcggcggcggcgccctggtgacatttgaggacgtcgccgtgcggttcacccaggaggaatgggctctgctggatccttctcagaaaatcctgtaccgggacgtgatgagagagacataccggaatctgacctccgtgggcatcaactgggaatgttgggaccttgaagcctgcttcagaagcctgggaagaaacctgagagtgcaggtggtgaagagaaagtgcgagctgaccaacagcggcccctgcgccgagggcggcccaagcagcggcgcccctcctcccagcggcggcagcccagccggctccccaacctctaccgaggagggcacctctgagtccgccacccccgagagcggccctggcacctccaccgagcccagcgagggcagcgcacccggcagccctgccggcagccccacctccacagaggagggaaccagcaccgagcccagcgaaggcagcgccccaggcaccagcaccgagcctagtgagcaggagattaaacggatcaacaagatcagaagaagacttgtgaaagacagcaacaccaagaaggccggcaagacaggccccatgaaaaccctgctggttagagtgatgacacccgatctgagagagcggctggaaaacctgagaaagaagcctgaaaatatcccccagcccatcagcaatacatctagagccaacctgaataagctgctgaccgattacaccgaaatgaagaaggcgatcctgcatgtgtactgggaagagttccagaaggaccctgtgggcctgatgagccgggtggcccagcctgccagcaagaagatcgatcagaacaagctgaaacctgagatggacgagaagggcaacctgaccaccgccggctttgcctgctctcagtgtggccagcccctgttcgtgtacaagctggagcaggtgtctgagaagggcaaggcttacaccaactacttcggacggtgcaatgtggccgagcacgaaaagctgatcctgctggcccagctgaagcccgagaaggatagcgacgaagccgtgacatatagcctgggaaagtttgggcagagggccctggatttctacagcattcatgtgaccaaggagtccacccaccccgtgaagcccctggcccagatcgccggaaacagatacgcctccggacctgtgggaaaggccctgagcgacgcatgtatgggcacaatcgcctccttcctgtctaagtaccaggacatcatcatcgaacaccagaaggtggtgaagggcaaccagaagagactggagagcctgcgggagctggccggcaaggaaaacctggaataccctagcgtgaccctgccacctcagcctcacaccaaggagggcgttgatgcctacaacgaagtgatcgcccgggtgcgaatgtgggtgaacctgaacctgtggcagaagctgaagctaagcagagatgatgccaagcctctgctgagactgaagggattcccttcctttcctctggtcgagagacaggccaacgaagtggactggtgggacatggtgtgtaacgtgaagaagctgatcaacgagaaaaaggaggatggcaaggtgttttggcagaatctggctggctacaagagacaggaagccctgagaccatacctgagcagcgaggaagatcggaagaagggaaagaaattcgctcggtaccagctgggcgacctgctgctgcacctggaaaagaagcacggcgaggactggggaaaggtgtacgacgaggcctgggagcggattgacaagaaagtggaaggcctgagcaagcacatcaagctggaagaggaacggagaagcgaggacgcccagagcaaggccgccctgaccgactggctgcgggctaaggccagcttcgtgatcgagggcctgaaggaggccgacaaggacgagttctgcagatgcgagctgaagctgcagaagtggtacggggacctgcggggaaagcccttcgccatcgaagccgagaacagcatcctggacatcagcggcttcagcaagcagtacaactgtgccttcatctggcagaaggacggcgtgaagaagctgaacctgtacctgatcatcaactacttcaagggcggcaagctgcggttcaagaagatcaaacctgaagccttcgaagccaacagattctacaccgtgatcaacaaaaagagcggcgagatcgtgcccatggaggtgaacttcaacttcgacgaccccaacctgatcatcctgcctctggcctttggcaagagacagggcagagaattcatctggaacgacctgctgtccctggaaaccggcagcctgaagctggccaacggaagagtgatcgagaagacactgtacaacagaagaacccggcaggatgagcctgccctgttcgtggccctgaccttcgagcggcgggaggtcctggactcctccaatatcaaaccaatgaacctgatcggcgtggcaagaggcgaaaacatccccgccgtgatcgccctgaccgaccccgagggctgcccactgagccggtttaaggatagcctgggaaacccaacccacatcctgagaatcggcgagagctataaggagaagcagcggaccatccaggccaagaaggaggtggagcagcggagagccggcggctacagccggaagtacgccagcaaagccaagaatctggcagacgatatggtgagaaacaccgctagagatctgctgtactacgccgtgacccaggatgccatgctgatcttcgccaacctgagccggggcttcggccggcagggcaagcggaccttcatggccgagagacagtacacacggatggaggactggctgaccgccaagctggcctacgagggcctgagcaagacctacctgtccaagacactggcccagtacacctccaagacatgcagcaactgtgggtttaccatcaccagcgccgactacgacagggtgctggagaagctgaagaagacagcaacaggctggatgaccacaattaacggcaaggagctgaaggtggagggccagattacctactacaacagatacaagagacagaacgtagtcaaggacctgtccgtcgagctggatagactgagcgaagaatctgtgaacaacgacatctcctcctggacaaagggcagaagcggagaagctctgagcctcctgaagaaaagattctcccatagacccgtgcaggagaagttcgtgtgcctgaactgcggcttcgagacacacgcagccgagcaagccgccctgaacatcgccagatcctggctgttcctgcggagccaggagtacaagaaataccagacaaacaagacaaccggcaacaccgataagagagccttcgtcgagacctggcagtccttttaccggaagaagcttaaggaggtgtggaaacctgccgtgcggtctggcggatctggcggaggctccgtgcacggcagcgtgaccttcagggacgtggccatcgacttcagccaggaggagtgggagtgcctgcagcccgagcagaggaccctgtacagggacgtgatgctggagaactacagccacctgatcagcctgggcagcagcgtgagcaagcccgacgtgatcaccctgctggagcaggagaaggagccctggatcgtggtgaggaaggagaccagcaggtggtaccccgacctggagagcaagggcggcccaagcagcggcgcccctcctcccagcggcggcagcccagccggctccccaacctctaccgaggagggcacctctgagtccgccacccccgagagcggccctggcacctccaccgagcccagcgagggcagcgcacccggcagccctgccggcagccccacctccacagaggagggaaccagcaccgagcccagcgaaggcagcgccccaggcaccagcaccgagcctagtgagcaggagattaaacggatcaacaagatcagaagaagacttgtgaaagacagcaacaccaagaaggccggcaagacaggccccatgaaaaccctgctggttagagtgatgacacccgatctgagagagcggctggaaaacctgagaaagaagcctgaaaatatcccccagcccatcagcaatacatctagagccaacctgaataagctgctgaccgattacaccgaaatgaagaaggcgatcctgcatgtgtactgggaagagttccagaaggaccctgtgggcctgatgagccgggtggcccagcctgccagcaagaagatcgatcagaacaagctgaaacctgagatggacgagaagggcaacctgaccaccgccggctttgcctgctctcagtgtggccagcccctgttcgtgtacaagctggagcaggtgtctgagaagggcaaggcttacaccaactacttcggacggtgcaatgtggccgagcacgaaaagctgatcctgctggcccagctgaagcccgagaaggatagcgacgaagccgtgacatatagcctgggaaagtttgggcagagggccctggatttctacagcattcatgtgaccaaggagtccacccaccccgtgaagcccctggcccagatcgccggaaacagatacgcctccggacctgtgggaaaggccctgagcgacgcatgtatgggcacaatcgcctccttcctgtctaagtaccaggacatcatcatcgaacaccagaaggtggtgaagggcaaccagaagagactggagagcctgcgggagctggccggcaaggaaaacctggaataccctagcgtgaccctgccacctcagcctcacaccaaggagggcgttgatgcctacaacgaagtgatcgcccgggtgcgaatgtgggtgaacctgaacctgtggcagaagctgaagctaagcagagatgatgccaagcctctgctgagactgaagggattcccttcctttcctctggtcgagagacaggccaacgaagtggactggtgggacatggtgtgtaacgtgaagaagctgatcaacgagaaaaaggaggatggcaaggtgttttggcagaatctggctggctacaagagacaggaagccctgagaccatacctgagcagcgaggaagatcggaagaagggaaagaaattcgctcggtaccagctgggcgacctgctgctgcacctggaaaagaagcacggcgaggactggggaaaggtgtacgacgaggcctgggagcggattgacaagaaagtggaaggcctgagcaagcacatcaagctggaagaggaacggagaagcgaggacgcccagagcaaggccgccctgaccgactggctgcgggctaaggccagcttcgtgatcgagggcctgaaggaggccgacaaggacgagttctgcagatgcgagctgaagctgcagaagtggtacggggacctgcggggaaagcccttcgccatcgaagccgagaacagcatcctggacatcagcggcttcagcaagcagtacaactgtgccttcatctggcagaaggacggcgtgaagaagctgaacctgtacctgatcatcaactacttcaagggcggcaagctgcggttcaagaagatcaaacctgaagccttcgaagccaacagattctacaccgtgatcaacaaaaagagcggcgagatcgtgcccatggaggtgaacttcaacttcgacgaccccaacctgatcatcctgcctctggcctttggcaagagacagggcagagaattcatctggaacgacctgctgtccctggaaaccggcagcctgaagctggccaacggaagagtgatcgagaagacactgtacaacagaagaacccggcaggatgagcctgccctgttcgtggccctgaccttcgagcggcgggaggtcctggactcctccaatatcaaaccaatgaacctgatcggcgtggcaagaggcgaaaacatccccgccgtgatcgccctgaccgaccccgagggctgcccactgagccggtttaaggatagcctgggaaacccaacccacatcctgagaatcggcgagagctataaggagaagcagcggaccatccaggccaagaaggaggtggagcagcggagagccggcggctacagccggaagtacgccagcaaagccaagaatctggcagacgatatggtgagaaacaccgctagagatctgctgtactacgccgtgacccaggatgccatgctgatcttcgccaacctgagccggggcttcggccggcagggcaagcggaccttcatggccgagagacagtacacacggatggaggactggctgaccgccaagctggcctacgagggcctgagcaagacctacctgtccaagacactggcccagtacacctccaagacatgcagcaactgtgggtttaccatcaccagcgccgactacgacagggtgctggagaagctgaagaagacagcaacaggctggatgaccacaattaacggcaaggagctgaaggtggagggccagattacctactacaacagatacaagagacagaacgtagtcaaggacctgtccgtcgagctggatagactgagcgaagaatctgtgaacaacgacatctcctcctggacaaagggcagaagcggagaagctctgagcctcctgaagaaaagattctcccatagacccgtgcaggagaagttcgtgtgcctgaactgcggcttcgagacacacgcagccgagcaagccgccctgaacatcgccagatcctggctgttcctgcggagccaggagtacaagaaataccagacaaacaagacaaccggcaacaccgataagagagccttcgtcgagacctggcagtccttttaccggaagaagcttaaggaggtgtggaaacctgccgtgcggtctggcggatctggcggaggctcctgtgcacggcagcgtgaccttcagggacgtggccatcgacttcagccaggaggagtgggagtgcctgcagcccgagcagaggaccctgtacagggacgtgatgctggagaactacagccacctgatcagcctgggcagcagcgtgagcaagcccgacgtgatcaccctgctggagcaggagaaggagccctggatcgtggtgaggaaggagaccagcaggtggtaccccgacctggagagcaagggatctggctccggcagcggccccaagaaaaagagaaaagtctaagctgccttctgcggggcttgccttctggccatgcccttcttctctcccttgcacctgtacctcttggtctttgaataaagcctgagtaggaaggctagcaaaaaaaaaaaaaaaaaaaaaaaaaaaaaaaaaaaaaaaaaaaaaaaaaaaaaaaaaaaaaaaaaaaaaaaaaaaaaaaa

SEQ ID NO: 16212 - RNA, 9485 nt, synthetic construct
  source 1..9485: mol_type = other RNA
aggaaataagagagaaaagaagagtaagaagaaatataagagccaccatggcccctaagaagaagcgtaaagtgagccggatggaacgcctcgtctacgaggtgcggcagaagtgcagaaacatcgaggacatctgcatctcctgcggatctctgaacgtgaccctggagcacccactgttcatcggcggcatgtgccagaactgtaaaaactgttttctggagtgtgcctatcaatacgacgatgacggctaccagagctactgcaccatctgttgcggcggaagagaggtgctgatgtgtggaaataacaactgctgccggtgcttctgcgtggaatgcgtggacctgctggtgggccccggcgccgcccaggccgctattaaggaagatccttggaactgctacatgtgcggccacaagggcacatacggcctgctgagacggagagaggactggcctagcagactgcagatgttcttcgccaataaccacgaccaggagttcgacccccctaaggtgtaccctcccgtccccgccgagaagagaaagcccatccgggtcctgagcctgttcgatggcatcgccaccggtctgctggtgctgaaggacctgggcatccaggtggataggtacattgcctccgaggtgtgcgaggactccatcaccgtgggaatggtgcgtcatcagggcaagatcatgtacgtgggcgacgtgcggagcgtgacacagaagcatatccaggagtggggccctttcgacctggtgatcggcggcagcccttgcaatgacctgagcatcgtgaacccagcccggaagggcctgtacgagggaaccggcagactgttcttcgagttttacagactgctgcacgacgcccggcctaaggaaggcgacgaccggcccttcttttggctgttcgagaatgtggtggccatgggagtcagcgacaagcgggatattagccggttcctggagagcaaccccgtgatgatcgatgccaaggaagtgagcgccgcccaccgggccagatacttctggggcaatctgcctggcatgaacagacccctggccagcaccgtgaacgacaagctggagctgcaggagtgcctggagcacggccggatcgccaagttcagcaaggtgagaaccatcaccacccgaagcaacagcatcaaacaaggcaaggaccagcactttcctgtgttcatgaacgagaaggaggacatcctgtggtgtaccgagatggagagagtgttcgggttcccagtccactacacagatgtcagcaacatgtctagactggccagacagagactgctgggaagaagctggtccgtccctgtgatcagacacctgttcgcccctctgaaggagtacttcgcctgcgtgagcagcggcaacagcaacgccaacagccggggccccagcttctctagcggcctggtgccactgtccctgagagggagccacatgggccccatggagatctacaaaaccgtgagcgcctggaagcggcagcctgtgcgcgtgctgagcctgtttcggaatatcgataaagtcctgaaaagcctgggattcctggagagcggctctggctccggcggtggcaccctgaagtacgtggaggatgtgacaaacgtggtcagacgggatgtggagaagtggggccccttcgatctggtgtacggcagcacccaacccctgggcagctcttgtgaccggtgccctggctggtacatgtttcagttccaccggatcctgcagtacgccctgccgagacaggagtcccagcggccattcttttggattttcatggacaacttgctgctgaccgaggatgaccaggaaactaccactcggttcctgcagaccgaagccgtgaccctgcaggacgtgagaggccgggactaccagaacgccatgcgggtgtggtccaacatccctggactgaaaagcaagcacgcacctctgacccctaaagaagaggagtacctgcaggcccaggtgcggagcagaagcaagctggacgcccctaaggtggatctgctggtgaagaattgcctcctgcccctgagagagtacttcaagtatttcagccagaatagtctgcccctgggaggcagcggcggcggcgccctggtgacatttgaggacgtcgccgtgcggttcacccaggaggaatgggctctgctggatccttctcagaaaatcctgtaccgggacgtgatgagagagacataccggaatctgacctccgtgggcatcaactgggaatgttgggaccttgaagcctgcttcagaagcctgggaagaaacctgagagtgcaggtggtgaagagaaagtgcgagctgaccaacagcggcccctgcgccgagggcggcccaagcagcggcgcccctcctcccagcggcggcagcccagccggctccccaacctctaccgaggagggcacctctgagtccgccacccccgagagcggccctggcacctccaccgagcccagcgagggcagcgcacccggcagccctgccggcagccccacctccacagaggagggaaccagcaccgagcccagcgaaggcagcgccccaggcaccagcaccgagcctagtgagcaggagattaaacggatcaacaagatcagaagaagacttgtgaaagacagcaacaccaagaaggccggcaagacaggccccatgaaaaccctgctggttagagtgatgacacccgatctgagagagcggctggaaaacctgagaaagaagcctgaaaatatcccccagcccatcagcaatacatctagagccaacctgaataagctgctgaccgattacaccgaaatgaagaaggcgatcctgcatgtgtactgggaagagttccagaaggaccctgtgggcctgatgagccgggtggcccagcctgccagcaagaagatcgatcagaacaagctgaaacctgagatggacgagaagggcaacctgaccaccgccggctttgcctgctctcagtgtggccagcccctgttcgtgtacaagctggagcaggtgtctgagaagggcaaggcttacaccaactacttcggacggtgcaatgtggccgagcacgaaaagctgatcctgctggcccagctgaagcccgagaaggatagcgacgaagccgtgacatatagcctgggaaagtttgggcagagggccctggatttctacagcattcatgtgaccaaggagtccacccaccccgtgaagcccctggcccagatcgccggaaacagatacgcctccggacctgtgggaaaggccctgagcgacgcatgtatgggcacaatcgcctccttcctgtctaagtaccaggacatcatcatcgaacaccagaaggtggtgaagggcaaccagaagagactggagagcctgcgggagctggccggcaaggaaaacctggaataccctagcgtgaccctgccacctcagcctcacaccaaggagggcgttgatgcctacaacgaagtgatcgcccgggtgcgaatgtgggtgaacctgaacctgtggcagaagctgaagctaagcagagatgatgccaagcctctgctgagactgaagggattcccttcctttcctctggtcgagagacaggccaacgaagtggactggtgggacatggtgtgtaacgtgaagaagctgatcaacgagaaaaaggaggatggcaaggtgttttggcagaatctggctggctacaagagacaggaagccctgagaccatacctgagcagcgaggaagatcggaagaagggaaagaaattcgctcggtaccagctgggcgacctgctgctgcacctggaaaagaagcacggcgaggactggggaaaggtgtacgacgaggcctgggagcggattgacaagaaagtggaaggcctgagcaagcacatcaagctggaagaggaacggagaagcgaggacgcccagagcaaggccgccctgaccgactggctgcgggctaaggccagcttcgtgatcgagggcctgaaggaggccgacaaggacgagttctgcagatgcgagctgaagctgcagaagtggtacggggacctgcggggaaagcccttcgccatcgaagccgagaacagcatcctggacatcagcggcttcagcaagcagtacaactgtgccttcatctggcagaaggacggcgtgaagaagctgaacctgtacctgatcatcaactacttcaagggcggcaagctgcggttcaagaagatcaaacctgaagccttcgaagccaacagattctacaccgtgatcaacaaaaagagcggcgagatcgtgcccatggaggtgaacttcaacttcgacgaccccaacctgatcatcctgcctctggcctttggcaagagacagggcagagaattcatctggaacgacctgctgtccctggaaaccggcagcctgaagctggccaacggaagagtgatcgagaagacactgtacaacagaagaacccggcaggatgagcctgccctgttcgtggccctgaccttcgagcggcgggaggtcctggactcctccaatatcaaaccaatgaacctgatcggcgtggcaagaggcgaaaacatccccgccgtgatcgccctgaccgaccccgagggctgcccactgagccggtttaaggatagcctgggaaacccaacccacatcctgagaatcggcgagagctataaggagaagcagcggaccatccaggccaagaaggaggtggagcagcggagagccggcggctacagccggaagtacgccagcaaagccaagaatctggcagacgatatggtgagaaacaccgctagagatctgctgtactacgccgtgacccaggatgccatgctgatcttcgccaacctgagccggggcttcggccggcagggcaagcggaccttcatggccgagagacagtacacacggatggaggactggctgaccgccaagctggcctacgagggcctgagcaagacctacctgtccaagacactggcccagtacacctccaagacatgcagcaactgtgggtttaccatcaccagcgccgactacgacagggtgctggagaagctgaagaagacagcaacaggctggatgaccacaattaacggcaaggagctgaaggtggagggccagattacctactacaacagatacaagagacagaacgtagtcaaggacctgtccgtcgagctggatagactgagcgaagaatctgtgaacaacgacatctcctcctggacaaagggcagaagcggagaagctctgagcctcctgaagaaaagattctcccatagacccgtgcaggagaagttcgtgtgcctgaactgcggcttcgagacacacgcagccgagcaagccgccctgaacatcgccagatcctggctgttcctgcggagccaggagtacaagaaataccagacaaacaagacaaccggcaacaccgataagagagccttcgtcgagacctggcagtccttttaccggaagaagcttaaggaggtgtggaaacctgccgtgcggtctggcggatctggcggaggctccttccaggagctggtgagcttcaacgacgtgaccgtgggcttcacccaggaggagtggcagcacctggaccccagccagaggagcctgtacagggaggtgatgctggagaactacagccacctggtgagcgtgggctactgcgtgaccaagcccgaggtgatcttcaggctggagcagggcgaggagccctggatcagcgaggccgagttccccagccagagcttccccgagctgtggaaggccggcggcccaagcagcggcgcccctcctcccagcggcggcagcccagccggctccccaacctctaccgaggagggcacctctgagtccgccacccccgagagcggccctggcacctccaccgagcccagcgagggcagcgcacccggcagccctgccggcagccccacctccacagaggagggaaccagcaccgagcccagcgaaggcagcgccccaggcaccagcaccgagcctagtgagcaggagattaaacggatcaacaagatcagaagaagacttgtgaaagacagcaacaccaagaaggccggcaagacaggccccatgaaaaccctgctggttagagtgatgacacccgatctgagagagcggctggaaaacctgagaaagaagcctgaaaatatcccccagcccatcagcaatacatctagagccaacctgaataagctgctgaccgattacaccgaaatgaagaaggcgatcctgcatgtgtactgggaagagttccagaaggaccctgtgggcctgatgagccgggtggcccagcctgccagcaagaagatcgatcagaacaagctgaaacctgagatggacgagaagggcaacctgaccaccgccggctttgcctgctctcagtgtggccagcccctgttcgtgtacaagctggagcaggtgtctgagaagggcaaggcttacaccaactacttcggacggtgcaatgtggccgagcacgaaaagctgatcctgctggcccagctgaagcccgagaaggatagcgacgaagccgtgacatatagcctgggaaagtttgggcagagggccctggatttctacagcattcatgtgaccaaggagtccacccaccccgtgaagcccctggcccagatcgccggaaacagatacgcctccggacctgtgggaaaggccctgagcgacgcatgtatgggcacaatcgcctccttcctgtctaagtaccaggacatcatcatcgaacaccagaaggtggtgaagggcaaccagaagagactggagagcctgcgggagctggccggcaaggaaaacctggaataccctagcgtgaccctgccacctcagcctcacaccaaggagggcgttgatgcctacaacgaagtgatcgcccgggtgcgaatgtgggtgaacctgaacctgtggcagaagctgaagctaagcagagatgatgccaagcctctgctgagactgaagggattcccttcctttcctctggtcgagagacaggccaacgaagtggactggtgggacatggtgtgtaacgtgaagaagctgatcaacgagaaaaaggaggatggcaaggtgttttggcagaatctggctggctacaagagacaggaagccctgagaccatacctgagcagcgaggaagatcggaagaagggaaagaaattcgctcggtaccagctgggcgacctgctgctgcacctggaaaagaagcacggcgaggactggggaaaggtgtacgacgaggcctgggagcggattgacaagaaagtggaaggcctgagcaagcacatcaagctggaagaggaacggagaagcgaggacgcccagagcaaggccgccctgaccgactggctgcgggctaaggccagcttcgtgatcgagggcctgaaggaggccgacaaggacgagttctgcagatgcgagctgaagctgcagaagtggtacggggacctgcggggaaagcccttcgccatcgaagccgagaacagcatcctggacatcagcggcttcagcaagcagtacaactgtgccttcatctggcagaaggacggcgtgaagaagctgaacctgtacctgatcatcaactacttcaagggcggcaagctgcggttcaagaagatcaaacctgaagccttcgaagccaacagattctacaccgtgatcaacaaaaagagcggcgagatcgtgcccatggaggtgaacttcaacttcgacgaccccaacctgatcatcctgcctctggcctttggcaagagacagggcagagaattcatctggaacgacctgctgtccctggaaaccggcagcctgaagctggccaacggaagagtgatcgagaagacactgtacaacagaagaacccggcaggatgagcctgccctgttcgtggccctgaccttcgagcggcgggaggtcctggactcctccaatatcaaaccaatgaacctgatcggcgtggcaagaggcgaaaacatccccgccgtgatcgccctgaccgaccccgagggctgcccactgagccggtttaaggatagcctgggaaacccaacccacatcctgagaatcggcgagagctataaggagaagcagcggaccatccaggccaagaaggaggtggagcagcggagagccggcggctacagccggaagtacgccagcaaagccaagaatctggcagacgatatggtgagaaacaccgctagagatctgctgtactacgccgtgacccaggatgccatgctgatcttcgccaacctgagccggggcttcggccggcagggcaagcggaccttcatggccgagagacagtacacacggatggaggactggctgaccgccaagctggcctacgagggcctgagcaagacctacctgtccaagacactggcccagtacacctccaagacatgcagcaactgtgggtttaccatcaccagcgccgactacgacagggtgctggagaagctgaagaagacagcaacaggctggatgaccacaattaacggcaaggagctgaaggtggagggccagattacctactacaacagatacaagagacagaacgtagtcaaggacctgtccgtcgagctggatagactgagcgaagaatctgtgaacaacgacatctcctcctggacaaagggcagaagcggagaagctctgagcctcctgaagaaaagattctcccatagacccgtgcaggagaagttcgtgtgcctgaactgcggcttcgagacacacgcagccgagcaagccgccctgaacatcgccagatcctggctgttcctgcggagccaggagtacaagaaataccagacaaacaagacaaccggcaacaccgataagagagccttcgtcgagacctggcagtccttttaccggaagaagcttaaggaggtgtggaaacctgccgtgcggtctggcggatctggcggaggctcctttccaggagctggtgagcttcaacgacgtgaccgtgggcttcacccaggaggagtggcagcacctggaccccagccagaggagcctgtacagggaggtgatgctggagaactacagccacctggtgagcgtgggctactgcgtgaccaagcccgaggtgatcttcaggctggagcagggcgaggagccctggatcagcgaggccgagttccccagccagagcttccccgagctgtggaaggccggatctggctccggcagcggccccaagaaaaagagaaaagtctaagctgccttctgcggggcttgccttctggccatgcccttcttctctcccttgcacctgtacctcttggtctttgaataaagcctgagtaggaaggctagcaaaaaaaaaaaaaaaaaaaaaaaaaaaaaaaaaaaaaaaaaaaaaaaaaaaaaaaaaaaaaaaaaaaaaaaaaaaaaaaa

SEQ ID NO: 16213 - RNA, 9485 nt, synthetic construct
  source 1..9485: mol_type = other RNA
aggaaataagagagaaaagaagagtaagaagaaatataagagccaccatggcccctaagaagaagcgtaaagtgagccggatggaacgcctcgtctacgaggtgcggcagaagtgcagaaacatcgaggacatctgcatctcctgcggatctctgaacgtgaccctggagcacccactgttcatcggcggcatgtgccagaactgtaaaaactgttttctggagtgtgcctatcaatacgacgatgacggctaccagagctactgcaccatctgttgcggcggaagagaggtgctgatgtgtggaaataacaactgctgccggtgcttctgcgtggaatgcgtggacctgctggtgggccccggcgccgcccaggccgctattaaggaagatccttggaactgctacatgtgcggccacaagggcacatacggcctgctgagacggagagaggactggcctagcagactgcagatgttcttcgccaataaccacgaccaggagttcgacccccctaaggtgtaccctcccgtccccgccgagaagagaaagcccatccgggtcctgagcctgttcgatggcatcgccaccggtctgctggtgctgaaggacctgggcatccaggtggataggtacattgcctccgaggtgtgcgaggactccatcaccgtgggaatggtgcgtcatcagggcaagatcatgtacgtgggcgacgtgcggagcgtgacacagaagcatatccaggagtggggccctttcgacctggtgatcggcggcagcccttgcaatgacctgagcatcgtgaacccagcccggaagggcctgtacgagggaaccggcagactgttcttcgagttttacagactgctgcacgacgcccggcctaaggaaggcgacgaccggcccttcttttggctgttcgagaatgtggtggccatgggagtcagcgacaagcgggatattagccggttcctggagagcaaccccgtgatgatcgatgccaaggaagtgagcgccgcccaccgggccagatacttctggggcaatctgcctggcatgaacagacccctggccagcaccgtgaacgacaagctggagctgcaggagtgcctggagcacggccggatcgccaagttcagcaaggtgagaaccatcaccacccgaagcaacagcatcaaacaaggcaaggaccagcactttcctgtgttcatgaacgagaaggaggacatcctgtggtgtaccgagatggagagagtgttcgggttcccagtccactacacagatgtcagcaacatgtctagactggccagacagagactgctgggaagaagctggtccgtccctgtgatcagacacctgttcgcccctctgaaggagtacttcgcctgcgtgagcagcggcaacagcaacgccaacagccggggccccagcttctctagcggcctggtgccactgtccctgagagggagccacatgggccccatggagatctacaaaaccgtgagcgcctggaagcggcagcctgtgcgcgtgctgagcctgtttcggaatatcgataaagtcctgaaaagcctgggattcctggagagcggctctggctccggcggtggcaccctgaagtacgtggaggatgtgacaaacgtggtcagacgggatgtggagaagtggggccccttcgatctggtgtacggcagcacccaacccctgggcagctcttgtgaccggtgccctggctggtacatgtttcagttccaccggatcctgcagtacgccctgccgagacaggagtcccagcggccattcttttggattttcatggacaacttgctgctgaccgaggatgaccaggaaactaccactcggttcctgcagaccgaagccgtgaccctgcaggacgtgagaggccgggactaccagaacgccatgcgggtgtggtccaacatccctggactgaaaagcaagcacgcacctctgacccctaaagaagaggagtacctgcaggcccaggtgcggagcagaagcaagctggacgcccctaaggtggatctgctggtgaagaattgcctcctgcccctgagagagtacttcaagtatttcagccagaatagtctgcccctgggaggcagcggcggcggcgccctggtgacatttgaggacgtcgccgtgcggttcacccaggaggaatgggctctgctggatccttctcagaaaatcctgtaccgggacgtgatgagagagacataccggaatctgacctccgtgggcatcaactgggaatgttgggaccttgaagcctgcttcagaagcctgggaagaaacctgagagtgcaggtggtgaagagaaagtgcgagctgaccaacagcggcccctgcgccgagggcggcccaagcagcggcgcccctcctcccagcggcggcagcccagccggctccccaacctctaccgaggagggcacctctgagtccgccacccccgagagcggccctggcacctccaccgagcccagcgagggcagcgcacccggcagccctgccggcagccccacctccacagaggagggaaccagcaccgagcccagcgaaggcagcgccccaggcaccagcaccgagcctagtgagcaggagattaaacggatcaacaagatcagaagaagacttgtgaaagacagcaacaccaagaaggccggcaagacaggccccatgaaaaccctgctggttagagtgatgacacccgatctgagagagcggctggaaaacctgagaaagaagcctgaaaatatcccccagcccatcagcaatacatctagagccaacctgaataagctgctgaccgattacaccgaaatgaagaaggcgatcctgcatgtgtactgggaagagttccagaaggaccctgtgggcctgatgagccgggtggcccagcctgccagcaagaagatcgatcagaacaagctgaaacctgagatggacgagaagggcaacctgaccaccgccggctttgcctgctctcagtgtggccagcccctgttcgtgtacaagctggagcaggtgtctgagaagggcaaggcttacaccaactacttcggacggtgcaatgtggccgagcacgaaaagctgatcctgctggcccagctgaagcccgagaaggatagcgacgaagccgtgacatatagcctgggaaagtttgggcagagggccctggatttctacagcattcatgtgaccaaggagtccacccaccccgtgaagcccctggcccagatcgccggaaacagatacgcctccggacctgtgggaaaggccctgagcgacgcatgtatgggcacaatcgcctccttcctgtctaagtaccaggacatcatcatcgaacaccagaaggtggtgaagggcaaccagaagagactggagagcctgcgggagctggccggcaaggaaaacctggaataccctagcgtgaccctgccacctcagcctcacaccaaggagggcgttgatgcctacaacgaagtgatcgcccgggtgcgaatgtgggtgaacctgaacctgtggcagaagctgaagctaagcagagatgatgccaagcctctgctgagactgaagggattcccttcctttcctctggtcgagagacaggccaacgaagtggactggtgggacatggtgtgtaacgtgaagaagctgatcaacgagaaaaaggaggatggcaaggtgttttggcagaatctggctggctacaagagacaggaagccctgagaccatacctgagcagcgaggaagatcggaagaagggaaagaaattcgctcggtaccagctgggcgacctgctgctgcacctggaaaagaagcacggcgaggactggggaaaggtgtacgacgaggcctgggagcggattgacaagaaagtggaaggcctgagcaagcacatcaagctggaagaggaacggagaagcgaggacgcccagagcaaggccgccctgaccgactggctgcgggctaaggccagcttcgtgatcgagggcctgaaggaggccgacaaggacgagttctgcagatgcgagctgaagctgcagaagtggtacggggacctgcggggaaagcccttcgccatcgaagccgagaacagcatcctggacatcagcggcttcagcaagcagtacaactgtgccttcatctggcagaaggacggcgtgaagaagctgaacctgtacctgatcatcaactacttcaagggcggcaagctgcggttcaagaagatcaaacctgaagccttcgaagccaacagattctacaccgtgatcaacaaaaagagcggcgagatcgtgcccatggaggtgaacttcaacttcgacgaccccaacctgatcatcctgcctctggcctttggcaagagacagggcagagaattcatctggaacgacctgctgtccctggaaaccggcagcctgaagctggccaacggaagagtgatcgagaagacactgtacaacagaagaacccggcaggatgagcctgccctgttcgtggccctgaccttcgagcggcgggaggtcctggactcctccaatatcaaaccaatgaacctgatcggcgtggcaagaggcgaaaacatccccgccgtgatcgccctgaccgaccccgagggctgcccactgagccggtttaaggatagcctgggaaacccaacccacatcctgagaatcggcgagagctataaggagaagcagcggaccatccaggccaagaaggaggtggagcagcggagagccggcggctacagccggaagtacgccagcaaagccaagaatctggcagacgatatggtgagaaacaccgctagagatctgctgtactacgccgtgacccaggatgccatgctgatcttcgccaacctgagccggggcttcggccggcagggcaagcggaccttcatggccgagagacagtacacacggatggaggactggctgaccgccaagctggcctacgagggcctgagcaagacctacctgtccaagacactggcccagtacacctccaagacatgcagcaactgtgggtttaccatcaccagcgccgactacgacagggtgctggagaagctgaagaagacagcaacaggctggatgaccacaattaacggcaaggagctgaaggtggagggccagattacctactacaacagatacaagagacagaacgtagtcaaggacctgtccgtcgagctggatagactgagcgaagaatctgtgaacaacgacatctcctcctggacaaagggcagaagcggagaagctctgagcctcctgaagaaaagattctcccatagacccgtgcaggagaagttcgtgtgcctgaactgcggcttcgagacacacgcagccgagcaagccgccctgaacatcgccagatcctggctgttcctgcggagccaggagtacaagaaataccagacaaacaagacaaccggcaacaccgataagagagccttcgtcgagacctggcagtccttttaccggaagaagcttaaggaggtgtggaaacctgccgtgcggtctggcggatctggcggaggctccagccaggagagcgtgagcttcaaggacgtgaccgtgggcttcacccaggaggagtggcagcacctggaccccagccagagggccctgtacagggacgtgatgctggagaactacagcaacctggtgagcgtgggctactgcgtgcacaagcccgaggtgatcttcaggctgcagcagggcgaggagccctggaagctggaggaggagttccccagccagagcttccccgaggtgtggaccgccggcggcccaagcagcggcgcccctcctcccagcggcggcagcccagccggctccccaacctctaccgaggagggcacctctgagtccgccacccccgagagcggccctggcacctccaccgagcccagcgagggcagcgcacccggcagccctgccggcagccccacctccacagaggagggaaccagcaccgagcccagcgaaggcagcgccccaggcaccagcaccgagcctagtgagcaggagattaaacggatcaacaagatcagaagaagacttgtgaaagacagcaacaccaagaaggccggcaagacaggccccatgaaaaccctgctggttagagtgatgacacccgatctgagagagcggctggaaaacctgagaaagaagcctgaaaatatcccccagcccatcagcaatacatctagagccaacctgaataagctgctgaccgattacaccgaaatgaagaaggcgatcctgcatgtgtactgggaagagttccagaaggaccctgtgggcctgatgagccgggtggcccagcctgccagcaagaagatcgatcagaacaagctgaaacctgagatggacgagaagggcaacctgaccaccgccggctttgcctgctctcagtgtggccagcccctgttcgtgtacaagctggagcaggtgtctgagaagggcaaggcttacaccaactacttcggacggtgcaatgtggccgagcacgaaaagctgatcctgctggcccagctgaagcccgagaaggatagcgacgaagccgtgacatatagcctgggaaagtttgggcagagggccctggatttctacagcattcatgtgaccaaggagtccacccaccccgtgaagcccctggcccagatcgccggaaacagatacgcctccggacctgtgggaaaggccctgagcgacgcatgtatgggcacaatcgcctccttcctgtctaagtaccaggacatcatcatcgaacaccagaaggtggtgaagggcaaccagaagagactggagagcctgcgggagctggccggcaaggaaaacctggaataccctagcgtgaccctgccacctcagcctcacaccaaggagggcgttgatgcctacaacgaagtgatcgcccgggtgcgaatgtgggtgaacctgaacctgtggcagaagctgaagctaagcagagatgatgccaagcctctgctgagactgaagggattcccttcctttcctctggtcgagagacaggccaacgaagtggactggtgggacatggtgtgtaacgtgaagaagctgatcaacgagaaaaaggaggatggcaaggtgttttggcagaatctggctggctacaagagacaggaagccctgagaccatacctgagcagcgaggaagatcggaagaagggaaagaaattcgctcggtaccagctgggcgacctgctgctgcacctggaaaagaagcacggcgaggactggggaaaggtgtacgacgaggcctgggagcggattgacaagaaagtggaaggcctgagcaagcacatcaagctggaagaggaacggagaagcgaggacgcccagagcaaggccgccctgaccgactggctgcgggctaaggccagcttcgtgatcgagggcctgaaggaggccgacaaggacgagttctgcagatgcgagctgaagctgcagaagtggtacggggacctgcggggaaagcccttcgccatcgaagccgagaacagcatcctggacatcagcggcttcagcaagcagtacaactgtgccttcatctggcagaaggacggcgtgaagaagctgaacctgtacctgatcatcaactacttcaagggcggcaagctgcggttcaagaagatcaaacctgaagccttcgaagccaacagattctacaccgtgatcaacaaaaagagcggcgagatcgtgcccatggaggtgaacttcaacttcgacgaccccaacctgatcatcctgcctctggcctttggcaagagacagggcagagaattcatctggaacgacctgctgtccctggaaaccggcagcctgaagctggccaacggaagagtgatcgagaagacactgtacaacagaagaacccggcaggatgagcctgccctgttcgtggccctgaccttcgagcggcgggaggtcctggactcctccaatatcaaaccaatgaacctgatcggcgtggcaagaggcgaaaacatccccgccgtgatcgccctgaccgaccccgagggctgcccactgagccggtttaaggatagcctgggaaacccaacccacatcctgagaatcggcgagagctataaggagaagcagcggaccatccaggccaagaaggaggtggagcagcggagagccggcggctacagccggaagtacgccagcaaagccaagaatctggcagacgatatggtgagaaacaccgctagagatctgctgtactacgccgtgacccaggatgccatgctgatcttcgccaacctgagccggggcttcggccggcagggcaagcggaccttcatggccgagagacagtacacacggatggaggactggctgaccgccaagctggcctacgagggcctgagcaagacctacctgtccaagacactggcccagtacacctccaagacatgcagcaactgtgggtttaccatcaccagcgccgactacgacagggtgctggagaagctgaagaagacagcaacaggctggatgaccacaattaacggcaaggagctgaaggtggagggccagattacctactacaacagatacaagagacagaacgtagtcaaggacctgtccgtcgagctggatagactgagcgaagaatctgtgaacaacgacatctcctcctggacaaagggcagaagcggagaagctctgagcctcctgaagaaaagattctcccatagacccgtgcaggagaagttcgtgtgcctgaactgcggcttcgagacacacgcagccgagcaagccgccctgaacatcgccagatcctggctgttcctgcggagccaggagtacaagaaataccagacaaacaagacaaccggcaacaccgataagagagccttcgtcgagacctggcagtccttttaccggaagaagcttaaggaggtgtggaaacctgccgtgcggtctggcggatctggcggaggctcctagccaggagagcgtgagcttcaaggacgtgaccgtgggcttcacccaggaggagtggcagcacctggaccccagccagagggccctgtacagggacgtgatgctggagaactacagcaacctggtgagcgtgggctactgcgtgcacaagcccgaggtgatcttcaggctgcagcagggcgaggagccctggaagctggaggaggagttccccagccagagcttccccgaggtgtggaccgccggatctggctccggcagcggccccaagaaaaagagaaaagtctaagctgccttctgcggggcttgccttctggccatgcccttcttctctcccttgcacctgtacctcttggtctttgaataaagcctgagtaggaaggctagcaaaaaaaaaaaaaaaaaaaaaaaaaaaaaaaaaaaaaaaaaaaaaaaaaaaaaaaaaaaaaaaaaaaaaaaaaaaaaaaa

SEQ ID NO: 16214 - RNA, 9485 nt, synthetic construct
  source 1..9485: mol_type = other RNA
aggaaataagagagaaaagaagagtaagaagaaatataagagccaccatggcccctaagaagaagcgtaaagtgagccggatggaacgcctcgtctacgaggtgcggcagaagtgcagaaacatcgaggacatctgcatctcctgcggatctctgaacgtgaccctggagcacccactgttcatcggcggcatgtgccagaactgtaaaaactgttttctggagtgtgcctatcaatacgacgatgacggctaccagagctactgcaccatctgttgcggcggaagagaggtgctgatgtgtggaaataacaactgctgccggtgcttctgcgtggaatgcgtggacctgctggtgggccccggcgccgcccaggccgctattaaggaagatccttggaactgctacatgtgcggccacaagggcacatacggcctgctgagacggagagaggactggcctagcagactgcagatgttcttcgccaataaccacgaccaggagttcgacccccctaaggtgtaccctcccgtccccgccgagaagagaaagcccatccgggtcctgagcctgttcgatggcatcgccaccggtctgctggtgctgaaggacctgggcatccaggtggataggtacattgcctccgaggtgtgcgaggactccatcaccgtgggaatggtgcgtcatcagggcaagatcatgtacgtgggcgacgtgcggagcgtgacacagaagcatatccaggagtggggccctttcgacctggtgatcggcggcagcccttgcaatgacctgagcatcgtgaacccagcccggaagggcctgtacgagggaaccggcagactgttcttcgagttttacagactgctgcacgacgcccggcctaaggaaggcgacgaccggcccttcttttggctgttcgagaatgtggtggccatgggagtcagcgacaagcgggatattagccggttcctggagagcaaccccgtgatgatcgatgccaaggaagtgagcgccgcccaccgggccagatacttctggggcaatctgcctggcatgaacagacccctggccagcaccgtgaacgacaagctggagctgcaggagtgcctggagcacggccggatcgccaagttcagcaaggtgagaaccatcaccacccgaagcaacagcatcaaacaaggcaaggaccagcactttcctgtgttcatgaacgagaaggaggacatcctgtggtgtaccgagatggagagagtgttcgggttcccagtccactacacagatgtcagcaacatgtctagactggccagacagagactgctgggaagaagctggtccgtccctgtgatcagacacctgttcgcccctctgaaggagtacttcgcctgcgtgagcagcggcaacagcaacgccaacagccggggccccagcttctctagcggcctggtgccactgtccctgagagggagccacatgggccccatggagatctacaaaaccgtgagcgcctggaagcggcagcctgtgcgcgtgctgagcctgtttcggaatatcgataaagtcctgaaaagcctgggattcctggagagcggctctggctccggcggtggcaccctgaagtacgtggaggatgtgacaaacgtggtcagacgggatgtggagaagtggggccccttcgatctggtgtacggcagcacccaacccctgggcagctcttgtgaccggtgccctggctggtacatgtttcagttccaccggatcctgcagtacgccctgccgagacaggagtcccagcggccattcttttggattttcatggacaacttgctgctgaccgaggatgaccaggaaactaccactcggttcctgcagaccgaagccgtgaccctgcaggacgtgagaggccgggactaccagaacgccatgcgggtgtggtccaacatccctggactgaaaagcaagcacgcacctctgacccctaaagaagaggagtacctgcaggcccaggtgcggagcagaagcaagctggacgcccctaaggtggatctgctggtgaagaattgcctcctgcccctgagagagtacttcaagtatttcagccagaatagtctgcccctgggaggcagcggcggcggcgccctggtgacatttgaggacgtcgccgtgcggttcacccaggaggaatgggctctgctggatccttctcagaaaatcctgtaccgggacgtgatgagagagacataccggaatctgacctccgtgggcatcaactgggaatgttgggaccttgaagcctgcttcagaagcctgggaagaaacctgagagtgcaggtggtgaagagaaagtgcgagctgaccaacagcggcccctgcgccgagggcggcccaagcagcggcgcccctcctcccagcggcggcagcccagccggctccccaacctctaccgaggagggcacctctgagtccgccacccccgagagcggccctggcacctccaccgagcccagcgagggcagcgcacccggcagccctgccggcagccccacctccacagaggagggaaccagcaccgagcccagcgaaggcagcgccccaggcaccagcaccgagcctagtgagcaggagattaaacggatcaacaagatcagaagaagacttgtgaaagacagcaacaccaagaaggccggcaagacaggccccatgaaaaccctgctggttagagtgatgacacccgatctgagagagcggctggaaaacctgagaaagaagcctgaaaatatcccccagcccatcagcaatacatctagagccaacctgaataagctgctgaccgattacaccgaaatgaagaaggcgatcctgcatgtgtactgggaagagttccagaaggaccctgtgggcctgatgagccgggtggcccagcctgccagcaagaagatcgatcagaacaagctgaaacctgagatggacgagaagggcaacctgaccaccgccggctttgcctgctctcagtgtggccagcccctgttcgtgtacaagctggagcaggtgtctgagaagggcaaggcttacaccaactacttcggacggtgcaatgtggccgagcacgaaaagctgatcctgctggcccagctgaagcccgagaaggatagcgacgaagccgtgacatatagcctgggaaagtttgggcagagggccctggatttctacagcattcatgtgaccaaggagtccacccaccccgtgaagcccctggcccagatcgccggaaacagatacgcctccggacctgtgggaaaggccctgagcgacgcatgtatgggcacaatcgcctccttcctgtctaagtaccaggacatcatcatcgaacaccagaaggtggtgaagggcaaccagaagagactggagagcctgcgggagctggccggcaaggaaaacctggaataccctagcgtgaccctgccacctcagcctcacaccaaggagggcgttgatgcctacaacgaagtgatcgcccgggtgcgaatgtgggtgaacctgaacctgtggcagaagctgaagctaagcagagatgatgccaagcctctgctgagactgaagggattcccttcctttcctctggtcgagagacaggccaacgaagtggactggtgggacatggtgtgtaacgtgaagaagctgatcaacgagaaaaaggaggatggcaaggtgttttggcagaatctggctggctacaagagacaggaagccctgagaccatacctgagcagcgaggaagatcggaagaagggaaagaaattcgctcggtaccagctgggcgacctgctgctgcacctggaaaagaagcacggcgaggactggggaaaggtgtacgacgaggcctgggagcggattgacaagaaagtggaaggcctgagcaagcacatcaagctggaagaggaacggagaagcgaggacgcccagagcaaggccgccctgaccgactggctgcgggctaaggccagcttcgtgatcgagggcctgaaggaggccgacaaggacgagttctgcagatgcgagctgaagctgcagaagtggtacggggacctgcggggaaagcccttcgccatcgaagccgagaacagcatcctggacatcagcggcttcagcaagcagtacaactgtgccttcatctggcagaaggacggcgtgaagaagctgaacctgtacctgatcatcaactacttcaagggcggcaagctgcggttcaagaagatcaaacctgaagccttcgaagccaacagattctacaccgtgatcaacaaaaagagcggcgagatcgtgcccatggaggtgaacttcaacttcgacgaccccaacctgatcatcctgcctctggcctttggcaagagacagggcagagaattcatctggaacgacctgctgtccctggaaaccggcagcctgaagctggccaacggaagagtgatcgagaagacactgtacaacagaagaacccggcaggatgagcctgccctgttcgtggccctgaccttcgagcggcgggaggtcctggactcctccaatatcaaaccaatgaacctgatcggcgtggcaagaggcgaaaacatccccgccgtgatcgccctgaccgaccccgagggctgcccactgagccggtttaaggatagcctgggaaacccaacccacatcctgagaatcggcgagagctataaggagaagcagcggaccatccaggccaagaaggaggtggagcagcggagagccggcggctacagccggaagtacgccagcaaagccaagaatctggcagacgatatggtgagaaacaccgctagagatctgctgtactacgccgtgacccaggatgccatgctgatcttcgccaacctgagccggggcttcggccggcagggcaagcggaccttcatggccgagagacagtacacacggatggaggactggctgaccgccaagctggcctacgagggcctgagcaagacctacctgtccaagacactggcccagtacacctccaagacatgcagcaactgtgggtttaccatcaccagcgccgactacgacagggtgctggagaagctgaagaagacagcaacaggctggatgaccacaattaacggcaaggagctgaaggtggagggccagattacctactacaacagatacaagagacagaacgtagtcaaggacctgtccgtcgagctggatagactgagcgaagaatctgtgaacaacgacatctcctcctggacaaagggcagaagcggagaagctctgagcctcctgaagaaaagattctcccatagacccgtgcaggagaagttcgtgtgcctgaactgcggcttcgagacacacgcagccgagcaagccgccctgaacatcgccagatcctggctgttcctgcggagccaggagtacaagaaataccagacaaacaagacaaccggcaacaccgataagagagccttcgtcgagacctggcagtccttttaccggaagaagcttaaggaggtgtggaaacctgccgtgcggtctggcggatctggcggaggctccgagatggtgaccttcaaggacgtggccgtggtgttcaccgaggaggagctgggcctgctggacagcgcccagaggaagctgtacagggacgtgatgctggagaacttcaggaacctgctgctggtggcccaccagcccttcaagcccgacctgatcagccagctggagagggaggagaagctgctgatggtggagatggagacccccaaggacggctgcagcggcaggaagaaccagcagaagggcggcccaagcagcggcgcccctcctcccagcggcggcagcccagccggctccccaacctctaccgaggagggcacctctgagtccgccacccccgagagcggccctggcacctccaccgagcccagcgagggcagcgcacccggcagccctgccggcagccccacctccacagaggagggaaccagcaccgagcccagcgaaggcagcgccccaggcaccagcaccgagcctagtgagcaggagattaaacggatcaacaagatcagaagaagacttgtgaaagacagcaacaccaagaaggccggcaagacaggccccatgaaaaccctgctggttagagtgatgacacccgatctgagagagcggctggaaaacctgagaaagaagcctgaaaatatcccccagcccatcagcaatacatctagagccaacctgaataagctgctgaccgattacaccgaaatgaagaaggcgatcctgcatgtgtactgggaagagttccagaaggaccctgtgggcctgatgagccgggtggcccagcctgccagcaagaagatcgatcagaacaagctgaaacctgagatggacgagaagggcaacctgaccaccgccggctttgcctgctctcagtgtggccagcccctgttcgtgtacaagctggagcaggtgtctgagaagggcaaggcttacaccaactacttcggacggtgcaatgtggccgagcacgaaaagctgatcctgctggcccagctgaagcccgagaaggatagcgacgaagccgtgacatatagcctgggaaagtttgggcagagggccctggatttctacagcattcatgtgaccaaggagtccacccaccccgtgaagcccctggcccagatcgccggaaacagatacgcctccggacctgtgggaaaggccctgagcgacgcatgtatgggcacaatcgcctccttcctgtctaagtaccaggacatcatcatcgaacaccagaaggtggtgaagggcaaccagaagagactggagagcctgcgggagctggccggcaaggaaaacctggaataccctagcgtgaccctgccacctcagcctcacaccaaggagggcgttgatgcctacaacgaagtgatcgcccgggtgcgaatgtgggtgaacctgaacctgtggcagaagctgaagctaagcagagatgatgccaagcctctgctgagactgaagggattcccttcctttcctctggtcgagagacaggccaacgaagtggactggtgggacatggtgtgtaacgtgaagaagctgatcaacgagaaaaaggaggatggcaaggtgttttggcagaatctggctggctacaagagacaggaagccctgagaccatacctgagcagcgaggaagatcggaagaagggaaagaaattcgctcggtaccagctgggcgacctgctgctgcacctggaaaagaagcacggcgaggactggggaaaggtgtacgacgaggcctgggagcggattgacaagaaagtggaaggcctgagcaagcacatcaagctggaagaggaacggagaagcgaggacgcccagagcaaggccgccctgaccgactggctgcgggctaaggccagcttcgtgatcgagggcctgaaggaggccgacaaggacgagttctgcagatgcgagctgaagctgcagaagtggtacggggacctgcggggaaagcccttcgccatcgaagccgagaacagcatcctggacatcagcggcttcagcaagcagtacaactgtgccttcatctggcagaaggacggcgtgaagaagctgaacctgtacctgatcatcaactacttcaagggcggcaagctgcggttcaagaagatcaaacctgaagccttcgaagccaacagattctacaccgtgatcaacaaaaagagcggcgagatcgtgcccatggaggtgaacttcaacttcgacgaccccaacctgatcatcctgcctctggcctttggcaagagacagggcagagaattcatctggaacgacctgctgtccctggaaaccggcagcctgaagctggccaacggaagagtgatcgagaagacactgtacaacagaagaacccggcaggatgagcctgccctgttcgtggccctgaccttcgagcggcgggaggtcctggactcctccaatatcaaaccaatgaacctgatcggcgtggcaagaggcgaaaacatccccgccgtgatcgccctgaccgaccccgagggctgcccactgagccggtttaaggatagcctgggaaacccaacccacatcctgagaatcggcgagagctataaggagaagcagcggaccatccaggccaagaaggaggtggagcagcggagagccggcggctacagccggaagtacgccagcaaagccaagaatctggcagacgatatggtgagaaacaccgctagagatctgctgtactacgccgtgacccaggatgccatgctgatcttcgccaacctgagccggggcttcggccggcagggcaagcggaccttcatggccgagagacagtacacacggatggaggactggctgaccgccaagctggcctacgagggcctgagcaagacctacctgtccaagacactggcccagtacacctccaagacatgcagcaactgtgggtttaccatcaccagcgccgactacgacagggtgctggagaagctgaagaagacagcaacaggctggatgaccacaattaacggcaaggagctgaaggtggagggccagattacctactacaacagatacaagagacagaacgtagtcaaggacctgtccgtcgagctggatagactgagcgaagaatctgtgaacaacgacatctcctcctggacaaagggcagaagcggagaagctctgagcctcctgaagaaaagattctcccatagacccgtgcaggagaagttcgtgtgcctgaactgcggcttcgagacacacgcagccgagcaagccgccctgaacatcgccagatcctggctgttcctgcggagccaggagtacaagaaataccagacaaacaagacaaccggcaacaccgataagagagccttcgtcgagacctggcagtccttttaccggaagaagcttaaggaggtgtggaaacctgccgtgcggtctggcggatctggcggaggctcctgagatggtgaccttcaaggacgtggccgtggtgttcaccgaggaggagctgggcctgctggacagcgcccagaggaagctgtacagggacgtgatgctggagaacttcaggaacctgctgctggtggcccaccagcccttcaagcccgacctgatcagccagctggagagggaggagaagctgctgatggtggagatggagacccccaaggacggctgcagcggcaggaagaaccagcagaagggatctggctccggcagcggccccaagaaaaagagaaaagtctaagctgccttctgcggggcttgccttctggccatgcccttcttctctcccttgcacctgtacctcttggtctttgaataaagcctgagtaggaaggctagcaaaaaaaaaaaaaaaaaaaaaaaaaaaaaaaaaaaaaaaaaaaaaaaaaaaaaaaaaaaaaaaaaaaaaaaaaaaaaaaa

SEQ ID NO: 16215 - RNA, 9485 nt, synthetic construct
  source 1..9485: mol_type = other RNA
aggaaataagagagaaaagaagagtaagaagaaatataagagccaccatggcccctaagaagaagcgtaaagtgagccggatggaacgcctcgtctacgaggtgcggcagaagtgcagaaacatcgaggacatctgcatctcctgcggatctctgaacgtgaccctggagcacccactgttcatcggcggcatgtgccagaactgtaaaaactgttttctggagtgtgcctatcaatacgacgatgacggctaccagagctactgcaccatctgttgcggcggaagagaggtgctgatgtgtggaaataacaactgctgccggtgcttctgcgtggaatgcgtggacctgctggtgggccccggcgccgcccaggccgctattaaggaagatccttggaactgctacatgtgcggccacaagggcacatacggcctgctgagacggagagaggactggcctagcagactgcagatgttcttcgccaataaccacgaccaggagttcgacccccctaaggtgtaccctcccgtccccgccgagaagagaaagcccatccgggtcctgagcctgttcgatggcatcgccaccggtctgctggtgctgaaggacctgggcatccaggtggataggtacattgcctccgaggtgtgcgaggactccatcaccgtgggaatggtgcgtcatcagggcaagatcatgtacgtgggcgacgtgcggagcgtgacacagaagcatatccaggagtggggccctttcgacctggtgatcggcggcagcccttgcaatgacctgagcatcgtgaacccagcccggaagggcctgtacgagggaaccggcagactgttcttcgagttttacagactgctgcacgacgcccggcctaaggaaggcgacgaccggcccttcttttggctgttcgagaatgtggtggccatgggagtcagcgacaagcgggatattagccggttcctggagagcaaccccgtgatgatcgatgccaaggaagtgagcgccgcccaccgggccagatacttctggggcaatctgcctggcatgaacagacccctggccagcaccgtgaacgacaagctggagctgcaggagtgcctggagcacggccggatcgccaagttcagcaaggtgagaaccatcaccacccgaagcaacagcatcaaacaaggcaaggaccagcactttcctgtgttcatgaacgagaaggaggacatcctgtggtgtaccgagatggagagagtgttcgggttcccagtccactacacagatgtcagcaacatgtctagactggccagacagagactgctgggaagaagctggtccgtccctgtgatcagacacctgttcgcccctctgaaggagtacttcgcctgcgtgagcagcggcaacagcaacgccaacagccggggccccagcttctctagcggcctggtgccactgtccctgagagggagccacatgggccccatggagatctacaaaaccgtgagcgcctggaagcggcagcctgtgcgcgtgctgagcctgtttcggaatatcgataaagtcctgaaaagcctgggattcctggagagcggctctggctccggcggtggcaccctgaagtacgtggaggatgtgacaaacgtggtcagacgggatgtggagaagtggggccccttcgatctggtgtacggcagcacccaacccctgggcagctcttgtgaccggtgccctggctggtacatgtttcagttccaccggatcctgcagtacgccctgccgagacaggagtcccagcggccattcttttggattttcatggacaacttgctgctgaccgaggatgaccaggaaactaccactcggttcctgcagaccgaagccgtgaccctgcaggacgtgagaggccgggactaccagaacgccatgcgggtgtggtccaacatccctggactgaaaagcaagcacgcacctctgacccctaaagaagaggagtacctgcaggcccaggtgcggagcagaagcaagctggacgcccctaaggtggatctgctggtgaagaattgcctcctgcccctgagagagtacttcaagtatttcagccagaatagtctgcccctgggaggcagcggcggcggcgccctggtgacatttgaggacgtcgccgtgcggttcacccaggaggaatgggctctgctggatccttctcagaaaatcctgtaccgggacgtgatgagagagacataccggaatctgacctccgtgggcatcaactgggaatgttgggaccttgaagcctgcttcagaagcctgggaagaaacctgagagtgcaggtggtgaagagaaagtgcgagctgaccaacagcggcccctgcgccgagggcggcccaagcagcggcgcccctcctcccagcggcggcagcccagccggctccccaacctctaccgaggagggcacctctgagtccgccacccccgagagcggccctggcacctccaccgagcccagcgagggcagcgcacccggcagccctgccggcagccccacctccacagaggagggaaccagcaccgagcccagcgaaggcagcgccccaggcaccagcaccgagcctagtgagcaggagattaaacggatcaacaagatcagaagaagacttgtgaaagacagcaacaccaagaaggccggcaagacaggccccatgaaaaccctgctggttagagtgatgacacccgatctgagagagcggctggaaaacctgagaaagaagcctgaaaatatcccccagcccatcagcaatacatctagagccaacctgaataagctgctgaccgattacaccgaaatgaagaaggcgatcctgcatgtgtactgggaagagttccagaaggaccctgtgggcctgatgagccgggtggcccagcctgccagcaagaagatcgatcagaacaagctgaaacctgagatggacgagaagggcaacctgaccaccgccggctttgcctgctctcagtgtggccagcccctgttcgtgtacaagctggagcaggtgtctgagaagggcaaggcttacaccaactacttcggacggtgcaatgtggccgagcacgaaaagctgatcctgctggcccagctgaagcccgagaaggatagcgacgaagccgtgacatatagcctgggaaagtttgggcagagggccctggatttctacagcattcatgtgaccaaggagtccacccaccccgtgaagcccctggcccagatcgccggaaacagatacgcctccggacctgtgggaaaggccctgagcgacgcatgtatgggcacaatcgcctccttcctgtctaagtaccaggacatcatcatcgaacaccagaaggtggtgaagggcaaccagaagagactggagagcctgcgggagctggccggcaaggaaaacctggaataccctagcgtgaccctgccacctcagcctcacaccaaggagggcgttgatgcctacaacgaagtgatcgcccgggtgcgaatgtgggtgaacctgaacctgtggcagaagctgaagctaagcagagatgatgccaagcctctgctgagactgaagggattcccttcctttcctctggtcgagagacaggccaacgaagtggactggtgggacatggtgtgtaacgtgaagaagctgatcaacgagaaaaaggaggatggcaaggtgttttggcagaatctggctggctacaagagacaggaagccctgagaccatacctgagcagcgaggaagatcggaagaagggaaagaaattcgctcggtaccagctgggcgacctgctgctgcacctggaaaagaagcacggcgaggactggggaaaggtgtacgacgaggcctgggagcggattgacaagaaagtggaaggcctgagcaagcacatcaagctggaagaggaacggagaagcgaggacgcccagagcaaggccgccctgaccgactggctgcgggctaaggccagcttcgtgatcgagggcctgaaggaggccgacaaggacgagttctgcagatgcgagctgaagctgcagaagtggtacggggacctgcggggaaagcccttcgccatcgaagccgagaacagcatcctggacatcagcggcttcagcaagcagtacaactgtgccttcatctggcagaaggacggcgtgaagaagctgaacctgtacctgatcatcaactacttcaagggcggcaagctgcggttcaagaagatcaaacctgaagccttcgaagccaacagattctacaccgtgatcaacaaaaagagcggcgagatcgtgcccatggaggtgaacttcaacttcgacgaccccaacctgatcatcctgcctctggcctttggcaagagacagggcagagaattcatctggaacgacctgctgtccctggaaaccggcagcctgaagctggccaacggaagagtgatcgagaagacactgtacaacagaagaacccggcaggatgagcctgccctgttcgtggccctgaccttcgagcggcgggaggtcctggactcctccaatatcaaaccaatgaacctgatcggcgtggcaagaggcgaaaacatccccgccgtgatcgccctgaccgaccccgagggctgcccactgagccggtttaaggatagcctgggaaacccaacccacatcctgagaatcggcgagagctataaggagaagcagcggaccatccaggccaagaaggaggtggagcagcggagagccggcggctacagccggaagtacgccagcaaagccaagaatctggcagacgatatggtgagaaacaccgctagagatctgctgtactacgccgtgacccaggatgccatgctgatcttcgccaacctgagccggggcttcggccggcagggcaagcggaccttcatggccgagagacagtacacacggatggaggactggctgaccgccaagctggcctacgagggcctgagcaagacctacctgtccaagacactggcccagtacacctccaagacatgcagcaactgtgggtttaccatcaccagcgccgactacgacagggtgctggagaagctgaagaagacagcaacaggctggatgaccacaattaacggcaaggagctgaaggtggagggccagattacctactacaacagatacaagagacagaacgtagtcaaggacctgtccgtcgagctggatagactgagcgaagaatctgtgaacaacgacatctcctcctggacaaagggcagaagcggagaagctctgagcctcctgaagaaaagattctcccatagacccgtgcaggagaagttcgtgtgcctgaactgcggcttcgagacacacgcagccgagcaagccgccctgaacatcgccagatcctggctgttcctgcggagccaggagtacaagaaataccagacaaacaagacaaccggcaacaccgataagagagccttcgtcgagacctggcagtccttttaccggaagaagcttaaggaggtgtggaaacctgccgtgcggtctggcggatctggcggaggctccatgcacctgaccgcctggccccagaagagcgtgaccttcgaggacgtggccgtgtacttcacccaggccgagtgggacggcctgagccccgcccagagggccctgtacagggacgtgatgctggagaactacggcaacgtggccagcctgggcttccccctgctgaagcccgccgtgatcagccagctggagggcggcggcgagctgggcggccccagccccctggccgccggcaccggcctgggcggcccaagcagcggcgcccctcctcccagcggcggcagcccagccggctccccaacctctaccgaggagggcacctctgagtccgccacccccgagagcggccctggcacctccaccgagcccagcgagggcagcgcacccggcagccctgccggcagccccacctccacagaggagggaaccagcaccgagcccagcgaaggcagcgccccaggcaccagcaccgagcctagtgagcaggagattaaacggatcaacaagatcagaagaagacttgtgaaagacagcaacaccaagaaggccggcaagacaggccccatgaaaaccctgctggttagagtgatgacacccgatctgagagagcggctggaaaacctgagaaagaagcctgaaaatatcccccagcccatcagcaatacatctagagccaacctgaataagctgctgaccgattacaccgaaatgaagaaggcgatcctgcatgtgtactgggaagagttccagaaggaccctgtgggcctgatgagccgggtggcccagcctgccagcaagaagatcgatcagaacaagctgaaacctgagatggacgagaagggcaacctgaccaccgccggctttgcctgctctcagtgtggccagcccctgttcgtgtacaagctggagcaggtgtctgagaagggcaaggcttacaccaactacttcggacggtgcaatgtggccgagcacgaaaagctgatcctgctggcccagctgaagcccgagaaggatagcgacgaagccgtgacatatagcctgggaaagtttgggcagagggccctggatttctacagcattcatgtgaccaaggagtccacccaccccgtgaagcccctggcccagatcgccggaaacagatacgcctccggacctgtgggaaaggccctgagcgacgcatgtatgggcacaatcgcctccttcctgtctaagtaccaggacatcatcatcgaacaccagaaggtggtgaagggcaaccagaagagactggagagcctgcgggagctggccggcaaggaaaacctggaataccctagcgtgaccctgccacctcagcctcacaccaaggagggcgttgatgcctacaacgaagtgatcgcccgggtgcgaatgtgggtgaacctgaacctgtggcagaagctgaagctaagcagagatgatgccaagcctctgctgagactgaagggattcccttcctttcctctggtcgagagacaggccaacgaagtggactggtgggacatggtgtgtaacgtgaagaagctgatcaacgagaaaaaggaggatggcaaggtgttttggcagaatctggctggctacaagagacaggaagccctgagaccatacctgagcagcgaggaagatcggaagaagggaaagaaattcgctcggtaccagctgggcgacctgctgctgcacctggaaaagaagcacggcgaggactggggaaaggtgtacgacgaggcctgggagcggattgacaagaaagtggaaggcctgagcaagcacatcaagctggaagaggaacggagaagcgaggacgcccagagcaaggccgccctgaccgactggctgcgggctaaggccagcttcgtgatcgagggcctgaaggaggccgacaaggacgagttctgcagatgcgagctgaagctgcagaagtggtacggggacctgcggggaaagcccttcgccatcgaagccgagaacagcatcctggacatcagcggcttcagcaagcagtacaactgtgccttcatctggcagaaggacggcgtgaagaagctgaacctgtacctgatcatcaactacttcaagggcggcaagctgcggttcaagaagatcaaacctgaagccttcgaagccaacagattctacaccgtgatcaacaaaaagagcggcgagatcgtgcccatggaggtgaacttcaacttcgacgaccccaacctgatcatcctgcctctggcctttggcaagagacagggcagagaattcatctggaacgacctgctgtccctggaaaccggcagcctgaagctggccaacggaagagtgatcgagaagacactgtacaacagaagaacccggcaggatgagcctgccctgttcgtggccctgaccttcgagcggcgggaggtcctggactcctccaatatcaaaccaatgaacctgatcggcgtggcaagaggcgaaaacatccccgccgtgatcgccctgaccgaccccgagggctgcccactgagccggtttaaggatagcctgggaaacccaacccacatcctgagaatcggcgagagctataaggagaagcagcggaccatccaggccaagaaggaggtggagcagcggagagccggcggctacagccggaagtacgccagcaaagccaagaatctggcagacgatatggtgagaaacaccgctagagatctgctgtactacgccgtgacccaggatgccatgctgatcttcgccaacctgagccggggcttcggccggcagggcaagcggaccttcatggccgagagacagtacacacggatggaggactggctgaccgccaagctggcctacgagggcctgagcaagacctacctgtccaagacactggcccagtacacctccaagacatgcagcaactgtgggtttaccatcaccagcgccgactacgacagggtgctggagaagctgaagaagacagcaacaggctggatgaccacaattaacggcaaggagctgaaggtggagggccagattacctactacaacagatacaagagacagaacgtagtcaaggacctgtccgtcgagctggatagactgagcgaagaatctgtgaacaacgacatctcctcctggacaaagggcagaagcggagaagctctgagcctcctgaagaaaagattctcccatagacccgtgcaggagaagttcgtgtgcctgaactgcggcttcgagacacacgcagccgagcaagccgccctgaacatcgccagatcctggctgttcctgcggagccaggagtacaagaaataccagacaaacaagacaaccggcaacaccgataagagagccttcgtcgagacctggcagtccttttaccggaagaagcttaaggaggtgtggaaacctgccgtgcggtctggcggatctggcggaggctcctatgcacctgaccgcctggccccagaagagcgtgaccttcgaggacgtggccgtgtacttcacccaggccgagtgggacggcctgagccccgcccagagggccctgtacagggacgtgatgctggagaactacggcaacgtggccagcctgggcttccccctgctgaagcccgccgtgatcagccagctggagggcggcggcgagctgggcggccccagccccctggccgccggcaccggcctgggatctggctccggcagcggccccaagaaaaagagaaaagtctaagctgccttctgcggggcttgccttctggccatgcccttcttctctcccttgcacctgtacctcttggtctttgaataaagcctgagtaggaaggctagcaaaaaaaaaaaaaaaaaaaaaaaaaaaaaaaaaaaaaaaaaaaaaaaaaaaaaaaaaaaaaaaaaaaaaaaaaaaaaaaa

SEQ ID NO: 16216 - RNA, 9485 nt, synthetic construct
  source 1..9485: mol_type = other RNA
aggaaataagagagaaaagaagagtaagaagaaatataagagccaccatggcccctaagaagaagcgtaaagtgagccggatggaacgcctcgtctacgaggtgcggcagaagtgcagaaacatcgaggacatctgcatctcctgcggatctctgaacgtgaccctggagcacccactgttcatcggcggcatgtgccagaactgtaaaaactgttttctggagtgtgcctatcaatacgacgatgacggctaccagagctactgcaccatctgttgcggcggaagagaggtgctgatgtgtggaaataacaactgctgccggtgcttctgcgtggaatgcgtggacctgctggtgggccccggcgccgcccaggccgctattaaggaagatccttggaactgctacatgtgcggccacaagggcacatacggcctgctgagacggagagaggactggcctagcagactgcagatgttcttcgccaataaccacgaccaggagttcgacccccctaaggtgtaccctcccgtccccgccgagaagagaaagcccatccgggtcctgagcctgttcgatggcatcgccaccggtctgctggtgctgaaggacctgggcatccaggtggataggtacattgcctccgaggtgtgcgaggactccatcaccgtgggaatggtgcgtcatcagggcaagatcatgtacgtgggcgacgtgcggagcgtgacacagaagcatatccaggagtggggccctttcgacctggtgatcggcggcagcccttgcaatgacctgagcatcgtgaacccagcccggaagggcctgtacgagggaaccggcagactgttcttcgagttttacagactgctgcacgacgcccggcctaaggaaggcgacgaccggcccttcttttggctgttcgagaatgtggtggccatgggagtcagcgacaagcgggatattagccggttcctggagagcaaccccgtgatgatcgatgccaaggaagtgagcgccgcccaccgggccagatacttctggggcaatctgcctggcatgaacagacccctggccagcaccgtgaacgacaagctggagctgcaggagtgcctggagcacggccggatcgccaagttcagcaaggtgagaaccatcaccacccgaagcaacagcatcaaacaaggcaaggaccagcactttcctgtgttcatgaacgagaaggaggacatcctgtggtgtaccgagatggagagagtgttcgggttcccagtccactacacagatgtcagcaacatgtctagactggccagacagagactgctgggaagaagctggtccgtccctgtgatcagacacctgttcgcccctctgaaggagtacttcgcctgcgtgagcagcggcaacagcaacgccaacagccggggccccagcttctctagcggcctggtgccactgtccctgagagggagccacatgggccccatggagatctacaaaaccgtgagcgcctggaagcggcagcctgtgcgcgtgctgagcctgtttcggaatatcgataaagtcctgaaaagcctgggattcctggagagcggctctggctccggcggtggcaccctgaagtacgtggaggatgtgacaaacgtggtcagacgggatgtggagaagtggggccccttcgatctggtgtacggcagcacccaacccctgggcagctcttgtgaccggtgccctggctggtacatgtttcagttccaccggatcctgcagtacgccctgccgagacaggagtcccagcggccattcttttggattttcatggacaacttgctgctgaccgaggatgaccaggaaactaccactcggttcctgcagaccgaagccgtgaccctgcaggacgtgagaggccgggactaccagaacgccatgcgggtgtggtccaacatccctggactgaaaagcaagcacgcacctctgacccctaaagaagaggagtacctgcaggcccaggtgcggagcagaagcaagctggacgcccctaaggtggatctgctggtgaagaattgcctcctgcccctgagagagtacttcaagtatttcagccagaatagtctgcccctgggaggcagcggcggcggcgccctggtgacatttgaggacgtcgccgtgcggttcacccaggaggaatgggctctgctggatccttctcagaaaatcctgtaccgggacgtgatgagagagacataccggaatctgacctccgtgggcatcaactgggaatgttgggaccttgaagcctgcttcagaagcctgggaagaaacctgagagtgcaggtggtgaagagaaagtgcgagctgaccaacagcggcccctgcgccgagggcggcccaagcagcggcgcccctcctcccagcggcggcagcccagccggctccccaacctctaccgaggagggcacctctgagtccgccacccccgagagcggccctggcacctccaccgagcccagcgagggcagcgcacccggcagccctgccggcagccccacctccacagaggagggaaccagcaccgagcccagcgaaggcagcgccccaggcaccagcaccgagcctagtgagcaggagattaaacggatcaacaagatcagaagaagacttgtgaaagacagcaacaccaagaaggccggcaagacaggccccatgaaaaccctgctggttagagtgatgacacccgatctgagagagcggctggaaaacctgagaaagaagcctgaaaatatcccccagcccatcagcaatacatctagagccaacctgaataagctgctgaccgattacaccgaaatgaagaaggcgatcctgcatgtgtactgggaagagttccagaaggaccctgtgggcctgatgagccgggtggcccagcctgccagcaagaagatcgatcagaacaagctgaaacctgagatggacgagaagggcaacctgaccaccgccggctttgcctgctctcagtgtggccagcccctgttcgtgtacaagctggagcaggtgtctgagaagggcaaggcttacaccaactacttcggacggtgcaatgtggccgagcacgaaaagctgatcctgctggcccagctgaagcccgagaaggatagcgacgaagccgtgacatatagcctgggaaagtttgggcagagggccctggatttctacagcattcatgtgaccaaggagtccacccaccccgtgaagcccctggcccagatcgccggaaacagatacgcctccggacctgtgggaaaggccctgagcgacgcatgtatgggcacaatcgcctccttcctgtctaagtaccaggacatcatcatcgaacaccagaaggtggtgaagggcaaccagaagagactggagagcctgcgggagctggccggcaaggaaaacctggaataccctagcgtgaccctgccacctcagcctcacaccaaggagggcgttgatgcctacaacgaagtgatcgcccgggtgcgaatgtgggtgaacctgaacctgtggcagaagctgaagctaagcagagatgatgccaagcctctgctgagactgaagggattcccttcctttcctctggtcgagagacaggccaacgaagtggactggtgggacatggtgtgtaacgtgaagaagctgatcaacgagaaaaaggaggatggcaaggtgttttggcagaatctggctggctacaagagacaggaagccctgagaccatacctgagcagcgaggaagatcggaagaagggaaagaaattcgctcggtaccagctgggcgacctgctgctgcacctggaaaagaagcacggcgaggactggggaaaggtgtacgacgaggcctgggagcggattgacaagaaagtggaaggcctgagcaagcacatcaagctggaagaggaacggagaagcgaggacgcccagagcaaggccgccctgaccgactggctgcgggctaaggccagcttcgtgatcgagggcctgaaggaggccgacaaggacgagttctgcagatgcgagctgaagctgcagaagtggtacggggacctgcggggaaagcccttcgccatcgaagccgagaacagcatcctggacatcagcggcttcagcaagcagtacaactgtgccttcatctggcagaaggacggcgtgaagaagctgaacctgtacctgatcatcaactacttcaagggcggcaagctgcggttcaagaagatcaaacctgaagccttcgaagccaacagattctacaccgtgatcaacaaaaagagcggcgagatcgtgcccatggaggtgaacttcaacttcgacgaccccaacctgatcatcctgcctctggcctttggcaagagacagggcagagaattcatctggaacgacctgctgtccctggaaaccggcagcctgaagctggccaacggaagagtgatcgagaagacactgtacaacagaagaacccggcaggatgagcctgccctgttcgtggccctgaccttcgagcggcgggaggtcctggactcctccaatatcaaaccaatgaacctgatcggcgtggcaagaggcgaaaacatccccgccgtgatcgccctgaccgaccccgagggctgcccactgagccggtttaaggatagcctgggaaacccaacccacatcctgagaatcggcgagagctataaggagaagcagcggaccatccaggccaagaaggaggtggagcagcggagagccggcggctacagccggaagtacgccagcaaagccaagaatctggcagacgatatggtgagaaacaccgctagagatctgctgtactacgccgtgacccaggatgccatgctgatcttcgccaacctgagccggggcttcggccggcagggcaagcggaccttcatggccgagagacagtacacacggatggaggactggctgaccgccaagctggcctacgagggcctgagcaagacctacctgtccaagacactggcccagtacacctccaagacatgcagcaactgtgggtttaccatcaccagcgccgactacgacagggtgctggagaagctgaagaagacagcaacaggctggatgaccacaattaacggcaaggagctgaaggtggagggccagattacctactacaacagatacaagagacagaacgtagtcaaggacctgtccgtcgagctggatagactgagcgaagaatctgtgaacaacgacatctcctcctggacaaagggcagaagcggagaagctctgagcctcctgaagaaaagattctcccatagacccgtgcaggagaagttcgtgtgcctgaactgcggcttcgagacacacgcagccgagcaagccgccctgaacatcgccagatcctggctgttcctgcggagccaggagtacaagaaataccagacaaacaagacaaccggcaacaccgataagagagccttcgtcgagacctggcagtccttttaccggaagaagcttaaggaggtgtggaaacctgccgtgcggtctggcggatctggcggaggctcccccctggagagcgtgaccttcaaggacgtggccatcgacttcaccctggaggagtggaggctgatggaccccacccagaggaacctgcacaaggacgtgatgctggagaactacaggaacctggtgagcctgggcctggccgtgagcaagcccgacatgatcagccacctggagaacggcaagggcccctgggtgaccatgaggggcatcagcaggatcccctaccccgacatcgagcccaagggcggcccaagcagcggcgcccctcctcccagcggcggcagcccagccggctccccaacctctaccgaggagggcacctctgagtccgccacccccgagagcggccctggcacctccaccgagcccagcgagggcagcgcacccggcagccctgccggcagccccacctccacagaggagggaaccagcaccgagcccagcgaaggcagcgccccaggcaccagcaccgagcctagtgagcaggagattaaacggatcaacaagatcagaagaagacttgtgaaagacagcaacaccaagaaggccggcaagacaggccccatgaaaaccctgctggttagagtgatgacacccgatctgagagagcggctggaaaacctgagaaagaagcctgaaaatatcccccagcccatcagcaatacatctagagccaacctgaataagctgctgaccgattacaccgaaatgaagaaggcgatcctgcatgtgtactgggaagagttccagaaggaccctgtgggcctgatgagccgggtggcccagcctgccagcaagaagatcgatcagaacaagctgaaacctgagatggacgagaagggcaacctgaccaccgccggctttgcctgctctcagtgtggccagcccctgttcgtgtacaagctggagcaggtgtctgagaagggcaaggcttacaccaactacttcggacggtgcaatgtggccgagcacgaaaagctgatcctgctggcccagctgaagcccgagaaggatagcgacgaagccgtgacatatagcctgggaaagtttgggcagagggccctggatttctacagcattcatgtgaccaaggagtccacccaccccgtgaagcccctggcccagatcgccggaaacagatacgcctccggacctgtgggaaaggccctgagcgacgcatgtatgggcacaatcgcctccttcctgtctaagtaccaggacatcatcatcgaacaccagaaggtggtgaagggcaaccagaagagactggagagcctgcgggagctggccggcaaggaaaacctggaataccctagcgtgaccctgccacctcagcctcacaccaaggagggcgttgatgcctacaacgaagtgatcgcccgggtgcgaatgtgggtgaacctgaacctgtggcagaagctgaagctaagcagagatgatgccaagcctctgctgagactgaagggattcccttcctttcctctggtcgagagacaggccaacgaagtggactggtgggacatggtgtgtaacgtgaagaagctgatcaacgagaaaaaggaggatggcaaggtgttttggcagaatctggctggctacaagagacaggaagccctgagaccatacctgagcagcgaggaagatcggaagaagggaaagaaattcgctcggtaccagctgggcgacctgctgctgcacctggaaaagaagcacggcgaggactggggaaaggtgtacgacgaggcctgggagcggattgacaagaaagtggaaggcctgagcaagcacatcaagctggaagaggaacggagaagcgaggacgcccagagcaaggccgccctgaccgactggctgcgggctaaggccagcttcgtgatcgagggcctgaaggaggccgacaaggacgagttctgcagatgcgagctgaagctgcagaagtggtacggggacctgcggggaaagcccttcgccatcgaagccgagaacagcatcctggacatcagcggcttcagcaagcagtacaactgtgccttcatctggcagaaggacggcgtgaagaagctgaacctgtacctgatcatcaactacttcaagggcggcaagctgcggttcaagaagatcaaacctgaagccttcgaagccaacagattctacaccgtgatcaacaaaaagagcggcgagatcgtgcccatggaggtgaacttcaacttcgacgaccccaacctgatcatcctgcctctggcctttggcaagagacagggcagagaattcatctggaacgacctgctgtccctggaaaccggcagcctgaagctggccaacggaagagtgatcgagaagacactgtacaacagaagaacccggcaggatgagcctgccctgttcgtggccctgaccttcgagcggcgggaggtcctggactcctccaatatcaaaccaatgaacctgatcggcgtggcaagaggcgaaaacatccccgccgtgatcgccctgaccgaccccgagggctgcccactgagccggtttaaggatagcctgggaaacccaacccacatcctgagaatcggcgagagctataaggagaagcagcggaccatccaggccaagaaggaggtggagcagcggagagccggcggctacagccggaagtacgccagcaaagccaagaatctggcagacgatatggtgagaaacaccgctagagatctgctgtactacgccgtgacccaggatgccatgctgatcttcgccaacctgagccggggcttcggccggcagggcaagcggaccttcatggccgagagacagtacacacggatggaggactggctgaccgccaagctggcctacgagggcctgagcaagacctacctgtccaagacactggcccagtacacctccaagacatgcagcaactgtgggtttaccatcaccagcgccgactacgacagggtgctggagaagctgaagaagacagcaacaggctggatgaccacaattaacggcaaggagctgaaggtggagggccagattacctactacaacagatacaagagacagaacgtagtcaaggacctgtccgtcgagctggatagactgagcgaagaatctgtgaacaacgacatctcctcctggacaaagggcagaagcggagaagctctgagcctcctgaagaaaagattctcccatagacccgtgcaggagaagttcgtgtgcctgaactgcggcttcgagacacacgcagccgagcaagccgccctgaacatcgccagatcctggctgttcctgcggagccaggagtacaagaaataccagacaaacaagacaaccggcaacaccgataagagagccttcgtcgagacctggcagtccttttaccggaagaagcttaaggaggtgtggaaacctgccgtgcggtctggcggatctggcggaggctcctcccctggagagcgtgaccttcaaggacgtggccatcgacttcaccctggaggagtggaggctgatggaccccacccagaggaacctgcacaaggacgtgatgctggagaactacaggaacctggtgagcctgggcctggccgtgagcaagcccgacatgatcagccacctggagaacggcaagggcccctgggtgaccatgaggggcatcagcaggatcccctaccccgacatcgagcccaagggatctggctccggcagcggccccaagaaaaagagaaaagtctaagctgccttctgcggggcttgccttctggccatgcccttcttctctcccttgcacctgtacctcttggtctttgaataaagcctgagtaggaaggctagcaaaaaaaaaaaaaaaaaaaaaaaaaaaaaaaaaaaaaaaaaaaaaaaaaaaaaaaaaaaaaaaaaaaaaaaaaaaaaaaa

SEQ ID NO: 16217 - RNA, 9485 nt, synthetic construct
  source 1..9485: mol_type = other RNA
aggaaataagagagaaaagaagagtaagaagaaatataagagccaccatggcccctaagaagaagcgtaaagtgagccggatggaacgcctcgtctacgaggtgcggcagaagtgcagaaacatcgaggacatctgcatctcctgcggatctctgaacgtgaccctggagcacccactgttcatcggcggcatgtgccagaactgtaaaaactgttttctggagtgtgcctatcaatacgacgatgacggctaccagagctactgcaccatctgttgcggcggaagagaggtgctgatgtgtggaaataacaactgctgccggtgcttctgcgtggaatgcgtggacctgctggtgggccccggcgccgcccaggccgctattaaggaagatccttggaactgctacatgtgcggccacaagggcacatacggcctgctgagacggagagaggactggcctagcagactgcagatgttcttcgccaataaccacgaccaggagttcgacccccctaaggtgtaccctcccgtccccgccgagaagagaaagcccatccgggtcctgagcctgttcgatggcatcgccaccggtctgctggtgctgaaggacctgggcatccaggtggataggtacattgcctccgaggtgtgcgaggactccatcaccgtgggaatggtgcgtcatcagggcaagatcatgtacgtgggcgacgtgcggagcgtgacacagaagcatatccaggagtggggccctttcgacctggtgatcggcggcagcccttgcaatgacctgagcatcgtgaacccagcccggaagggcctgtacgagggaaccggcagactgttcttcgagttttacagactgctgcacgacgcccggcctaaggaaggcgacgaccggcccttcttttggctgttcgagaatgtggtggccatgggagtcagcgacaagcgggatattagccggttcctggagagcaaccccgtgatgatcgatgccaaggaagtgagcgccgcccaccgggccagatacttctggggcaatctgcctggcatgaacagacccctggccagcaccgtgaacgacaagctggagctgcaggagtgcctggagcacggccggatcgccaagttcagcaaggtgagaaccatcaccacccgaagcaacagcatcaaacaaggcaaggaccagcactttcctgtgttcatgaacgagaaggaggacatcctgtggtgtaccgagatggagagagtgttcgggttcccagtccactacacagatgtcagcaacatgtctagactggccagacagagactgctgggaagaagctggtccgtccctgtgatcagacacctgttcgcccctctgaaggagtacttcgcctgcgtgagcagcggcaacagcaacgccaacagccggggccccagcttctctagcggcctggtgccactgtccctgagagggagccacatgggccccatggagatctacaaaaccgtgagcgcctggaagcggcagcctgtgcgcgtgctgagcctgtttcggaatatcgataaagtcctgaaaagcctgggattcctggagagcggctctggctccggcggtggcaccctgaagtacgtggaggatgtgacaaacgtggtcagacgggatgtggagaagtggggccccttcgatctggtgtacggcagcacccaacccctgggcagctcttgtgaccggtgccctggctggtacatgtttcagttccaccggatcctgcagtacgccctgccgagacaggagtcccagcggccattcttttggattttcatggacaacttgctgctgaccgaggatgaccaggaaactaccactcggttcctgcagaccgaagccgtgaccctgcaggacgtgagaggccgggactaccagaacgccatgcgggtgtggtccaacatccctggactgaaaagcaagcacgcacctctgacccctaaagaagaggagtacctgcaggcccaggtgcggagcagaagcaagctggacgcccctaaggtggatctgctggtgaagaattgcctcctgcccctgagagagtacttcaagtatttcagccagaatagtctgcccctgggaggcagcggcggcggcgccctggtgacatttgaggacgtcgccgtgcggttcacccaggaggaatgggctctgctggatccttctcagaaaatcctgtaccgggacgtgatgagagagacataccggaatctgacctccgtgggcatcaactgggaatgttgggaccttgaagcctgcttcagaagcctgggaagaaacctgagagtgcaggtggtgaagagaaagtgcgagctgaccaacagcggcccctgcgccgagggcggcccaagcagcggcgcccctcctcccagcggcggcagcccagccggctccccaacctctaccgaggagggcacctctgagtccgccacccccgagagcggccctggcacctccaccgagcccagcgagggcagcgcacccggcagccctgccggcagccccacctccacagaggagggaaccagcaccgagcccagcgaaggcagcgccccaggcaccagcaccgagcctagtgagcaggagattaaacggatcaacaagatcagaagaagacttgtgaaagacagcaacaccaagaaggccggcaagacaggccccatgaaaaccctgctggttagagtgatgacacccgatctgagagagcggctggaaaacctgagaaagaagcctgaaaatatcccccagcccatcagcaatacatctagagccaacctgaataagctgctgaccgattacaccgaaatgaagaaggcgatcctgcatgtgtactgggaagagttccagaaggaccctgtgggcctgatgagccgggtggcccagcctgccagcaagaagatcgatcagaacaagctgaaacctgagatggacgagaagggcaacctgaccaccgccggctttgcctgctctcagtgtggccagcccctgttcgtgtacaagctggagcaggtgtctgagaagggcaaggcttacaccaactacttcggacggtgcaatgtggccgagcacgaaaagctgatcctgctggcccagctgaagcccgagaaggatagcgacgaagccgtgacatatagcctgggaaagtttgggcagagggccctggatttctacagcattcatgtgaccaaggagtccacccaccccgtgaagcccctggcccagatcgccggaaacagatacgcctccggacctgtgggaaaggccctgagcgacgcatgtatgggcacaatcgcctccttcctgtctaagtaccaggacatcatcatcgaacaccagaaggtggtgaagggcaaccagaagagactggagagcctgcgggagctggccggcaaggaaaacctggaataccctagcgtgaccctgccacctcagcctcacaccaaggagggcgttgatgcctacaacgaagtgatcgcccgggtgcgaatgtgggtgaacctgaacctgtggcagaagctgaagctaagcagagatgatgccaagcctctgctgagactgaagggattcccttcctttcctctggtcgagagacaggccaacgaagtggactggtgggacatggtgtgtaacgtgaagaagctgatcaacgagaaaaaggaggatggcaaggtgttttggcagaatctggctggctacaagagacaggaagccctgagaccatacctgagcagcgaggaagatcggaagaagggaaagaaattcgctcggtaccagctgggcgacctgctgctgcacctggaaaagaagcacggcgaggactggggaaaggtgtacgacgaggcctgggagcggattgacaagaaagtggaaggcctgagcaagcacatcaagctggaagaggaacggagaagcgaggacgcccagagcaaggccgccctgaccgactggctgcgggctaaggccagcttcgtgatcgagggcctgaaggaggccgacaaggacgagttctgcagatgcgagctgaagctgcagaagtggtacggggacctgcggggaaagcccttcgccatcgaagccgagaacagcatcctggacatcagcggcttcagcaagcagtacaactgtgccttcatctggcagaaggacggcgtgaagaagctgaacctgtacctgatcatcaactacttcaagggcggcaagctgcggttcaagaagatcaaacctgaagccttcgaagccaacagattctacaccgtgatcaacaaaaagagcggcgagatcgtgcccatggaggtgaacttcaacttcgacgaccccaacctgatcatcctgcctctggcctttggcaagagacagggcagagaattcatctggaacgacctgctgtccctggaaaccggcagcctgaagctggccaacggaagagtgatcgagaagacactgtacaacagaagaacccggcaggatgagcctgccctgttcgtggccctgaccttcgagcggcgggaggtcctggactcctccaatatcaaaccaatgaacctgatcggcgtggcaagaggcgaaaacatccccgccgtgatcgccctgaccgaccccgagggctgcccactgagccggtttaaggatagcctgggaaacccaacccacatcctgagaatcggcgagagctataaggagaagcagcggaccatccaggccaagaaggaggtggagcagcggagagccggcggctacagccggaagtacgccagcaaagccaagaatctggcagacgatatggtgagaaacaccgctagagatctgctgtactacgccgtgacccaggatgccatgctgatcttcgccaacctgagccggggcttcggccggcagggcaagcggaccttcatggccgagagacagtacacacggatggaggactggctgaccgccaagctggcctacgagggcctgagcaagacctacctgtccaagacactggcccagtacacctccaagacatgcagcaactgtgggtttaccatcaccagcgccgactacgacagggtgctggagaagctgaagaagacagcaacaggctggatgaccacaattaacggcaaggagctgaaggtggagggccagattacctactacaacagatacaagagacagaacgtagtcaaggacctgtccgtcgagctggatagactgagcgaagaatctgtgaacaacgacatctcctcctggacaaagggcagaagcggagaagctctgagcctcctgaagaaaagattctcccatagacccgtgcaggagaagttcgtgtgcctgaactgcggcttcgagacacacgcagccgagcaagccgccctgaacatcgccagatcctggctgttcctgcggagccaggagtacaagaaataccagacaaacaagacaaccggcaacaccgataagagagccttcgtcgagacctggcagtccttttaccggaagaagcttaaggaggtgtggaaacctgccgtgcggtctggcggatctggcggaggctccagggccctgacccccgtgagcatgaccgccgaggccaagtgcaccggcttcacccagggcagcgtgaccttcgaggacgtggccatctacttcagccaggaggagtggggcctgctggacgaggcccagaggctgctgtacagggacgtgatgctggagaacttcgccctgctgaccagcctggtgtgctggcacggcatggaggacgaggagacccccgagcagagcgtgagcgtgaacggcggcggcccaagcagcggcgcccctcctcccagcggcggcagcccagccggctccccaacctctaccgaggagggcacctctgagtccgccacccccgagagcggccctggcacctccaccgagcccagcgagggcagcgcacccggcagccctgccggcagccccacctccacagaggagggaaccagcaccgagcccagcgaaggcagcgccccaggcaccagcaccgagcctagtgagcaggagattaaacggatcaacaagatcagaagaagacttgtgaaagacagcaacaccaagaaggccggcaagacaggccccatgaaaaccctgctggttagagtgatgacacccgatctgagagagcggctggaaaacctgagaaagaagcctgaaaatatcccccagcccatcagcaatacatctagagccaacctgaataagctgctgaccgattacaccgaaatgaagaaggcgatcctgcatgtgtactgggaagagttccagaaggaccctgtgggcctgatgagccgggtggcccagcctgccagcaagaagatcgatcagaacaagctgaaacctgagatggacgagaagggcaacctgaccaccgccggctttgcctgctctcagtgtggccagcccctgttcgtgtacaagctggagcaggtgtctgagaagggcaaggcttacaccaactacttcggacggtgcaatgtggccgagcacgaaaagctgatcctgctggcccagctgaagcccgagaaggatagcgacgaagccgtgacatatagcctgggaaagtttgggcagagggccctggatttctacagcattcatgtgaccaaggagtccacccaccccgtgaagcccctggcccagatcgccggaaacagatacgcctccggacctgtgggaaaggccctgagcgacgcatgtatgggcacaatcgcctccttcctgtctaagtaccaggacatcatcatcgaacaccagaaggtggtgaagggcaaccagaagagactggagagcctgcgggagctggccggcaaggaaaacctggaataccctagcgtgaccctgccacctcagcctcacaccaaggagggcgttgatgcctacaacgaagtgatcgcccgggtgcgaatgtgggtgaacctgaacctgtggcagaagctgaagctaagcagagatgatgccaagcctctgctgagactgaagggattcccttcctttcctctggtcgagagacaggccaacgaagtggactggtgggacatggtgtgtaacgtgaagaagctgatcaacgagaaaaaggaggatggcaaggtgttttggcagaatctggctggctacaagagacaggaagccctgagaccatacctgagcagcgaggaagatcggaagaagggaaagaaattcgctcggtaccagctgggcgacctgctgctgcacctggaaaagaagcacggcgaggactggggaaaggtgtacgacgaggcctgggagcggattgacaagaaagtggaaggcctgagcaagcacatcaagctggaagaggaacggagaagcgaggacgcccagagcaaggccgccctgaccgactggctgcgggctaaggccagcttcgtgatcgagggcctgaaggaggccgacaaggacgagttctgcagatgcgagctgaagctgcagaagtggtacggggacctgcggggaaagcccttcgccatcgaagccgagaacagcatcctggacatcagcggcttcagcaagcagtacaactgtgccttcatctggcagaaggacggcgtgaagaagctgaacctgtacctgatcatcaactacttcaagggcggcaagctgcggttcaagaagatcaaacctgaagccttcgaagccaacagattctacaccgtgatcaacaaaaagagcggcgagatcgtgcccatggaggtgaacttcaacttcgacgaccccaacctgatcatcctgcctctggcctttggcaagagacagggcagagaattcatctggaacgacctgctgtccctggaaaccggcagcctgaagctggccaacggaagagtgatcgagaagacactgtacaacagaagaacccggcaggatgagcctgccctgttcgtggccctgaccttcgagcggcgggaggtcctggactcctccaatatcaaaccaatgaacctgatcggcgtggcaagaggcgaaaacatccccgccgtgatcgccctgaccgaccccgagggctgcccactgagccggtttaaggatagcctgggaaacccaacccacatcctgagaatcggcgagagctataaggagaagcagcggaccatccaggccaagaaggaggtggagcagcggagagccggcggctacagccggaagtacgccagcaaagccaagaatctggcagacgatatggtgagaaacaccgctagagatctgctgtactacgccgtgacccaggatgccatgctgatcttcgccaacctgagccggggcttcggccggcagggcaagcggaccttcatggccgagagacagtacacacggatggaggactggctgaccgccaagctggcctacgagggcctgagcaagacctacctgtccaagacactggcccagtacacctccaagacatgcagcaactgtgggtttaccatcaccagcgccgactacgacagggtgctggagaagctgaagaagacagcaacaggctggatgaccacaattaacggcaaggagctgaaggtggagggccagattacctactacaacagatacaagagacagaacgtagtcaaggacctgtccgtcgagctggatagactgagcgaagaatctgtgaacaacgacatctcctcctggacaaagggcagaagcggagaagctctgagcctcctgaagaaaagattctcccatagacccgtgcaggagaagttcgtgtgcctgaactgcggcttcgagacacacgcagccgagcaagccgccctgaacatcgccagatcctggctgttcctgcggagccaggagtacaagaaataccagacaaacaagacaaccggcaacaccgataagagagccttcgtcgagacctggcagtccttttaccggaagaagcttaaggaggtgtggaaacctgccgtgcggtctggcggatctggcggaggctcctagggccctgacccccgtgagcatgaccgccgaggccaagtgcaccggcttcacccagggcagcgtgaccttcgaggacgtggccatctacttcagccaggaggagtggggcctgctggacgaggcccagaggctgctgtacagggacgtgatgctggagaacttcgccctgctgaccagcctggtgtgctggcacggcatggaggacgaggagacccccgagcagagcgtgagcgtgaacggcggatctggctccggcagcggccccaagaaaaagagaaaagtctaagctgccttctgcggggcttgccttctggccatgcccttcttctctcccttgcacctgtacctcttggtctttgaataaagcctgagtaggaaggctagcaaaaaaaaaaaaaaaaaaaaaaaaaaaaaaaaaaaaaaaaaaaaaaaaaaaaaaaaaaaaaaaaaaaaaaaaaaaaaaaa

SEQ ID NO: 16218 - RNA, 9485 nt, synthetic construct
  source 1..9485: mol_type = other RNA
aggaaataagagagaaaagaagagtaagaagaaatataagagccaccatggcccctaagaagaagcgtaaagtgagccggatggaacgcctcgtctacgaggtgcggcagaagtgcagaaacatcgaggacatctgcatctcctgcggatctctgaacgtgaccctggagcacccactgttcatcggcggcatgtgccagaactgtaaaaactgttttctggagtgtgcctatcaatacgacgatgacggctaccagagctactgcaccatctgttgcggcggaagagaggtgctgatgtgtggaaataacaactgctgccggtgcttctgcgtggaatgcgtggacctgctggtgggccccggcgccgcccaggccgctattaaggaagatccttggaactgctacatgtgcggccacaagggcacatacggcctgctgagacggagagaggactggcctagcagactgcagatgttcttcgccaataaccacgaccaggagttcgacccccctaaggtgtaccctcccgtccccgccgagaagagaaagcccatccgggtcctgagcctgttcgatggcatcgccaccggtctgctggtgctgaaggacctgggcatccaggtggataggtacattgcctccgaggtgtgcgaggactccatcaccgtgggaatggtgcgtcatcagggcaagatcatgtacgtgggcgacgtgcggagcgtgacacagaagcatatccaggagtggggccctttcgacctggtgatcggcggcagcccttgcaatgacctgagcatcgtgaacccagcccggaagggcctgtacgagggaaccggcagactgttcttcgagttttacagactgctgcacgacgcccggcctaaggaaggcgacgaccggcccttcttttggctgttcgagaatgtggtggccatgggagtcagcgacaagcgggatattagccggttcctggagagcaaccccgtgatgatcgatgccaaggaagtgagcgccgcccaccgggccagatacttctggggcaatctgcctggcatgaacagacccctggccagcaccgtgaacgacaagctggagctgcaggagtgcctggagcacggccggatcgccaagttcagcaaggtgagaaccatcaccacccgaagcaacagcatcaaacaaggcaaggaccagcactttcctgtgttcatgaacgagaaggaggacatcctgtggtgtaccgagatggagagagtgttcgggttcccagtccactacacagatgtcagcaacatgtctagactggccagacagagactgctgggaagaagctggtccgtccctgtgatcagacacctgttcgcccctctgaaggagtacttcgcctgcgtgagcagcggcaacagcaacgccaacagccggggccccagcttctctagcggcctggtgccactgtccctgagagggagccacatgggccccatggagatctacaaaaccgtgagcgcctggaagcggcagcctgtgcgcgtgctgagcctgtttcggaatatcgataaagtcctgaaaagcctgggattcctggagagcggctctggctccggcggtggcaccctgaagtacgtggaggatgtgacaaacgtggtcagacgggatgtggagaagtggggccccttcgatctggtgtacggcagcacccaacccctgggcagctcttgtgaccggtgccctggctggtacatgtttcagttccaccggatcctgcagtacgccctgccgagacaggagtcccagcggccattcttttggattttcatggacaacttgctgctgaccgaggatgaccaggaaactaccactcggttcctgcagaccgaagccgtgaccctgcaggacgtgagaggccgggactaccagaacgccatgcgggtgtggtccaacatccctggactgaaaagcaagcacgcacctctgacccctaaagaagaggagtacctgcaggcccaggtgcggagcagaagcaagctggacgcccctaaggtggatctgctggtgaagaattgcctcctgcccctgagagagtacttcaagtatttcagccagaatagtctgcccctgggaggcagcggcggcggcgccctggtgacatttgaggacgtcgccgtgcggttcacccaggaggaatgggctctgctggatccttctcagaaaatcctgtaccgggacgtgatgagagagacataccggaatctgacctccgtgggcatcaactgggaatgttgggaccttgaagcctgcttcagaagcctgggaagaaacctgagagtgcaggtggtgaagagaaagtgcgagctgaccaacagcggcccctgcgccgagggcggcccaagcagcggcgcccctcctcccagcggcggcagcccagccggctccccaacctctaccgaggagggcacctctgagtccgccacccccgagagcggccctggcacctccaccgagcccagcgagggcagcgcacccggcagccctgccggcagccccacctccacagaggagggaaccagcaccgagcccagcgaaggcagcgccccaggcaccagcaccgagcctagtgagcaggagattaaacggatcaacaagatcagaagaagacttgtgaaagacagcaacaccaagaaggccggcaagacaggccccatgaaaaccctgctggttagagtgatgacacccgatctgagagagcggctggaaaacctgagaaagaagcctgaaaatatcccccagcccatcagcaatacatctagagccaacctgaataagctgctgaccgattacaccgaaatgaagaaggcgatcctgcatgtgtactgggaagagttccagaaggaccctgtgggcctgatgagccgggtggcccagcctgccagcaagaagatcgatcagaacaagctgaaacctgagatggacgagaagggcaacctgaccaccgccggctttgcctgctctcagtgtggccagcccctgttcgtgtacaagctggagcaggtgtctgagaagggcaaggcttacaccaactacttcggacggtgcaatgtggccgagcacgaaaagctgatcctgctggcccagctgaagcccgagaaggatagcgacgaagccgtgacatatagcctgggaaagtttgggcagagggccctggatttctacagcattcatgtgaccaaggagtccacccaccccgtgaagcccctggcccagatcgccggaaacagatacgcctccggacctgtgggaaaggccctgagcgacgcatgtatgggcacaatcgcctccttcctgtctaagtaccaggacatcatcatcgaacaccagaaggtggtgaagggcaaccagaagagactggagagcctgcgggagctggccggcaaggaaaacctggaataccctagcgtgaccctgccacctcagcctcacaccaaggagggcgttgatgcctacaacgaagtgatcgcccgggtgcgaatgtgggtgaacctgaacctgtggcagaagctgaagctaagcagagatgatgccaagcctctgctgagactgaagggattcccttcctttcctctggtcgagagacaggccaacgaagtggactggtgggacatggtgtgtaacgtgaagaagctgatcaacgagaaaaaggaggatggcaaggtgttttggcagaatctggctggctacaagagacaggaagccctgagaccatacctgagcagcgaggaagatcggaagaagggaaagaaattcgctcggtaccagctgggcgacctgctgctgcacctggaaaagaagcacggcgaggactggggaaaggtgtacgacgaggcctgggagcggattgacaagaaagtggaaggcctgagcaagcacatcaagctggaagaggaacggagaagcgaggacgcccagagcaaggccgccctgaccgactggctgcgggctaaggccagcttcgtgatcgagggcctgaaggaggccgacaaggacgagttctgcagatgcgagctgaagctgcagaagtggtacggggacctgcggggaaagcccttcgccatcgaagccgagaacagcatcctggacatcagcggcttcagcaagcagtacaactgtgccttcatctggcagaaggacggcgtgaagaagctgaacctgtacctgatcatcaactacttcaagggcggcaagctgcggttcaagaagatcaaacctgaagccttcgaagccaacagattctacaccgtgatcaacaaaaagagcggcgagatcgtgcccatggaggtgaacttcaacttcgacgaccccaacctgatcatcctgcctctggcctttggcaagagacagggcagagaattcatctggaacgacctgctgtccctggaaaccggcagcctgaagctggccaacggaagagtgatcgagaagacactgtacaacagaagaacccggcaggatgagcctgccctgttcgtggccctgaccttcgagcggcgggaggtcctggactcctccaatatcaaaccaatgaacctgatcggcgtggcaagaggcgaaaacatccccgccgtgatcgccctgaccgaccccgagggctgcccactgagccggtttaaggatagcctgggaaacccaacccacatcctgagaatcggcgagagctataaggagaagcagcggaccatccaggccaagaaggaggtggagcagcggagagccggcggctacagccggaagtacgccagcaaagccaagaatctggcagacgatatggtgagaaacaccgctagagatctgctgtactacgccgtgacccaggatgccatgctgatcttcgccaacctgagccggggcttcggccggcagggcaagcggaccttcatggccgagagacagtacacacggatggaggactggctgaccgccaagctggcctacgagggcctgagcaagacctacctgtccaagacactggcccagtacacctccaagacatgcagcaactgtgggtttaccatcaccagcgccgactacgacagggtgctggagaagctgaagaagacagcaacaggctggatgaccacaattaacggcaaggagctgaaggtggagggccagattacctactacaacagatacaagagacagaacgtagtcaaggacctgtccgtcgagctggatagactgagcgaagaatctgtgaacaacgacatctcctcctggacaaagggcagaagcggagaagctctgagcctcctgaagaaaagattctcccatagacccgtgcaggagaagttcgtgtgcctgaactgcggcttcgagacacacgcagccgagcaagccgccctgaacatcgccagatcctggctgttcctgcggagccaggagtacaagaaataccagacaaacaagacaaccggcaacaccgataagagagccttcgtcgagacctggcagtccttttaccggaagaagcttaaggaggtgtggaaacctgccgtgcggtctggcggatctggcggaggctccgcctgcggcagcatcaccttcagggacgtggccatcgacttcagccaccaggagtgggagtacctgaacctggtgcagaagaccctgtaccaggaggtgatgatggagaactacgacaacctggtgctgctgggccacagcaagagcaagcccgacctgatcaccctgctggagcagggcaaggagccctggatgatcgtgagggaggagaccaggggcgagtgcaccgccgagctgcagagcggcggcccaagcagcggcgcccctcctcccagcggcggcagcccagccggctccccaacctctaccgaggagggcacctctgagtccgccacccccgagagcggccctggcacctccaccgagcccagcgagggcagcgcacccggcagccctgccggcagccccacctccacagaggagggaaccagcaccgagcccagcgaaggcagcgccccaggcaccagcaccgagcctagtgagcaggagattaaacggatcaacaagatcagaagaagacttgtgaaagacagcaacaccaagaaggccggcaagacaggccccatgaaaaccctgctggttagagtgatgacacccgatctgagagagcggctggaaaacctgagaaagaagcctgaaaatatcccccagcccatcagcaatacatctagagccaacctgaataagctgctgaccgattacaccgaaatgaagaaggcgatcctgcatgtgtactgggaagagttccagaaggaccctgtgggcctgatgagccgggtggcccagcctgccagcaagaagatcgatcagaacaagctgaaacctgagatggacgagaagggcaacctgaccaccgccggctttgcctgctctcagtgtggccagcccctgttcgtgtacaagctggagcaggtgtctgagaagggcaaggcttacaccaactacttcggacggtgcaatgtggccgagcacgaaaagctgatcctgctggcccagctgaagcccgagaaggatagcgacgaagccgtgacatatagcctgggaaagtttgggcagagggccctggatttctacagcattcatgtgaccaaggagtccacccaccccgtgaagcccctggcccagatcgccggaaacagatacgcctccggacctgtgggaaaggccctgagcgacgcatgtatgggcacaatcgcctccttcctgtctaagtaccaggacatcatcatcgaacaccagaaggtggtgaagggcaaccagaagagactggagagcctgcgggagctggccggcaaggaaaacctggaataccctagcgtgaccctgccacctcagcctcacaccaaggagggcgttgatgcctacaacgaagtgatcgcccgggtgcgaatgtgggtgaacctgaacctgtggcagaagctgaagctaagcagagatgatgccaagcctctgctgagactgaagggattcccttcctttcctctggtcgagagacaggccaacgaagtggactggtgggacatggtgtgtaacgtgaagaagctgatcaacgagaaaaaggaggatggcaaggtgttttggcagaatctggctggctacaagagacaggaagccctgagaccatacctgagcagcgaggaagatcggaagaagggaaagaaattcgctcggtaccagctgggcgacctgctgctgcacctggaaaagaagcacggcgaggactggggaaaggtgtacgacgaggcctgggagcggattgacaagaaagtggaaggcctgagcaagcacatcaagctggaagaggaacggagaagcgaggacgcccagagcaaggccgccctgaccgactggctgcgggctaaggccagcttcgtgatcgagggcctgaaggaggccgacaaggacgagttctgcagatgcgagctgaagctgcagaagtggtacggggacctgcggggaaagcccttcgccatcgaagccgagaacagcatcctggacatcagcggcttcagcaagcagtacaactgtgccttcatctggcagaaggacggcgtgaagaagctgaacctgtacctgatcatcaactacttcaagggcggcaagctgcggttcaagaagatcaaacctgaagccttcgaagccaacagattctacaccgtgatcaacaaaaagagcggcgagatcgtgcccatggaggtgaacttcaacttcgacgaccccaacctgatcatcctgcctctggcctttggcaagagacagggcagagaattcatctggaacgacctgctgtccctggaaaccggcagcctgaagctggccaacggaagagtgatcgagaagacactgtacaacagaagaacccggcaggatgagcctgccctgttcgtggccctgaccttcgagcggcgggaggtcctggactcctccaatatcaaaccaatgaacctgatcggcgtggcaagaggcgaaaacatccccgccgtgatcgccctgaccgaccccgagggctgcccactgagccggtttaaggatagcctgggaaacccaacccacatcctgagaatcggcgagagctataaggagaagcagcggaccatccaggccaagaaggaggtggagcagcggagagccggcggctacagccggaagtacgccagcaaagccaagaatctggcagacgatatggtgagaaacaccgctagagatctgctgtactacgccgtgacccaggatgccatgctgatcttcgccaacctgagccggggcttcggccggcagggcaagcggaccttcatggccgagagacagtacacacggatggaggactggctgaccgccaagctggcctacgagggcctgagcaagacctacctgtccaagacactggcccagtacacctccaagacatgcagcaactgtgggtttaccatcaccagcgccgactacgacagggtgctggagaagctgaagaagacagcaacaggctggatgaccacaattaacggcaaggagctgaaggtggagggccagattacctactacaacagatacaagagacagaacgtagtcaaggacctgtccgtcgagctggatagactgagcgaagaatctgtgaacaacgacatctcctcctggacaaagggcagaagcggagaagctctgagcctcctgaagaaaagattctcccatagacccgtgcaggagaagttcgtgtgcctgaactgcggcttcgagacacacgcagccgagcaagccgccctgaacatcgccagatcctggctgttcctgcggagccaggagtacaagaaataccagacaaacaagacaaccggcaacaccgataagagagccttcgtcgagacctggcagtccttttaccggaagaagcttaaggaggtgtggaaacctgccgtgcggtctggcggatctggcggaggctcctgcctgcggcagcatcaccttcagggacgtggccatcgacttcagccaccaggagtgggagtacctgaacctggtgcagaagaccctgtaccaggaggtgatgatggagaactacgacaacctggtgctgctgggccacagcaagagcaagcccgacctgatcaccctgctggagcagggcaaggagccctggatgatcgtgagggaggagaccaggggcgagtgcaccgccgagctgcagagcggatctggctccggcagcggccccaagaaaaagagaaaagtctaagctgccttctgcggggcttgccttctggccatgcccttcttctctcccttgcacctgtacctcttggtctttgaataaagcctgagtaggaaggctagcaaaaaaaaaaaaaaaaaaaaaaaaaaaaaaaaaaaaaaaaaaaaaaaaaaaaaaaaaaaaaaaaaaaaaaaaaaaaaaaa

SEQ ID NO: 16219 - RNA, 9485 nt, synthetic construct
  source 1..9485: mol_type = other RNA
aggaaataagagagaaaagaagagtaagaagaaatataagagccaccatggcccctaagaagaagcgtaaagtgagccggatggaacgcctcgtctacgaggtgcggcagaagtgcagaaacatcgaggacatctgcatctcctgcggatctctgaacgtgaccctggagcacccactgttcatcggcggcatgtgccagaactgtaaaaactgttttctggagtgtgcctatcaatacgacgatgacggctaccagagctactgcaccatctgttgcggcggaagagaggtgctgatgtgtggaaataacaactgctgccggtgcttctgcgtggaatgcgtggacctgctggtgggccccggcgccgcccaggccgctattaaggaagatccttggaactgctacatgtgcggccacaagggcacatacggcctgctgagacggagagaggactggcctagcagactgcagatgttcttcgccaataaccacgaccaggagttcgacccccctaaggtgtaccctcccgtccccgccgagaagagaaagcccatccgggtcctgagcctgttcgatggcatcgccaccggtctgctggtgctgaaggacctgggcatccaggtggataggtacattgcctccgaggtgtgcgaggactccatcaccgtgggaatggtgcgtcatcagggcaagatcatgtacgtgggcgacgtgcggagcgtgacacagaagcatatccaggagtggggccctttcgacctggtgatcggcggcagcccttgcaatgacctgagcatcgtgaacccagcccggaagggcctgtacgagggaaccggcagactgttcttcgagttttacagactgctgcacgacgcccggcctaaggaaggcgacgaccggcccttcttttggctgttcgagaatgtggtggccatgggagtcagcgacaagcgggatattagccggttcctggagagcaaccccgtgatgatcgatgccaaggaagtgagcgccgcccaccgggccagatacttctggggcaatctgcctggcatgaacagacccctggccagcaccgtgaacgacaagctggagctgcaggagtgcctggagcacggccggatcgccaagttcagcaaggtgagaaccatcaccacccgaagcaacagcatcaaacaaggcaaggaccagcactttcctgtgttcatgaacgagaaggaggacatcctgtggtgtaccgagatggagagagtgttcgggttcccagtccactacacagatgtcagcaacatgtctagactggccagacagagactgctgggaagaagctggtccgtccctgtgatcagacacctgttcgcccctctgaaggagtacttcgcctgcgtgagcagcggcaacagcaacgccaacagccggggccccagcttctctagcggcctggtgccactgtccctgagagggagccacatgggccccatggagatctacaaaaccgtgagcgcctggaagcggcagcctgtgcgcgtgctgagcctgtttcggaatatcgataaagtcctgaaaagcctgggattcctggagagcggctctggctccggcggtggcaccctgaagtacgtggaggatgtgacaaacgtggtcagacgggatgtggagaagtggggccccttcgatctggtgtacggcagcacccaacccctgggcagctcttgtgaccggtgccctggctggtacatgtttcagttccaccggatcctgcagtacgccctgccgagacaggagtcccagcggccattcttttggattttcatggacaacttgctgctgaccgaggatgaccaggaaactaccactcggttcctgcagaccgaagccgtgaccctgcaggacgtgagaggccgggactaccagaacgccatgcgggtgtggtccaacatccctggactgaaaagcaagcacgcacctctgacccctaaagaagaggagtacctgcaggcccaggtgcggagcagaagcaagctggacgcccctaaggtggatctgctggtgaagaattgcctcctgcccctgagagagtacttcaagtatttcagccagaatagtctgcccctgggaggcagcggcggcggcgccctggtgacatttgaggacgtcgccgtgcggttcacccaggaggaatgggctctgctggatccttctcagaaaatcctgtaccgggacgtgatgagagagacataccggaatctgacctccgtgggcatcaactgggaatgttgggaccttgaagcctgcttcagaagcctgggaagaaacctgagagtgcaggtggtgaagagaaagtgcgagctgaccaacagcggcccctgcgccgagggcggcccaagcagcggcgcccctcctcccagcggcggcagcccagccggctccccaacctctaccgaggagggcacctctgagtccgccacccccgagagcggccctggcacctccaccgagcccagcgagggcagcgcacccggcagccctgccggcagccccacctccacagaggagggaaccagcaccgagcccagcgaaggcagcgccccaggcaccagcaccgagcctagtgagcaggagattaaacggatcaacaagatcagaagaagacttgtgaaagacagcaacaccaagaaggccggcaagacaggccccatgaaaaccctgctggttagagtgatgacacccgatctgagagagcggctggaaaacctgagaaagaagcctgaaaatatcccccagcccatcagcaatacatctagagccaacctgaataagctgctgaccgattacaccgaaatgaagaaggcgatcctgcatgtgtactgggaagagttccagaaggaccctgtgggcctgatgagccgggtggcccagcctgccagcaagaagatcgatcagaacaagctgaaacctgagatggacgagaagggcaacctgaccaccgccggctttgcctgctctcagtgtggccagcccctgttcgtgtacaagctggagcaggtgtctgagaagggcaaggcttacaccaactacttcggacggtgcaatgtggccgagcacgaaaagctgatcctgctggcccagctgaagcccgagaaggatagcgacgaagccgtgacatatagcctgggaaagtttgggcagagggccctggatttctacagcattcatgtgaccaaggagtccacccaccccgtgaagcccctggcccagatcgccggaaacagatacgcctccggacctgtgggaaaggccctgagcgacgcatgtatgggcacaatcgcctccttcctgtctaagtaccaggacatcatcatcgaacaccagaaggtggtgaagggcaaccagaagagactggagagcctgcgggagctggccggcaaggaaaacctggaataccctagcgtgaccctgccacctcagcctcacaccaaggagggcgttgatgcctacaacgaagtgatcgcccgggtgcgaatgtgggtgaacctgaacctgtggcagaagctgaagctaagcagagatgatgccaagcctctgctgagactgaagggattcccttcctttcctctggtcgagagacaggccaacgaagtggactggtgggacatggtgtgtaacgtgaagaagctgatcaacgagaaaaaggaggatggcaaggtgttttggcagaatctggctggctacaagagacaggaagccctgagaccatacctgagcagcgaggaagatcggaagaagggaaagaaattcgctcggtaccagctgggcgacctgctgctgcacctggaaaagaagcacggcgaggactggggaaaggtgtacgacgaggcctgggagcggattgacaagaaagtggaaggcctgagcaagcacatcaagctggaagaggaacggagaagcgaggacgcccagagcaaggccgccctgaccgactggctgcgggctaaggccagcttcgtgatcgagggcctgaaggaggccgacaaggacgagttctgcagatgcgagctgaagctgcagaagtggtacggggacctgcggggaaagcccttcgccatcgaagccgagaacagcatcctggacatcagcggcttcagcaagcagtacaactgtgccttcatctggcagaaggacggcgtgaagaagctgaacctgtacctgatcatcaactacttcaagggcggcaagctgcggttcaagaagatcaaacctgaagccttcgaagccaacagattctacaccgtgatcaacaaaaagagcggcgagatcgtgcccatggaggtgaacttcaacttcgacgaccccaacctgatcatcctgcctctggcctttggcaagagacagggcagagaattcatctggaacgacctgctgtccctggaaaccggcagcctgaagctggccaacggaagagtgatcgagaagacactgtacaacagaagaacccggcaggatgagcctgccctgttcgtggccctgaccttcgagcggcgggaggtcctggactcctccaatatcaaaccaatgaacctgatcggcgtggcaagaggcgaaaacatccccgccgtgatcgccctgaccgaccccgagggctgcccactgagccggtttaaggatagcctgggaaacccaacccacatcctgagaatcggcgagagctataaggagaagcagcggaccatccaggccaagaaggaggtggagcagcggagagccggcggctacagccggaagtacgccagcaaagccaagaatctggcagacgatatggtgagaaacaccgctagagatctgctgtactacgccgtgacccaggatgccatgctgatcttcgccaacctgagccggggcttcggccggcagggcaagcggaccttcatggccgagagacagtacacacggatggaggactggctgaccgccaagctggcctacgagggcctgagcaagacctacctgtccaagacactggcccagtacacctccaagacatgcagcaactgtgggtttaccatcaccagcgccgactacgacagggtgctggagaagctgaagaagacagcaacaggctggatgaccacaattaacggcaaggagctgaaggtggagggccagattacctactacaacagatacaagagacagaacgtagtcaaggacctgtccgtcgagctggatagactgagcgaagaatctgtgaacaacgacatctcctcctggacaaagggcagaagcggagaagctctgagcctcctgaagaaaagattctcccatagacccgtgcaggagaagttcgtgtgcctgaactgcggcttcgagacacacgcagccgagcaagccgccctgaacatcgccagatcctggctgttcctgcggagccaggagtacaagaaataccagacaaacaagacaaccggcaacaccgataagagagccttcgtcgagacctggcagtccttttaccggaagaagcttaaggaggtgtggaaacctgccgtgcggtctggcggatctggcggaggctccgacaaggccctgatggccttccacgacgtggccgtggccttcagccagatggagtgggagctgctgagccccgcccagaggatcctgtacagggaggtgatgctggagaactacagccacctggtgagcctgggcatcgccttcagcaagcccaagctgatcacccagctggagcagggcgccgagccctggagggacggcagcggctgcttcctggacctgtgccccgccgagcccaggaccggcggcccaagcagcggcgcccctcctcccagcggcggcagcccagccggctccccaacctctaccgaggagggcacctctgagtccgccacccccgagagcggccctggcacctccaccgagcccagcgagggcagcgcacccggcagccctgccggcagccccacctccacagaggagggaaccagcaccgagcccagcgaaggcagcgccccaggcaccagcaccgagcctagtgagcaggagattaaacggatcaacaagatcagaagaagacttgtgaaagacagcaacaccaagaaggccggcaagacaggccccatgaaaaccctgctggttagagtgatgacacccgatctgagagagcggctggaaaacctgagaaagaagcctgaaaatatcccccagcccatcagcaatacatctagagccaacctgaataagctgctgaccgattacaccgaaatgaagaaggcgatcctgcatgtgtactgggaagagttccagaaggaccctgtgggcctgatgagccgggtggcccagcctgccagcaagaagatcgatcagaacaagctgaaacctgagatggacgagaagggcaacctgaccaccgccggctttgcctgctctcagtgtggccagcccctgttcgtgtacaagctggagcaggtgtctgagaagggcaaggcttacaccaactacttcggacggtgcaatgtggccgagcacgaaaagctgatcctgctggcccagctgaagcccgagaaggatagcgacgaagccgtgacatatagcctgggaaagtttgggcagagggccctggatttctacagcattcatgtgaccaaggagtccacccaccccgtgaagcccctggcccagatcgccggaaacagatacgcctccggacctgtgggaaaggccctgagcgacgcatgtatgggcacaatcgcctccttcctgtctaagtaccaggacatcatcatcgaacaccagaaggtggtgaagggcaaccagaagagactggagagcctgcgggagctggccggcaaggaaaacctggaataccctagcgtgaccctgccacctcagcctcacaccaaggagggcgttgatgcctacaacgaagtgatcgcccgggtgcgaatgtgggtgaacctgaacctgtggcagaagctgaagctaagcagagatgatgccaagcctctgctgagactgaagggattcccttcctttcctctggtcgagagacaggccaacgaagtggactggtgggacatggtgtgtaacgtgaagaagctgatcaacgagaaaaaggaggatggcaaggtgttttggcagaatctggctggctacaagagacaggaagccctgagaccatacctgagcagcgaggaagatcggaagaagggaaagaaattcgctcggtaccagctgggcgacctgctgctgcacctggaaaagaagcacggcgaggactggggaaaggtgtacgacgaggcctgggagcggattgacaagaaagtggaaggcctgagcaagcacatcaagctggaagaggaacggagaagcgaggacgcccagagcaaggccgccctgaccgactggctgcgggctaaggccagcttcgtgatcgagggcctgaaggaggccgacaaggacgagttctgcagatgcgagctgaagctgcagaagtggtacggggacctgcggggaaagcccttcgccatcgaagccgagaacagcatcctggacatcagcggcttcagcaagcagtacaactgtgccttcatctggcagaaggacggcgtgaagaagctgaacctgtacctgatcatcaactacttcaagggcggcaagctgcggttcaagaagatcaaacctgaagccttcgaagccaacagattctacaccgtgatcaacaaaaagagcggcgagatcgtgcccatggaggtgaacttcaacttcgacgaccccaacctgatcatcctgcctctggcctttggcaagagacagggcagagaattcatctggaacgacctgctgtccctggaaaccggcagcctgaagctggccaacggaagagtgatcgagaagacactgtacaacagaagaacccggcaggatgagcctgccctgttcgtggccctgaccttcgagcggcgggaggtcctggactcctccaatatcaaaccaatgaacctgatcggcgtggcaagaggcgaaaacatccccgccgtgatcgccctgaccgaccccgagggctgcccactgagccggtttaaggatagcctgggaaacccaacccacatcctgagaatcggcgagagctataaggagaagcagcggaccatccaggccaagaaggaggtggagcagcggagagccggcggctacagccggaagtacgccagcaaagccaagaatctggcagacgatatggtgagaaacaccgctagagatctgctgtactacgccgtgacccaggatgccatgctgatcttcgccaacctgagccggggcttcggccggcagggcaagcggaccttcatggccgagagacagtacacacggatggaggactggctgaccgccaagctggcctacgagggcctgagcaagacctacctgtccaagacactggcccagtacacctccaagacatgcagcaactgtgggtttaccatcaccagcgccgactacgacagggtgctggagaagctgaagaagacagcaacaggctggatgaccacaattaacggcaaggagctgaaggtggagggccagattacctactacaacagatacaagagacagaacgtagtcaaggacctgtccgtcgagctggatagactgagcgaagaatctgtgaacaacgacatctcctcctggacaaagggcagaagcggagaagctctgagcctcctgaagaaaagattctcccatagacccgtgcaggagaagttcgtgtgcctgaactgcggcttcgagacacacgcagccgagcaagccgccctgaacatcgccagatcctggctgttcctgcggagccaggagtacaagaaataccagacaaacaagacaaccggcaacaccgataagagagccttcgtcgagacctggcagtccttttaccggaagaagcttaaggaggtgtggaaacctgccgtgcggtctggcggatctggcggaggctcctgacaaggccctgatggccttccacgacgtggccgtggccttcagccagatggagtgggagctgctgagccccgcccagaggatcctgtacagggaggtgatgctggagaactacagccacctggtgagcctgggcatcgccttcagcaagcccaagctgatcacccagctggagcagggcgccgagccctggagggacggcagcggctgcttcctggacctgtgccccgccgagcccaggaccggatctggctccggcagcggccccaagaaaaagagaaaagtctaagctgccttctgcggggcttgccttctggccatgcccttcttctctcccttgcacctgtacctcttggtctttgaataaagcctgagtaggaaggctagcaaaaaaaaaaaaaaaaaaaaaaaaaaaaaaaaaaaaaaaaaaaaaaaaaaaaaaaaaaaaaaaaaaaaaaaaaaaaaaaa

SEQ ID NO: 16220 - RNA, 9557 nt, synthetic construct
  source 1..9557: mol_type = other RNA
aggaaataagagagaaaagaagagtaagaagaaatataagagccaccatggcccctaagaagaagcgtaaagtgagccggatggaacgcctcgtctacgaggtgcggcagaagtgcagaaacatcgaggacatctgcatctcctgcggatctctgaacgtgaccctggagcacccactgttcatcggcggcatgtgccagaactgtaaaaactgttttctggagtgtgcctatcaatacgacgatgacggctaccagagctactgcaccatctgttgcggcggaagagaggtgctgatgtgtggaaataacaactgctgccggtgcttctgcgtggaatgcgtggacctgctggtgggccccggcgccgcccaggccgctattaaggaagatccttggaactgctacatgtgcggccacaagggcacatacggcctgctgagacggagagaggactggcctagcagactgcagatgttcttcgccaataaccacgaccaggagttcgacccccctaaggtgtaccctcccgtccccgccgagaagagaaagcccatccgggtcctgagcctgttcgatggcatcgccaccggtctgctggtgctgaaggacctgggcatccaggtggataggtacattgcctccgaggtgtgcgaggactccatcaccgtgggaatggtgcgtcatcagggcaagatcatgtacgtgggcgacgtgcggagcgtgacacagaagcatatccaggagtggggccctttcgacctggtgatcggcggcagcccttgcaatgacctgagcatcgtgaacccagcccggaagggcctgtacgagggaaccggcagactgttcttcgagttttacagactgctgcacgacgcccggcctaaggaaggcgacgaccggcccttcttttggctgttcgagaatgtggtggccatgggagtcagcgacaagcgggatattagccggttcctggagagcaaccccgtgatgatcgatgccaaggaagtgagcgccgcccaccgggccagatacttctggggcaatctgcctggcatgaacagacccctggccagcaccgtgaacgacaagctggagctgcaggagtgcctggagcacggccggatcgccaagttcagcaaggtgagaaccatcaccacccgaagcaacagcatcaaacaaggcaaggaccagcactttcctgtgttcatgaacgagaaggaggacatcctgtggtgtaccgagatggagagagtgttcgggttcccagtccactacacagatgtcagcaacatgtctagactggccagacagagactgctgggaagaagctggtccgtccctgtgatcagacacctgttcgcccctctgaaggagtacttcgcctgcgtgagcagcggcaacagcaacgccaacagccggggccccagcttctctagcggcctggtgccactgtccctgagagggagccacatgggccccatggagatctacaaaaccgtgagcgcctggaagcggcagcctgtgcgcgtgctgagcctgtttcggaatatcgataaagtcctgaaaagcctgggattcctggagagcggctctggctccggcggtggcaccctgaagtacgtggaggatgtgacaaacgtggtcagacgggatgtggagaagtggggccccttcgatctggtgtacggcagcacccaacccctgggcagctcttgtgaccggtgccctggctggtacatgtttcagttccaccggatcctgcagtacgccctgccgagacaggagtcccagcggccattcttttggattttcatggacaacttgctgctgaccgaggatgaccaggaaactaccactcggttcctgcagaccgaagccgtgaccctgcaggacgtgagaggccgggactaccagaacgccatgcgggtgtggtccaacatccctggactgaaaagcaagcacgcacctctgacccctaaagaagaggagtacctgcaggcccaggtgcggagcagaagcaagctggacgcccctaaggtggatctgctggtgaagaattgcctcctgcccctgagagagtacttcaagtatttcagccagaatagtctgcccctgggaggcagcggcggcggcgccctggtgacatttgaggacgtcgccgtgcggttcacccaggaggaatgggctctgctggatccttctcagaaaatcctgtaccgggacgtgatgagagagacataccggaatctgacctccgtgggcatcaactgggaatgttgggaccttgaagcctgcttcagaagcctgggaagaaacctgagagtgcaggtggtgaagagaaagtgcgagctgaccaacagcggcccctgcgccgagggcggcccaagcagcggcgcccctcctcccagcggcggcagcccagccggctccccaacctctaccgaggagggcacctctgagtccgccacccccgagagcggccctggcacctccaccgagcccagcgagggcagcgcacccggcagccctgccggcagccccacctccacagaggagggaaccagcaccgagcccagcgaaggcagcgccccaggcaccagcaccgagcctagtgagcaggagattaaacggatcaacaagatcagaagaagacttgtgaaagacagcaacaccaagaaggccggcaagacaggccccatgaaaaccctgctggttagagtgatgacacccgatctgagagagcggctggaaaacctgagaaagaagcctgaaaatatcccccagcccatcagcaatacatctagagccaacctgaataagctgctgaccgattacaccgaaatgaagaaggcgatcctgcatgtgtactgggaagagttccagaaggaccctgtgggcctgatgagccgggtggcccagcctgccagcaagaagatcgatcagaacaagctgaaacctgagatggacgagaagggcaacctgaccaccgccggctttgcctgctctcagtgtggccagcccctgttcgtgtacaagctggagcaggtgtctgagaagggcaaggcttacaccaactacttcggacggtgcaatgtggccgagcacgaaaagctgatcctgctggcccagctgaagcccgagaaggatagcgacgaagccgtgacatatagcctgggaaagtttgggcagagggccctggatttctacagcattcatgtgaccaaggagtccacccaccccgtgaagcccctggcccagatcgccggaaacagatacgcctccggacctgtgggaaaggccctgagcgacgcatgtatgggcacaatcgcctccttcctgtctaagtaccaggacatcatcatcgaacaccagaaggtggtgaagggcaaccagaagagactggagagcctgcgggagctggccggcaaggaaaacctggaataccctagcgtgaccctgccacctcagcctcacaccaaggagggcgttgatgcctacaacgaagtgatcgcccgggtgcgaatgtgggtgaacctgaacctgtggcagaagctgaagctaagcagagatgatgccaagcctctgctgagactgaagggattcccttcctttcctctggtcgagagacaggccaacgaagtggactggtgggacatggtgtgtaacgtgaagaagctgatcaacgagaaaaaggaggatggcaaggtgttttggcagaatctggctggctacaagagacaggaagccctgagaccatacctgagcagcgaggaagatcggaagaagggaaagaaattcgctcggtaccagctgggcgacctgctgctgcacctggaaaagaagcacggcgaggactggggaaaggtgtacgacgaggcctgggagcggattgacaagaaagtggaaggcctgagcaagcacatcaagctggaagaggaacggagaagcgaggacgcccagagcaaggccgccctgaccgactggctgcgggctaaggccagcttcgtgatcgagggcctgaaggaggccgacaaggacgagttctgcagatgcgagctgaagctgcagaagtggtacggggacctgcggggaaagcccttcgccatcgaagccgagaacagcatcctggacatcagcggcttcagcaagcagtacaactgtgccttcatctggcagaaggacggcgtgaagaagctgaacctgtacctgatcatcaactacttcaagggcggcaagctgcggttcaagaagatcaaacctgaagccttcgaagccaacagattctacaccgtgatcaacaaaaagagcggcgagatcgtgcccatggaggtgaacttcaacttcgacgaccccaacctgatcatcctgcctctggcctttggcaagagacagggcagagaattcatctggaacgacctgctgtccctggaaaccggcagcctgaagctggccaacggaagagtgatcgagaagacactgtacaacagaagaacccggcaggatgagcctgccctgttcgtggccctgaccttcgagcggcgggaggtcctggactcctccaatatcaaaccaatgaacctgatcggcgtggcaagaggcgaaaacatccccgccgtgatcgccctgaccgaccccgagggctgcccactgagccggtttaaggatagcctgggaaacccaacccacatcctgagaatcggcgagagctataaggagaagcagcggaccatccaggccaagaaggaggtggagcagcggagagccggcggctacagccggaagtacgccagcaaagccaagaatctggcagacgatatggtgagaaacaccgctagagatctgctgtactacgccgtgacccaggatgccatgctgatcttcgccaacctgagccggggcttcggccggcagggcaagcggaccttcatggccgagagacagtacacacggatggaggactggctgaccgccaagctggcctacgagggcctgagcaagacctacctgtccaagacactggcccagtacacctccaagacatgcagcaactgtgggtttaccatcaccagcgccgactacgacagggtgctggagaagctgaagaagacagcaacaggctggatgaccacaattaacggcaaggagctgaaggtggagggccagattacctactacaacagatacaagagacagaacgtagtcaaggacctgtccgtcgagctggatagactgagcgaagaatctgtgaacaacgacatctcctcctggacaaagggcagaagcggagaagctctgagcctcctgaagaaaagattctcccatagacccgtgcaggagaagttcgtgtgcctgaactgcggcttcgagacacacgcagccgagcaagccgccctgaacatcgccagatcctggctgttcctgcggagccaggagtacaagaaataccagacaaacaagacaaccggcaacaccgataagagagccttcgtcgagacctggcagtccttttaccggaagaagcttaaggaggtgtggaaacctgccgtgcggtctggcggatctggcggaggctccgtgagcttcgaggaggtggccgtgcacttcagcgaggaggagtggagccagctggaccccgcccagaaggccctgcacggcgaggtgatgctggagaacagcaggaacctggccagcctgggctacaacgagcacggcaacaagaactgcaaggagcagtgccagcccgtggaccccaacgagcagaacaggaacttcgccgaccagatgcagaccaagatcgacgagaccaaccagagccagagcgaggtggagaagaccttccacagcacccaccacggcggcccaagcagcggcgcccctcctcccagcggcggcagcccagccggctccccaacctctaccgaggagggcacctctgagtccgccacccccgagagcggccctggcacctccaccgagcccagcgagggcagcgcacccggcagccctgccggcagccccacctccacagaggagggaaccagcaccgagcccagcgaaggcagcgccccaggcaccagcaccgagcctagtgagcaggagattaaacggatcaacaagatcagaagaagacttgtgaaagacagcaacaccaagaaggccggcaagacaggccccatgaaaaccctgctggttagagtgatgacacccgatctgagagagcggctggaaaacctgagaaagaagcctgaaaatatcccccagcccatcagcaatacatctagagccaacctgaataagctgctgaccgattacaccgaaatgaagaaggcgatcctgcatgtgtactgggaagagttccagaaggaccctgtgggcctgatgagccgggtggcccagcctgccagcaagaagatcgatcagaacaagctgaaacctgagatggacgagaagggcaacctgaccaccgccggctttgcctgctctcagtgtggccagcccctgttcgtgtacaagctggagcaggtgtctgagaagggcaaggcttacaccaactacttcggacggtgcaatgtggccgagcacgaaaagctgatcctgctggcccagctgaagcccgagaaggatagcgacgaagccgtgacatatagcctgggaaagtttgggcagagggccctggatttctacagcattcatgtgaccaaggagtccacccaccccgtgaagcccctggcccagatcgccggaaacagatacgcctccggacctgtgggaaaggccctgagcgacgcatgtatgggcacaatcgcctccttcctgtctaagtaccaggacatcatcatcgaacaccagaaggtggtgaagggcaaccagaagagactggagagcctgcgggagctggccggcaaggaaaacctggaataccctagcgtgaccctgccacctcagcctcacaccaaggagggcgttgatgcctacaacgaagtgatcgcccgggtgcgaatgtgggtgaacctgaacctgtggcagaagctgaagctaagcagagatgatgccaagcctctgctgagactgaagggattcccttcctttcctctggtcgagagacaggccaacgaagtggactggtgggacatggtgtgtaacgtgaagaagctgatcaacgagaaaaaggaggatggcaaggtgttttggcagaatctggctggctacaagagacaggaagccctgagaccatacctgagcagcgaggaagatcggaagaagggaaagaaattcgctcggtaccagctgggcgacctgctgctgcacctggaaaagaagcacggcgaggactggggaaaggtgtacgacgaggcctgggagcggattgacaagaaagtggaaggcctgagcaagcacatcaagctggaagaggaacggagaagcgaggacgcccagagcaaggccgccctgaccgactggctgcgggctaaggccagcttcgtgatcgagggcctgaaggaggccgacaaggacgagttctgcagatgcgagctgaagctgcagaagtggtacggggacctgcggggaaagcccttcgccatcgaagccgagaacagcatcctggacatcagcggcttcagcaagcagtacaactgtgccttcatctggcagaaggacggcgtgaagaagctgaacctgtacctgatcatcaactacttcaagggcggcaagctgcggttcaagaagatcaaacctgaagccttcgaagccaacagattctacaccgtgatcaacaaaaagagcggcgagatcgtgcccatggaggtgaacttcaacttcgacgaccccaacctgatcatcctgcctctggcctttggcaagagacagggcagagaattcatctggaacgacctgctgtccctggaaaccggcagcctgaagctggccaacggaagagtgatcgagaagacactgtacaacagaagaacccggcaggatgagcctgccctgttcgtggccctgaccttcgagcggcgggaggtcctggactcctccaatatcaaaccaatgaacctgatcggcgtggcaagaggcgaaaacatccccgccgtgatcgccctgaccgaccccgagggctgcccactgagccggtttaaggatagcctgggaaacccaacccacatcctgagaatcggcgagagctataaggagaagcagcggaccatccaggccaagaaggaggtggagcagcggagagccggcggctacagccggaagtacgccagcaaagccaagaatctggcagacgatatggtgagaaacaccgctagagatctgctgtactacgccgtgacccaggatgccatgctgatcttcgccaacctgagccggggcttcggccggcagggcaagcggaccttcatggccgagagacagtacacacggatggaggactggctgaccgccaagctggcctacgagggcctgagcaagacctacctgtccaagacactggcccagtacacctccaagacatgcagcaactgtgggtttaccatcaccagcgccgactacgacagggtgctggagaagctgaagaagacagcaacaggctggatgaccacaattaacggcaaggagctgaaggtggagggccagattacctactacaacagatacaagagacagaacgtagtcaaggacctgtccgtcgagctggatagactgagcgaagaatctgtgaacaacgacatctcctcctggacaaagggcagaagcggagaagctctgagcctcctgaagaaaagattctcccatagacccgtgcaggagaagttcgtgtgcctgaactgcggcttcgagacacacgcagccgagcaagccgccctgaacatcgccagatcctggctgttcctgcggagccaggagtacaagaaataccagacaaacaagacaaccggcaacaccgataagagagccttcgtcgagacctggcagtccttttaccggaagaagcttaaggaggtgtggaaacctgccgtgcggtctggcggatctggcggaggctcctgtgagcttcgaggaggtggccgtgcacttcagcgaggaggagtggagccagctggaccccgcccagaaggccctgcacggcgaggtgatgctggagaacagcaggaacctggccagcctgggctacaacgagcacggcaacaagaactgcaaggagcagtgccagcccgtggaccccaacgagcagaacaggaacttcgccgaccagatgcagaccaagatcgacgagaccaaccagagccagagcgaggtggagaagaccttccacagcacccaccacggatctggctccggcagcggccccaagaaaaagagaaaagtctaagctgccttctgcggggcttgccttctggccatgcccttcttctctcccttgcacctgtacctcttggtctttgaataaagcctgagtaggaaggctagcaaaaaaaaaaaaaaaaaaaaaaaaaaaaaaaaaaaaaaaaaaaaaaaaaaaaaaaaaaaaaaaaaaaaaaaaaaaaaaaa

SEQ ID NO: 16221 - RNA, 9485 nt, synthetic construct
  source 1..9485: mol_type = other RNA
aggaaataagagagaaaagaagagtaagaagaaatataagagccaccatggcccctaagaagaagcgtaaagtgagccggatggaacgcctcgtctacgaggtgcggcagaagtgcagaaacatcgaggacatctgcatctcctgcggatctctgaacgtgaccctggagcacccactgttcatcggcggcatgtgccagaactgtaaaaactgttttctggagtgtgcctatcaatacgacgatgacggctaccagagctactgcaccatctgttgcggcggaagagaggtgctgatgtgtggaaataacaactgctgccggtgcttctgcgtggaatgcgtggacctgctggtgggccccggcgccgcccaggccgctattaaggaagatccttggaactgctacatgtgcggccacaagggcacatacggcctgctgagacggagagaggactggcctagcagactgcagatgttcttcgccaataaccacgaccaggagttcgacccccctaaggtgtaccctcccgtccccgccgagaagagaaagcccatccgggtcctgagcctgttcgatggcatcgccaccggtctgctggtgctgaaggacctgggcatccaggtggataggtacattgcctccgaggtgtgcgaggactccatcaccgtgggaatggtgcgtcatcagggcaagatcatgtacgtgggcgacgtgcggagcgtgacacagaagcatatccaggagtggggccctttcgacctggtgatcggcggcagcccttgcaatgacctgagcatcgtgaacccagcccggaagggcctgtacgagggaaccggcagactgttcttcgagttttacagactgctgcacgacgcccggcctaaggaaggcgacgaccggcccttcttttggctgttcgagaatgtggtggccatgggagtcagcgacaagcgggatattagccggttcctggagagcaaccccgtgatgatcgatgccaaggaagtgagcgccgcccaccgggccagatacttctggggcaatctgcctggcatgaacagacccctggccagcaccgtgaacgacaagctggagctgcaggagtgcctggagcacggccggatcgccaagttcagcaaggtgagaaccatcaccacccgaagcaacagcatcaaacaaggcaaggaccagcactttcctgtgttcatgaacgagaaggaggacatcctgtggtgtaccgagatggagagagtgttcgggttcccagtccactacacagatgtcagcaacatgtctagactggccagacagagactgctgggaagaagctggtccgtccctgtgatcagacacctgttcgcccctctgaaggagtacttcgcctgcgtgagcagcggcaacagcaacgccaacagccggggccccagcttctctagcggcctggtgccactgtccctgagagggagccacatgggccccatggagatctacaaaaccgtgagcgcctggaagcggcagcctgtgcgcgtgctgagcctgtttcggaatatcgataaagtcctgaaaagcctgggattcctggagagcggctctggctccggcggtggcaccctgaagtacgtggaggatgtgacaaacgtggtcagacgggatgtggagaagtggggccccttcgatctggtgtacggcagcacccaacccctgggcagctcttgtgaccggtgccctggctggtacatgtttcagttccaccggatcctgcagtacgccctgccgagacaggagtcccagcggccattcttttggattttcatggacaacttgctgctgaccgaggatgaccaggaaactaccactcggttcctgcagaccgaagccgtgaccctgcaggacgtgagaggccgggactaccagaacgccatgcgggtgtggtccaacatccctggactgaaaagcaagcacgcacctctgacccctaaagaagaggagtacctgcaggcccaggtgcggagcagaagcaagctggacgcccctaaggtggatctgctggtgaagaattgcctcctgcccctgagagagtacttcaagtatttcagccagaatagtctgcccctgggaggcagcggcggcggcgccctggtgacatttgaggacgtcgccgtgcggttcacccaggaggaatgggctctgctggatccttctcagaaaatcctgtaccgggacgtgatgagagagacataccggaatctgacctccgtgggcatcaactgggaatgttgggaccttgaagcctgcttcagaagcctgggaagaaacctgagagtgcaggtggtgaagagaaagtgcgagctgaccaacagcggcccctgcgccgagggcggcccaagcagcggcgcccctcctcccagcggcggcagcccagccggctccccaacctctaccgaggagggcacctctgagtccgccacccccgagagcggccctggcacctccaccgagcccagcgagggcagcgcacccggcagccctgccggcagccccacctccacagaggagggaaccagcaccgagcccagcgaaggcagcgccccaggcaccagcaccgagcctagtgagcaggagattaaacggatcaacaagatcagaagaagacttgtgaaagacagcaacaccaagaaggccggcaagacaggccccatgaaaaccctgctggttagagtgatgacacccgatctgagagagcggctggaaaacctgagaaagaagcctgaaaatatcccccagcccatcagcaatacatctagagccaacctgaataagctgctgaccgattacaccgaaatgaagaaggcgatcctgcatgtgtactgggaagagttccagaaggaccctgtgggcctgatgagccgggtggcccagcctgccagcaagaagatcgatcagaacaagctgaaacctgagatggacgagaagggcaacctgaccaccgccggctttgcctgctctcagtgtggccagcccctgttcgtgtacaagctggagcaggtgtctgagaagggcaaggcttacaccaactacttcggacggtgcaatgtggccgagcacgaaaagctgatcctgctggcccagctgaagcccgagaaggatagcgacgaagccgtgacatatagcctgggaaagtttgggcagagggccctggatttctacagcattcatgtgaccaaggagtccacccaccccgtgaagcccctggcccagatcgccggaaacagatacgcctccggacctgtgggaaaggccctgagcgacgcatgtatgggcacaatcgcctccttcctgtctaagtaccaggacatcatcatcgaacaccagaaggtggtgaagggcaaccagaagagactggagagcctgcgggagctggccggcaaggaaaacctggaataccctagcgtgaccctgccacctcagcctcacaccaaggagggcgttgatgcctacaacgaagtgatcgcccgggtgcgaatgtgggtgaacctgaacctgtggcagaagctgaagctaagcagagatgatgccaagcctctgctgagactgaagggattcccttcctttcctctggtcgagagacaggccaacgaagtggactggtgggacatggtgtgtaacgtgaagaagctgatcaacgagaaaaaggaggatggcaaggtgttttggcagaatctggctggctacaagagacaggaagccctgagaccatacctgagcagcgaggaagatcggaagaagggaaagaaattcgctcggtaccagctgggcgacctgctgctgcacctggaaaagaagcacggcgaggactggggaaaggtgtacgacgaggcctgggagcggattgacaagaaagtggaaggcctgagcaagcacatcaagctggaagaggaacggagaagcgaggacgcccagagcaaggccgccctgaccgactggctgcgggctaaggccagcttcgtgatcgagggcctgaaggaggccgacaaggacgagttctgcagatgcgagctgaagctgcagaagtggtacggggacctgcggggaaagcccttcgccatcgaagccgagaacagcatcctggacatcagcggcttcagcaagcagtacaactgtgccttcatctggcagaaggacggcgtgaagaagctgaacctgtacctgatcatcaactacttcaagggcggcaagctgcggttcaagaagatcaaacctgaagccttcgaagccaacagattctacaccgtgatcaacaaaaagagcggcgagatcgtgcccatggaggtgaacttcaacttcgacgaccccaacctgatcatcctgcctctggcctttggcaagagacagggcagagaattcatctggaacgacctgctgtccctggaaaccggcagcctgaagctggccaacggaagagtgatcgagaagacactgtacaacagaagaacccggcaggatgagcctgccctgttcgtggccctgaccttcgagcggcgggaggtcctggactcctccaatatcaaaccaatgaacctgatcggcgtggcaagaggcgaaaacatccccgccgtgatcgccctgaccgaccccgagggctgcccactgagccggtttaaggatagcctgggaaacccaacccacatcctgagaatcggcgagagctataaggagaagcagcggaccatccaggccaagaaggaggtggagcagcggagagccggcggctacagccggaagtacgccagcaaagccaagaatctggcagacgatatggtgagaaacaccgctagagatctgctgtactacgccgtgacccaggatgccatgctgatcttcgccaacctgagccggggcttcggccggcagggcaagcggaccttcatggccgagagacagtacacacggatggaggactggctgaccgccaagctggcctacgagggcctgagcaagacctacctgtccaagacactggcccagtacacctccaagacatgcagcaactgtgggtttaccatcaccagcgccgactacgacagggtgctggagaagctgaagaagacagcaacaggctggatgaccacaattaacggcaaggagctgaaggtggagggccagattacctactacaacagatacaagagacagaacgtagtcaaggacctgtccgtcgagctggatagactgagcgaagaatctgtgaacaacgacatctcctcctggacaaagggcagaagcggagaagctctgagcctcctgaagaaaagattctcccatagacccgtgcaggagaagttcgtgtgcctgaactgcggcttcgagacacacgcagccgagcaagccgccctgaacatcgccagatcctggctgttcctgcggagccaggagtacaagaaataccagacaaacaagacaaccggcaacaccgataagagagccttcgtcgagacctggcagtccttttaccggaagaagcttaaggaggtgtggaaacctgccgtgcggtctggcggatctggcggaggctccatgatgcaggcccaggagagcctgaccctggaggacgtggccgtggacttcacctgggaggagtggcagttcctgagccccgcccagaaggacctgtacagggacgtgatgctggagaactacagcaacctggtggccgtgggctaccaggccaggaagcccgacgccctgagcaagctggagaggggcgaggagccctgcaccaccgaggacgagatctacgccaggatctgcagcgacagcggcggcccaagcagcggcgcccctcctcccagcggcggcagcccagccggctccccaacctctaccgaggagggcacctctgagtccgccacccccgagagcggccctggcacctccaccgagcccagcgagggcagcgcacccggcagccctgccggcagccccacctccacagaggagggaaccagcaccgagcccagcgaaggcagcgccccaggcaccagcaccgagcctagtgagcaggagattaaacggatcaacaagatcagaagaagacttgtgaaagacagcaacaccaagaaggccggcaagacaggccccatgaaaaccctgctggttagagtgatgacacccgatctgagagagcggctggaaaacctgagaaagaagcctgaaaatatcccccagcccatcagcaatacatctagagccaacctgaataagctgctgaccgattacaccgaaatgaagaaggcgatcctgcatgtgtactgggaagagttccagaaggaccctgtgggcctgatgagccgggtggcccagcctgccagcaagaagatcgatcagaacaagctgaaacctgagatggacgagaagggcaacctgaccaccgccggctttgcctgctctcagtgtggccagcccctgttcgtgtacaagctggagcaggtgtctgagaagggcaaggcttacaccaactacttcggacggtgcaatgtggccgagcacgaaaagctgatcctgctggcccagctgaagcccgagaaggatagcgacgaagccgtgacatatagcctgggaaagtttgggcagagggccctggatttctacagcattcatgtgaccaaggagtccacccaccccgtgaagcccctggcccagatcgccggaaacagatacgcctccggacctgtgggaaaggccctgagcgacgcatgtatgggcacaatcgcctccttcctgtctaagtaccaggacatcatcatcgaacaccagaaggtggtgaagggcaaccagaagagactggagagcctgcgggagctggccggcaaggaaaacctggaataccctagcgtgaccctgccacctcagcctcacaccaaggagggcgttgatgcctacaacgaagtgatcgcccgggtgcgaatgtgggtgaacctgaacctgtggcagaagctgaagctaagcagagatgatgccaagcctctgctgagactgaagggattcccttcctttcctctggtcgagagacaggccaacgaagtggactggtgggacatggtgtgtaacgtgaagaagctgatcaacgagaaaaaggaggatggcaaggtgttttggcagaatctggctggctacaagagacaggaagccctgagaccatacctgagcagcgaggaagatcggaagaagggaaagaaattcgctcggtaccagctgggcgacctgctgctgcacctggaaaagaagcacggcgaggactggggaaaggtgtacgacgaggcctgggagcggattgacaagaaagtggaaggcctgagcaagcacatcaagctggaagaggaacggagaagcgaggacgcccagagcaaggccgccctgaccgactggctgcgggctaaggccagcttcgtgatcgagggcctgaaggaggccgacaaggacgagttctgcagatgcgagctgaagctgcagaagtggtacggggacctgcggggaaagcccttcgccatcgaagccgagaacagcatcctggacatcagcggcttcagcaagcagtacaactgtgccttcatctggcagaaggacggcgtgaagaagctgaacctgtacctgatcatcaactacttcaagggcggcaagctgcggttcaagaagatcaaacctgaagccttcgaagccaacagattctacaccgtgatcaacaaaaagagcggcgagatcgtgcccatggaggtgaacttcaacttcgacgaccccaacctgatcatcctgcctctggcctttggcaagagacagggcagagaattcatctggaacgacctgctgtccctggaaaccggcagcctgaagctggccaacggaagagtgatcgagaagacactgtacaacagaagaacccggcaggatgagcctgccctgttcgtggccctgaccttcgagcggcgggaggtcctggactcctccaatatcaaaccaatgaacctgatcggcgtggcaagaggcgaaaacatccccgccgtgatcgccctgaccgaccccgagggctgcccactgagccggtttaaggatagcctgggaaacccaacccacatcctgagaatcggcgagagctataaggagaagcagcggaccatccaggccaagaaggaggtggagcagcggagagccggcggctacagccggaagtacgccagcaaagccaagaatctggcagacgatatggtgagaaacaccgctagagatctgctgtactacgccgtgacccaggatgccatgctgatcttcgccaacctgagccggggcttcggccggcagggcaagcggaccttcatggccgagagacagtacacacggatggaggactggctgaccgccaagctggcctacgagggcctgagcaagacctacctgtccaagacactggcccagtacacctccaagacatgcagcaactgtgggtttaccatcaccagcgccgactacgacagggtgctggagaagctgaagaagacagcaacaggctggatgaccacaattaacggcaaggagctgaaggtggagggccagattacctactacaacagatacaagagacagaacgtagtcaaggacctgtccgtcgagctggatagactgagcgaagaatctgtgaacaacgacatctcctcctggacaaagggcagaagcggagaagctctgagcctcctgaagaaaagattctcccatagacccgtgcaggagaagttcgtgtgcctgaactgcggcttcgagacacacgcagccgagcaagccgccctgaacatcgccagatcctggctgttcctgcggagccaggagtacaagaaataccagacaaacaagacaaccggcaacaccgataagagagccttcgtcgagacctggcagtccttttaccggaagaagcttaaggaggtgtggaaacctgccgtgcggtctggcggatctggcggaggctcctatgatgcaggcccaggagagcctgaccctggaggacgtggccgtggacttcacctgggaggagtggcagttcctgagccccgcccagaaggacctgtacagggacgtgatgctggagaactacagcaacctggtggccgtgggctaccaggccaggaagcccgacgccctgagcaagctggagaggggcgaggagccctgcaccaccgaggacgagatctacgccaggatctgcagcgacagcggatctggctccggcagcggccccaagaaaaagagaaaagtctaagctgccttctgcggggcttgccttctggccatgcccttcttctctcccttgcacctgtacctcttggtctttgaataaagcctgagtaggaaggctagcaaaaaaaaaaaaaaaaaaaaaaaaaaaaaaaaaaaaaaaaaaaaaaaaaaaaaaaaaaaaaaaaaaaaaaaaaaaaaaaa

SEQ ID NO: 16222 - RNA, 9485 nt, synthetic construct
  source 1..9485: mol_type = other RNA
aggaaataagagagaaaagaagagtaagaagaaatataagagccaccatggcccctaagaagaagcgtaaagtgagccggatggaacgcctcgtctacgaggtgcggcagaagtgcagaaacatcgaggacatctgcatctcctgcggatctctgaacgtgaccctggagcacccactgttcatcggcggcatgtgccagaactgtaaaaactgttttctggagtgtgcctatcaatacgacgatgacggctaccagagctactgcaccatctgttgcggcggaagagaggtgctgatgtgtggaaataacaactgctgccggtgcttctgcgtggaatgcgtggacctgctggtgggccccggcgccgcccaggccgctattaaggaagatccttggaactgctacatgtgcggccacaagggcacatacggcctgctgagacggagagaggactggcctagcagactgcagatgttcttcgccaataaccacgaccaggagttcgacccccctaaggtgtaccctcccgtccccgccgagaagagaaagcccatccgggtcctgagcctgttcgatggcatcgccaccggtctgctggtgctgaaggacctgggcatccaggtggataggtacattgcctccgaggtgtgcgaggactccatcaccgtgggaatggtgcgtcatcagggcaagatcatgtacgtgggcgacgtgcggagcgtgacacagaagcatatccaggagtggggccctttcgacctggtgatcggcggcagcccttgcaatgacctgagcatcgtgaacccagcccggaagggcctgtacgagggaaccggcagactgttcttcgagttttacagactgctgcacgacgcccggcctaaggaaggcgacgaccggcccttcttttggctgttcgagaatgtggtggccatgggagtcagcgacaagcgggatattagccggttcctggagagcaaccccgtgatgatcgatgccaaggaagtgagcgccgcccaccgggccagatacttctggggcaatctgcctggcatgaacagacccctggccagcaccgtgaacgacaagctggagctgcaggagtgcctggagcacggccggatcgccaagttcagcaaggtgagaaccatcaccacccgaagcaacagcatcaaacaaggcaaggaccagcactttcctgtgttcatgaacgagaaggaggacatcctgtggtgtaccgagatggagagagtgttcgggttcccagtccactacacagatgtcagcaacatgtctagactggccagacagagactgctgggaagaagctggtccgtccctgtgatcagacacctgttcgcccctctgaaggagtacttcgcctgcgtgagcagcggcaacagcaacgccaacagccggggccccagcttctctagcggcctggtgccactgtccctgagagggagccacatgggccccatggagatctacaaaaccgtgagcgcctggaagcggcagcctgtgcgcgtgctgagcctgtttcggaatatcgataaagtcctgaaaagcctgggattcctggagagcggctctggctccggcggtggcaccctgaagtacgtggaggatgtgacaaacgtggtcagacgggatgtggagaagtggggccccttcgatctggtgtacggcagcacccaacccctgggcagctcttgtgaccggtgccctggctggtacatgtttcagttccaccggatcctgcagtacgccctgccgagacaggagtcccagcggccattcttttggattttcatggacaacttgctgctgaccgaggatgaccaggaaactaccactcggttcctgcagaccgaagccgtgaccctgcaggacgtgagaggccgggactaccagaacgccatgcgggtgtggtccaacatccctggactgaaaagcaagcacgcacctctgacccctaaagaagaggagtacctgcaggcccaggtgcggagcagaagcaagctggacgcccctaaggtggatctgctggtgaagaattgcctcctgcccctgagagagtacttcaagtatttcagccagaatagtctgcccctgggaggcagcggcggcggcgccctggtgacatttgaggacgtcgccgtgcggttcacccaggaggaatgggctctgctggatccttctcagaaaatcctgtaccgggacgtgatgagagagacataccggaatctgacctccgtgggcatcaactgggaatgttgggaccttgaagcctgcttcagaagcctgggaagaaacctgagagtgcaggtggtgaagagaaagtgcgagctgaccaacagcggcccctgcgccgagggcggcccaagcagcggcgcccctcctcccagcggcggcagcccagccggctccccaacctctaccgaggagggcacctctgagtccgccacccccgagagcggccctggcacctccaccgagcccagcgagggcagcgcacccggcagccctgccggcagccccacctccacagaggagggaaccagcaccgagcccagcgaaggcagcgccccaggcaccagcaccgagcctagtgagcaggagattaaacggatcaacaagatcagaagaagacttgtgaaagacagcaacaccaagaaggccggcaagacaggccccatgaaaaccctgctggttagagtgatgacacccgatctgagagagcggctggaaaacctgagaaagaagcctgaaaatatcccccagcccatcagcaatacatctagagccaacctgaataagctgctgaccgattacaccgaaatgaagaaggcgatcctgcatgtgtactgggaagagttccagaaggaccctgtgggcctgatgagccgggtggcccagcctgccagcaagaagatcgatcagaacaagctgaaacctgagatggacgagaagggcaacctgaccaccgccggctttgcctgctctcagtgtggccagcccctgttcgtgtacaagctggagcaggtgtctgagaagggcaaggcttacaccaactacttcggacggtgcaatgtggccgagcacgaaaagctgatcctgctggcccagctgaagcccgagaaggatagcgacgaagccgtgacatatagcctgggaaagtttgggcagagggccctggatttctacagcattcatgtgaccaaggagtccacccaccccgtgaagcccctggcccagatcgccggaaacagatacgcctccggacctgtgggaaaggccctgagcgacgcatgtatgggcacaatcgcctccttcctgtctaagtaccaggacatcatcatcgaacaccagaaggtggtgaagggcaaccagaagagactggagagcctgcgggagctggccggcaaggaaaacctggaataccctagcgtgaccctgccacctcagcctcacaccaaggagggcgttgatgcctacaacgaagtgatcgcccgggtgcgaatgtgggtgaacctgaacctgtggcagaagctgaagctaagcagagatgatgccaagcctctgctgagactgaagggattcccttcctttcctctggtcgagagacaggccaacgaagtggactggtgggacatggtgtgtaacgtgaagaagctgatcaacgagaaaaaggaggatggcaaggtgttttggcagaatctggctggctacaagagacaggaagccctgagaccatacctgagcagcgaggaagatcggaagaagggaaagaaattcgctcggtaccagctgggcgacctgctgctgcacctggaaaagaagcacggcgaggactggggaaaggtgtacgacgaggcctgggagcggattgacaagaaagtggaaggcctgagcaagcacatcaagctggaagaggaacggagaagcgaggacgcccagagcaaggccgccctgaccgactggctgcgggctaaggccagcttcgtgatcgagggcctgaaggaggccgacaaggacgagttctgcagatgcgagctgaagctgcagaagtggtacggggacctgcggggaaagcccttcgccatcgaagccgagaacagcatcctggacatcagcggcttcagcaagcagtacaactgtgccttcatctggcagaaggacggcgtgaagaagctgaacctgtacctgatcatcaactacttcaagggcggcaagctgcggttcaagaagatcaaacctgaagccttcgaagccaacagattctacaccgtgatcaacaaaaagagcggcgagatcgtgcccatggaggtgaacttcaacttcgacgaccccaacctgatcatcctgcctctggcctttggcaagagacagggcagagaattcatctggaacgacctgctgtccctggaaaccggcagcctgaagctggccaacggaagagtgatcgagaagacactgtacaacagaagaacccggcaggatgagcctgccctgttcgtggccctgaccttcgagcggcgggaggtcctggactcctccaatatcaaaccaatgaacctgatcggcgtggcaagaggcgaaaacatccccgccgtgatcgccctgaccgaccccgagggctgcccactgagccggtttaaggatagcctgggaaacccaacccacatcctgagaatcggcgagagctataaggagaagcagcggaccatccaggccaagaaggaggtggagcagcggagagccggcggctacagccggaagtacgccagcaaagccaagaatctggcagacgatatggtgagaaacaccgctagagatctgctgtactacgccgtgacccaggatgccatgctgatcttcgccaacctgagccggggcttcggccggcagggcaagcggaccttcatggccgagagacagtacacacggatggaggactggctgaccgccaagctggcctacgagggcctgagcaagacctacctgtccaagacactggcccagtacacctccaagacatgcagcaactgtgggtttaccatcaccagcgccgactacgacagggtgctggagaagctgaagaagacagcaacaggctggatgaccacaattaacggcaaggagctgaaggtggagggccagattacctactacaacagatacaagagacagaacgtagtcaaggacctgtccgtcgagctggatagactgagcgaagaatctgtgaacaacgacatctcctcctggacaaagggcagaagcggagaagctctgagcctcctgaagaaaagattctcccatagacccgtgcaggagaagttcgtgtgcctgaactgcggcttcgagacacacgcagccgagcaagccgccctgaacatcgccagatcctggctgttcctgcggagccaggagtacaagaaataccagacaaacaagacaaccggcaacaccgataagagagccttcgtcgagacctggcagtccttttaccggaagaagcttaaggaggtgtggaaacctgccgtgcggtctggcggatctggcggaggctcccaggagcccgtgaccttcgaggacgtggccgtgtacttcacccagaaccagtgggccaagctggaccccacccagagggccctgtacagggaggtgatgctggagaactacgccaacgtggccagcctggtggccttccccttccccaagcccgacctggtgagccagctggagaggggcgaggtgccctggggccccgacccctgggaggccgaggtgctgaggggcatctgccccggcggcggcggcccaagcagcggcgcccctcctcccagcggcggcagcccagccggctccccaacctctaccgaggagggcacctctgagtccgccacccccgagagcggccctggcacctccaccgagcccagcgagggcagcgcacccggcagccctgccggcagccccacctccacagaggagggaaccagcaccgagcccagcgaaggcagcgccccaggcaccagcaccgagcctagtgagcaggagattaaacggatcaacaagatcagaagaagacttgtgaaagacagcaacaccaagaaggccggcaagacaggccccatgaaaaccctgctggttagagtgatgacacccgatctgagagagcggctggaaaacctgagaaagaagcctgaaaatatcccccagcccatcagcaatacatctagagccaacctgaataagctgctgaccgattacaccgaaatgaagaaggcgatcctgcatgtgtactgggaagagttccagaaggaccctgtgggcctgatgagccgggtggcccagcctgccagcaagaagatcgatcagaacaagctgaaacctgagatggacgagaagggcaacctgaccaccgccggctttgcctgctctcagtgtggccagcccctgttcgtgtacaagctggagcaggtgtctgagaagggcaaggcttacaccaactacttcggacggtgcaatgtggccgagcacgaaaagctgatcctgctggcccagctgaagcccgagaaggatagcgacgaagccgtgacatatagcctgggaaagtttgggcagagggccctggatttctacagcattcatgtgaccaaggagtccacccaccccgtgaagcccctggcccagatcgccggaaacagatacgcctccggacctgtgggaaaggccctgagcgacgcatgtatgggcacaatcgcctccttcctgtctaagtaccaggacatcatcatcgaacaccagaaggtggtgaagggcaaccagaagagactggagagcctgcgggagctggccggcaaggaaaacctggaataccctagcgtgaccctgccacctcagcctcacaccaaggagggcgttgatgcctacaacgaagtgatcgcccgggtgcgaatgtgggtgaacctgaacctgtggcagaagctgaagctaagcagagatgatgccaagcctctgctgagactgaagggattcccttcctttcctctggtcgagagacaggccaacgaagtggactggtgggacatggtgtgtaacgtgaagaagctgatcaacgagaaaaaggaggatggcaaggtgttttggcagaatctggctggctacaagagacaggaagccctgagaccatacctgagcagcgaggaagatcggaagaagggaaagaaattcgctcggtaccagctgggcgacctgctgctgcacctggaaaagaagcacggcgaggactggggaaaggtgtacgacgaggcctgggagcggattgacaagaaagtggaaggcctgagcaagcacatcaagctggaagaggaacggagaagcgaggacgcccagagcaaggccgccctgaccgactggctgcgggctaaggccagcttcgtgatcgagggcctgaaggaggccgacaaggacgagttctgcagatgcgagctgaagctgcagaagtggtacggggacctgcggggaaagcccttcgccatcgaagccgagaacagcatcctggacatcagcggcttcagcaagcagtacaactgtgccttcatctggcagaaggacggcgtgaagaagctgaacctgtacctgatcatcaactacttcaagggcggcaagctgcggttcaagaagatcaaacctgaagccttcgaagccaacagattctacaccgtgatcaacaaaaagagcggcgagatcgtgcccatggaggtgaacttcaacttcgacgaccccaacctgatcatcctgcctctggcctttggcaagagacagggcagagaattcatctggaacgacctgctgtccctggaaaccggcagcctgaagctggccaacggaagagtgatcgagaagacactgtacaacagaagaacccggcaggatgagcctgccctgttcgtggccctgaccttcgagcggcgggaggtcctggactcctccaatatcaaaccaatgaacctgatcggcgtggcaagaggcgaaaacatccccgccgtgatcgccctgaccgaccccgagggctgcccactgagccggtttaaggatagcctgggaaacccaacccacatcctgagaatcggcgagagctataaggagaagcagcggaccatccaggccaagaaggaggtggagcagcggagagccggcggctacagccggaagtacgccagcaaagccaagaatctggcagacgatatggtgagaaacaccgctagagatctgctgtactacgccgtgacccaggatgccatgctgatcttcgccaacctgagccggggcttcggccggcagggcaagcggaccttcatggccgagagacagtacacacggatggaggactggctgaccgccaagctggcctacgagggcctgagcaagacctacctgtccaagacactggcccagtacacctccaagacatgcagcaactgtgggtttaccatcaccagcgccgactacgacagggtgctggagaagctgaagaagacagcaacaggctggatgaccacaattaacggcaaggagctgaaggtggagggccagattacctactacaacagatacaagagacagaacgtagtcaaggacctgtccgtcgagctggatagactgagcgaagaatctgtgaacaacgacatctcctcctggacaaagggcagaagcggagaagctctgagcctcctgaagaaaagattctcccatagacccgtgcaggagaagttcgtgtgcctgaactgcggcttcgagacacacgcagccgagcaagccgccctgaacatcgccagatcctggctgttcctgcggagccaggagtacaagaaataccagacaaacaagacaaccggcaacaccgataagagagccttcgtcgagacctggcagtccttttaccggaagaagcttaaggaggtgtggaaacctgccgtgcggtctggcggatctggcggaggctcctcaggagcccgtgaccttcgaggacgtggccgtgtacttcacccagaaccagtgggccaagctggaccccacccagagggccctgtacagggaggtgatgctggagaactacgccaacgtggccagcctggtggccttccccttccccaagcccgacctggtgagccagctggagaggggcgaggtgccctggggccccgacccctgggaggccgaggtgctgaggggcatctgccccggcggcggatctggctccggcagcggccccaagaaaaagagaaaagtctaagctgccttctgcggggcttgccttctggccatgcccttcttctctcccttgcacctgtacctcttggtctttgaataaagcctgagtaggaaggctagcaaaaaaaaaaaaaaaaaaaaaaaaaaaaaaaaaaaaaaaaaaaaaaaaaaaaaaaaaaaaaaaaaaaaaaaaaaaaaaaa

SEQ ID NO: 16223 - RNA, 9485 nt, synthetic construct
  source 1..9485: mol_type = other RNA
aggaaataagagagaaaagaagagtaagaagaaatataagagccaccatggcccctaagaagaagcgtaaagtgagccggatggaacgcctcgtctacgaggtgcggcagaagtgcagaaacatcgaggacatctgcatctcctgcggatctctgaacgtgaccctggagcacccactgttcatcggcggcatgtgccagaactgtaaaaactgttttctggagtgtgcctatcaatacgacgatgacggctaccagagctactgcaccatctgttgcggcggaagagaggtgctgatgtgtggaaataacaactgctgccggtgcttctgcgtggaatgcgtggacctgctggtgggccccggcgccgcccaggccgctattaaggaagatccttggaactgctacatgtgcggccacaagggcacatacggcctgctgagacggagagaggactggcctagcagactgcagatgttcttcgccaataaccacgaccaggagttcgacccccctaaggtgtaccctcccgtccccgccgagaagagaaagcccatccgggtcctgagcctgttcgatggcatcgccaccggtctgctggtgctgaaggacctgggcatccaggtggataggtacattgcctccgaggtgtgcgaggactccatcaccgtgggaatggtgcgtcatcagggcaagatcatgtacgtgggcgacgtgcggagcgtgacacagaagcatatccaggagtggggccctttcgacctggtgatcggcggcagcccttgcaatgacctgagcatcgtgaacccagcccggaagggcctgtacgagggaaccggcagactgttcttcgagttttacagactgctgcacgacgcccggcctaaggaaggcgacgaccggcccttcttttggctgttcgagaatgtggtggccatgggagtcagcgacaagcgggatattagccggttcctggagagcaaccccgtgatgatcgatgccaaggaagtgagcgccgcccaccgggccagatacttctggggcaatctgcctggcatgaacagacccctggccagcaccgtgaacgacaagctggagctgcaggagtgcctggagcacggccggatcgccaagttcagcaaggtgagaaccatcaccacccgaagcaacagcatcaaacaaggcaaggaccagcactttcctgtgttcatgaacgagaaggaggacatcctgtggtgtaccgagatggagagagtgttcgggttcccagtccactacacagatgtcagcaacatgtctagactggccagacagagactgctgggaagaagctggtccgtccctgtgatcagacacctgttcgcccctctgaaggagtacttcgcctgcgtgagcagcggcaacagcaacgccaacagccggggccccagcttctctagcggcctggtgccactgtccctgagagggagccacatgggccccatggagatctacaaaaccgtgagcgcctggaagcggcagcctgtgcgcgtgctgagcctgtttcggaatatcgataaagtcctgaaaagcctgggattcctggagagcggctctggctccggcggtggcaccctgaagtacgtggaggatgtgacaaacgtggtcagacgggatgtggagaagtggggccccttcgatctggtgtacggcagcacccaacccctgggcagctcttgtgaccggtgccctggctggtacatgtttcagttccaccggatcctgcagtacgccctgccgagacaggagtcccagcggccattcttttggattttcatggacaacttgctgctgaccgaggatgaccaggaaactaccactcggttcctgcagaccgaagccgtgaccctgcaggacgtgagaggccgggactaccagaacgccatgcgggtgtggtccaacatccctggactgaaaagcaagcacgcacctctgacccctaaagaagaggagtacctgcaggcccaggtgcggagcagaagcaagctggacgcccctaaggtggatctgctggtgaagaattgcctcctgcccctgagagagtacttcaagtatttcagccagaatagtctgcccctgggaggcagcggcggcggcgccctggtgacatttgaggacgtcgccgtgcggttcacccaggaggaatgggctctgctggatccttctcagaaaatcctgtaccgggacgtgatgagagagacataccggaatctgacctccgtgggcatcaactgggaatgttgggaccttgaagcctgcttcagaagcctgggaagaaacctgagagtgcaggtggtgaagagaaagtgcgagctgaccaacagcggcccctgcgccgagggcggcccaagcagcggcgcccctcctcccagcggcggcagcccagccggctccccaacctctaccgaggagggcacctctgagtccgccacccccgagagcggccctggcacctccaccgagcccagcgagggcagcgcacccggcagccctgccggcagccccacctccacagaggagggaaccagcaccgagcccagcgaaggcagcgccccaggcaccagcaccgagcctagtgagcaggagattaaacggatcaacaagatcagaagaagacttgtgaaagacagcaacaccaagaaggccggcaagacaggccccatgaaaaccctgctggttagagtgatgacacccgatctgagagagcggctggaaaacctgagaaagaagcctgaaaatatcccccagcccatcagcaatacatctagagccaacctgaataagctgctgaccgattacaccgaaatgaagaaggcgatcctgcatgtgtactgggaagagttccagaaggaccctgtgggcctgatgagccgggtggcccagcctgccagcaagaagatcgatcagaacaagctgaaacctgagatggacgagaagggcaacctgaccaccgccggctttgcctgctctcagtgtggccagcccctgttcgtgtacaagctggagcaggtgtctgagaagggcaaggcttacaccaactacttcggacggtgcaatgtggccgagcacgaaaagctgatcctgctggcccagctgaagcccgagaaggatagcgacgaagccgtgacatatagcctgggaaagtttgggcagagggccctggatttctacagcattcatgtgaccaaggagtccacccaccccgtgaagcccctggcccagatcgccggaaacagatacgcctccggacctgtgggaaaggccctgagcgacgcatgtatgggcacaatcgcctccttcctgtctaagtaccaggacatcatcatcgaacaccagaaggtggtgaagggcaaccagaagagactggagagcctgcgggagctggccggcaaggaaaacctggaataccctagcgtgaccctgccacctcagcctcacaccaaggagggcgttgatgcctacaacgaagtgatcgcccgggtgcgaatgtgggtgaacctgaacctgtggcagaagctgaagctaagcagagatgatgccaagcctctgctgagactgaagggattcccttcctttcctctggtcgagagacaggccaacgaagtggactggtgggacatggtgtgtaacgtgaagaagctgatcaacgagaaaaaggaggatggcaaggtgttttggcagaatctggctggctacaagagacaggaagccctgagaccatacctgagcagcgaggaagatcggaagaagggaaagaaattcgctcggtaccagctgggcgacctgctgctgcacctggaaaagaagcacggcgaggactggggaaaggtgtacgacgaggcctgggagcggattgacaagaaagtggaaggcctgagcaagcacatcaagctggaagaggaacggagaagcgaggacgcccagagcaaggccgccctgaccgactggctgcgggctaaggccagcttcgtgatcgagggcctgaaggaggccgacaaggacgagttctgcagatgcgagctgaagctgcagaagtggtacggggacctgcggggaaagcccttcgccatcgaagccgagaacagcatcctggacatcagcggcttcagcaagcagtacaactgtgccttcatctggcagaaggacggcgtgaagaagctgaacctgtacctgatcatcaactacttcaagggcggcaagctgcggttcaagaagatcaaacctgaagccttcgaagccaacagattctacaccgtgatcaacaaaaagagcggcgagatcgtgcccatggaggtgaacttcaacttcgacgaccccaacctgatcatcctgcctctggcctttggcaagagacagggcagagaattcatctggaacgacctgctgtccctggaaaccggcagcctgaagctggccaacggaagagtgatcgagaagacactgtacaacagaagaacccggcaggatgagcctgccctgttcgtggccctgaccttcgagcggcgggaggtcctggactcctccaatatcaaaccaatgaacctgatcggcgtggcaagaggcgaaaacatccccgccgtgatcgccctgaccgaccccgagggctgcccactgagccggtttaaggatagcctgggaaacccaacccacatcctgagaatcggcgagagctataaggagaagcagcggaccatccaggccaagaaggaggtggagcagcggagagccggcggctacagccggaagtacgccagcaaagccaagaatctggcagacgatatggtgagaaacaccgctagagatctgctgtactacgccgtgacccaggatgccatgctgatcttcgccaacctgagccggggcttcggccggcagggcaagcggaccttcatggccgagagacagtacacacggatggaggactggctgaccgccaagctggcctacgagggcctgagcaagacctacctgtccaagacactggcccagtacacctccaagacatgcagcaactgtgggtttaccatcaccagcgccgactacgacagggtgctggagaagctgaagaagacagcaacaggctggatgaccacaattaacggcaaggagctgaaggtggagggccagattacctactacaacagatacaagagacagaacgtagtcaaggacctgtccgtcgagctggatagactgagcgaagaatctgtgaacaacgacatctcctcctggacaaagggcagaagcggagaagctctgagcctcctgaagaaaagattctcccatagacccgtgcaggagaagttcgtgtgcctgaactgcggcttcgagacacacgcagccgagcaagccgccctgaacatcgccagatcctggctgttcctgcggagccaggagtacaagaaataccagacaaacaagacaaccggcaacaccgataagagagccttcgtcgagacctggcagtccttttaccggaagaagcttaaggaggtgtggaaacctgccgtgcggtctggcggatctggcggaggctccgagcccggcaccgtgagcttcggcgacgtggccgtgtacttcagcagggaggagtggggctgcctgaggcccgcccagagggccctgtacagggacgtgatgagggagacctacagccacctgggcgccctgggcgtgggcggcagcaagcccgccctgatcagctgggtggaggaggaggccgagctgtggggccccgccgcccaggaccccgaggtggccaagaggcccaccgaggccgacggcggcccaagcagcggcgcccctcctcccagcggcggcagcccagccggctccccaacctctaccgaggagggcacctctgagtccgccacccccgagagcggccctggcacctccaccgagcccagcgagggcagcgcacccggcagccctgccggcagccccacctccacagaggagggaaccagcaccgagcccagcgaaggcagcgccccaggcaccagcaccgagcctagtgagcaggagattaaacggatcaacaagatcagaagaagacttgtgaaagacagcaacaccaagaaggccggcaagacaggccccatgaaaaccctgctggttagagtgatgacacccgatctgagagagcggctggaaaacctgagaaagaagcctgaaaatatcccccagcccatcagcaatacatctagagccaacctgaataagctgctgaccgattacaccgaaatgaagaaggcgatcctgcatgtgtactgggaagagttccagaaggaccctgtgggcctgatgagccgggtggcccagcctgccagcaagaagatcgatcagaacaagctgaaacctgagatggacgagaagggcaacctgaccaccgccggctttgcctgctctcagtgtggccagcccctgttcgtgtacaagctggagcaggtgtctgagaagggcaaggcttacaccaactacttcggacggtgcaatgtggccgagcacgaaaagctgatcctgctggcccagctgaagcccgagaaggatagcgacgaagccgtgacatatagcctgggaaagtttgggcagagggccctggatttctacagcattcatgtgaccaaggagtccacccaccccgtgaagcccctggcccagatcgccggaaacagatacgcctccggacctgtgggaaaggccctgagcgacgcatgtatgggcacaatcgcctccttcctgtctaagtaccaggacatcatcatcgaacaccagaaggtggtgaagggcaaccagaagagactggagagcctgcgggagctggccggcaaggaaaacctggaataccctagcgtgaccctgccacctcagcctcacaccaaggagggcgttgatgcctacaacgaagtgatcgcccgggtgcgaatgtgggtgaacctgaacctgtggcagaagctgaagctaagcagagatgatgccaagcctctgctgagactgaagggattcccttcctttcctctggtcgagagacaggccaacgaagtggactggtgggacatggtgtgtaacgtgaagaagctgatcaacgagaaaaaggaggatggcaaggtgttttggcagaatctggctggctacaagagacaggaagccctgagaccatacctgagcagcgaggaagatcggaagaagggaaagaaattcgctcggtaccagctgggcgacctgctgctgcacctggaaaagaagcacggcgaggactggggaaaggtgtacgacgaggcctgggagcggattgacaagaaagtggaaggcctgagcaagcacatcaagctggaagaggaacggagaagcgaggacgcccagagcaaggccgccctgaccgactggctgcgggctaaggccagcttcgtgatcgagggcctgaaggaggccgacaaggacgagttctgcagatgcgagctgaagctgcagaagtggtacggggacctgcggggaaagcccttcgccatcgaagccgagaacagcatcctggacatcagcggcttcagcaagcagtacaactgtgccttcatctggcagaaggacggcgtgaagaagctgaacctgtacctgatcatcaactacttcaagggcggcaagctgcggttcaagaagatcaaacctgaagccttcgaagccaacagattctacaccgtgatcaacaaaaagagcggcgagatcgtgcccatggaggtgaacttcaacttcgacgaccccaacctgatcatcctgcctctggcctttggcaagagacagggcagagaattcatctggaacgacctgctgtccctggaaaccggcagcctgaagctggccaacggaagagtgatcgagaagacactgtacaacagaagaacccggcaggatgagcctgccctgttcgtggccctgaccttcgagcggcgggaggtcctggactcctccaatatcaaaccaatgaacctgatcggcgtggcaagaggcgaaaacatccccgccgtgatcgccctgaccgaccccgagggctgcccactgagccggtttaaggatagcctgggaaacccaacccacatcctgagaatcggcgagagctataaggagaagcagcggaccatccaggccaagaaggaggtggagcagcggagagccggcggctacagccggaagtacgccagcaaagccaagaatctggcagacgatatggtgagaaacaccgctagagatctgctgtactacgccgtgacccaggatgccatgctgatcttcgccaacctgagccggggcttcggccggcagggcaagcggaccttcatggccgagagacagtacacacggatggaggactggctgaccgccaagctggcctacgagggcctgagcaagacctacctgtccaagacactggcccagtacacctccaagacatgcagcaactgtgggtttaccatcaccagcgccgactacgacagggtgctggagaagctgaagaagacagcaacaggctggatgaccacaattaacggcaaggagctgaaggtggagggccagattacctactacaacagatacaagagacagaacgtagtcaaggacctgtccgtcgagctggatagactgagcgaagaatctgtgaacaacgacatctcctcctggacaaagggcagaagcggagaagctctgagcctcctgaagaaaagattctcccatagacccgtgcaggagaagttcgtgtgcctgaactgcggcttcgagacacacgcagccgagcaagccgccctgaacatcgccagatcctggctgttcctgcggagccaggagtacaagaaataccagacaaacaagacaaccggcaacaccgataagagagccttcgtcgagacctggcagtccttttaccggaagaagcttaaggaggtgtggaaacctgccgtgcggtctggcggatctggcggaggctcctgagcccggcaccgtgagcttcggcgacgtggccgtgtacttcagcagggaggagtggggctgcctgaggcccgcccagagggccctgtacagggacgtgatgagggagacctacagccacctgggcgccctgggcgtgggcggcagcaagcccgccctgatcagctgggtggaggaggaggccgagctgtggggccccgccgcccaggaccccgaggtggccaagaggcccaccgaggccgacggatctggctccggcagcggccccaagaaaaagagaaaagtctaagctgccttctgcggggcttgccttctggccatgcccttcttctctcccttgcacctgtacctcttggtctttgaataaagcctgagtaggaaggctagcaaaaaaaaaaaaaaaaaaaaaaaaaaaaaaaaaaaaaaaaaaaaaaaaaaaaaaaaaaaaaaaaaaaaaaaaaaaaaaaa

SEQ ID NO: 16224 - RNA, 9485 nt, synthetic construct
  source 1..9485: mol_type = other RNA
aggaaataagagagaaaagaagagtaagaagaaatataagagccaccatggcccctaagaagaagcgtaaagtgagccggatggaacgcctcgtctacgaggtgcggcagaagtgcagaaacatcgaggacatctgcatctcctgcggatctctgaacgtgaccctggagcacccactgttcatcggcggcatgtgccagaactgtaaaaactgttttctggagtgtgcctatcaatacgacgatgacggctaccagagctactgcaccatctgttgcggcggaagagaggtgctgatgtgtggaaataacaactgctgccggtgcttctgcgtggaatgcgtggacctgctggtgggccccggcgccgcccaggccgctattaaggaagatccttggaactgctacatgtgcggccacaagggcacatacggcctgctgagacggagagaggactggcctagcagactgcagatgttcttcgccaataaccacgaccaggagttcgacccccctaaggtgtaccctcccgtccccgccgagaagagaaagcccatccgggtcctgagcctgttcgatggcatcgccaccggtctgctggtgctgaaggacctgggcatccaggtggataggtacattgcctccgaggtgtgcgaggactccatcaccgtgggaatggtgcgtcatcagggcaagatcatgtacgtgggcgacgtgcggagcgtgacacagaagcatatccaggagtggggccctttcgacctggtgatcggcggcagcccttgcaatgacctgagcatcgtgaacccagcccggaagggcctgtacgagggaaccggcagactgttcttcgagttttacagactgctgcacgacgcccggcctaaggaaggcgacgaccggcccttcttttggctgttcgagaatgtggtggccatgggagtcagcgacaagcgggatattagccggttcctggagagcaaccccgtgatgatcgatgccaaggaagtgagcgccgcccaccgggccagatacttctggggcaatctgcctggcatgaacagacccctggccagcaccgtgaacgacaagctggagctgcaggagtgcctggagcacggccggatcgccaagttcagcaaggtgagaaccatcaccacccgaagcaacagcatcaaacaaggcaaggaccagcactttcctgtgttcatgaacgagaaggaggacatcctgtggtgtaccgagatggagagagtgttcgggttcccagtccactacacagatgtcagcaacatgtctagactggccagacagagactgctgggaagaagctggtccgtccctgtgatcagacacctgttcgcccctctgaaggagtacttcgcctgcgtgagcagcggcaacagcaacgccaacagccggggccccagcttctctagcggcctggtgccactgtccctgagagggagccacatgggccccatggagatctacaaaaccgtgagcgcctggaagcggcagcctgtgcgcgtgctgagcctgtttcggaatatcgataaagtcctgaaaagcctgggattcctggagagcggctctggctccggcggtggcaccctgaagtacgtggaggatgtgacaaacgtggtcagacgggatgtggagaagtggggccccttcgatctggtgtacggcagcacccaacccctgggcagctcttgtgaccggtgccctggctggtacatgtttcagttccaccggatcctgcagtacgccctgccgagacaggagtcccagcggccattcttttggattttcatggacaacttgctgctgaccgaggatgaccaggaaactaccactcggttcctgcagaccgaagccgtgaccctgcaggacgtgagaggccgggactaccagaacgccatgcgggtgtggtccaacatccctggactgaaaagcaagcacgcacctctgacccctaaagaagaggagtacctgcaggcccaggtgcggagcagaagcaagctggacgcccctaaggtggatctgctggtgaagaattgcctcctgcccctgagagagtacttcaagtatttcagccagaatagtctgcccctgggaggcagcggcggcggcgccctggtgacatttgaggacgtcgccgtgcggttcacccaggaggaatgggctctgctggatccttctcagaaaatcctgtaccgggacgtgatgagagagacataccggaatctgacctccgtgggcatcaactgggaatgttgggaccttgaagcctgcttcagaagcctgggaagaaacctgagagtgcaggtggtgaagagaaagtgcgagctgaccaacagcggcccctgcgccgagggcggcccaagcagcggcgcccctcctcccagcggcggcagcccagccggctccccaacctctaccgaggagggcacctctgagtccgccacccccgagagcggccctggcacctccaccgagcccagcgagggcagcgcacccggcagccctgccggcagccccacctccacagaggagggaaccagcaccgagcccagcgaaggcagcgccccaggcaccagcaccgagcctagtgagcaggagattaaacggatcaacaagatcagaagaagacttgtgaaagacagcaacaccaagaaggccggcaagacaggccccatgaaaaccctgctggttagagtgatgacacccgatctgagagagcggctggaaaacctgagaaagaagcctgaaaatatcccccagcccatcagcaatacatctagagccaacctgaataagctgctgaccgattacaccgaaatgaagaaggcgatcctgcatgtgtactgggaagagttccagaaggaccctgtgggcctgatgagccgggtggcccagcctgccagcaagaagatcgatcagaacaagctgaaacctgagatggacgagaagggcaacctgaccaccgccggctttgcctgctctcagtgtggccagcccctgttcgtgtacaagctggagcaggtgtctgagaagggcaaggcttacaccaactacttcggacggtgcaatgtggccgagcacgaaaagctgatcctgctggcccagctgaagcccgagaaggatagcgacgaagccgtgacatatagcctgggaaagtttgggcagagggccctggatttctacagcattcatgtgaccaaggagtccacccaccccgtgaagcccctggcccagatcgccggaaacagatacgcctccggacctgtgggaaaggccctgagcgacgcatgtatgggcacaatcgcctccttcctgtctaagtaccaggacatcatcatcgaacaccagaaggtggtgaagggcaaccagaagagactggagagcctgcgggagctggccggcaaggaaaacctggaataccctagcgtgaccctgccacctcagcctcacaccaaggagggcgttgatgcctacaacgaagtgatcgcccgggtgcgaatgtgggtgaacctgaacctgtggcagaagctgaagctaagcagagatgatgccaagcctctgctgagactgaagggattcccttcctttcctctggtcgagagacaggccaacgaagtggactggtgggacatggtgtgtaacgtgaagaagctgatcaacgagaaaaaggaggatggcaaggtgttttggcagaatctggctggctacaagagacaggaagccctgagaccatacctgagcagcgaggaagatcggaagaagggaaagaaattcgctcggtaccagctgggcgacctgctgctgcacctggaaaagaagcacggcgaggactggggaaaggtgtacgacgaggcctgggagcggattgacaagaaagtggaaggcctgagcaagcacatcaagctggaagaggaacggagaagcgaggacgcccagagcaaggccgccctgaccgactggctgcgggctaaggccagcttcgtgatcgagggcctgaaggaggccgacaaggacgagttctgcagatgcgagctgaagctgcagaagtggtacggggacctgcggggaaagcccttcgccatcgaagccgagaacagcatcctggacatcagcggcttcagcaagcagtacaactgtgccttcatctggcagaaggacggcgtgaagaagctgaacctgtacctgatcatcaactacttcaagggcggcaagctgcggttcaagaagatcaaacctgaagccttcgaagccaacagattctacaccgtgatcaacaaaaagagcggcgagatcgtgcccatggaggtgaacttcaacttcgacgaccccaacctgatcatcctgcctctggcctttggcaagagacagggcagagaattcatctggaacgacctgctgtccctggaaaccggcagcctgaagctggccaacggaagagtgatcgagaagacactgtacaacagaagaacccggcaggatgagcctgccctgttcgtggccctgaccttcgagcggcgggaggtcctggactcctccaatatcaaaccaatgaacctgatcggcgtggcaagaggcgaaaacatccccgccgtgatcgccctgaccgaccccgagggctgcccactgagccggtttaaggatagcctgggaaacccaacccacatcctgagaatcggcgagagctataaggagaagcagcggaccatccaggccaagaaggaggtggagcagcggagagccggcggctacagccggaagtacgccagcaaagccaagaatctggcagacgatatggtgagaaacaccgctagagatctgctgtactacgccgtgacccaggatgccatgctgatcttcgccaacctgagccggggcttcggccggcagggcaagcggaccttcatggccgagagacagtacacacggatggaggactggctgaccgccaagctggcctacgagggcctgagcaagacctacctgtccaagacactggcccagtacacctccaagacatgcagcaactgtgggtttaccatcaccagcgccgactacgacagggtgctggagaagctgaagaagacagcaacaggctggatgaccacaattaacggcaaggagctgaaggtggagggccagattacctactacaacagatacaagagacagaacgtagtcaaggacctgtccgtcgagctggatagactgagcgaagaatctgtgaacaacgacatctcctcctggacaaagggcagaagcggagaagctctgagcctcctgaagaaaagattctcccatagacccgtgcaggagaagttcgtgtgcctgaactgcggcttcgagacacacgcagccgagcaagccgccctgaacatcgccagatcctggctgttcctgcggagccaggagtacaagaaataccagacaaacaagacaaccggcaacaccgataagagagccttcgtcgagacctggcagtccttttaccggaagaagcttaaggaggtgtggaaacctgccgtgcggtctggcggatctggcggaggctccaagcccggcgccgtgagcttcgccgacgtggccgtgtacttcagccccgaggagtggggctgcctgaggcccgcccagagggccctgtacagggaggtgatgagggagacctacggcctgctgggcgccctgggcgtgggcggcgccaagcccgccctgatcagctgggtggaggaggaggccgagctgtggggccccggcgcccaggaccccgaggtggccatgtgccagacccaggccgacggcggcccaagcagcggcgcccctcctcccagcggcggcagcccagccggctccccaacctctaccgaggagggcacctctgagtccgccacccccgagagcggccctggcacctccaccgagcccagcgagggcagcgcacccggcagccctgccggcagccccacctccacagaggagggaaccagcaccgagcccagcgaaggcagcgccccaggcaccagcaccgagcctagtgagcaggagattaaacggatcaacaagatcagaagaagacttgtgaaagacagcaacaccaagaaggccggcaagacaggccccatgaaaaccctgctggttagagtgatgacacccgatctgagagagcggctggaaaacctgagaaagaagcctgaaaatatcccccagcccatcagcaatacatctagagccaacctgaataagctgctgaccgattacaccgaaatgaagaaggcgatcctgcatgtgtactgggaagagttccagaaggaccctgtgggcctgatgagccgggtggcccagcctgccagcaagaagatcgatcagaacaagctgaaacctgagatggacgagaagggcaacctgaccaccgccggctttgcctgctctcagtgtggccagcccctgttcgtgtacaagctggagcaggtgtctgagaagggcaaggcttacaccaactacttcggacggtgcaatgtggccgagcacgaaaagctgatcctgctggcccagctgaagcccgagaaggatagcgacgaagccgtgacatatagcctgggaaagtttgggcagagggccctggatttctacagcattcatgtgaccaaggagtccacccaccccgtgaagcccctggcccagatcgccggaaacagatacgcctccggacctgtgggaaaggccctgagcgacgcatgtatgggcacaatcgcctccttcctgtctaagtaccaggacatcatcatcgaacaccagaaggtggtgaagggcaaccagaagagactggagagcctgcgggagctggccggcaaggaaaacctggaataccctagcgtgaccctgccacctcagcctcacaccaaggagggcgttgatgcctacaacgaagtgatcgcccgggtgcgaatgtgggtgaacctgaacctgtggcagaagctgaagctaagcagagatgatgccaagcctctgctgagactgaagggattcccttcctttcctctggtcgagagacaggccaacgaagtggactggtgggacatggtgtgtaacgtgaagaagctgatcaacgagaaaaaggaggatggcaaggtgttttggcagaatctggctggctacaagagacaggaagccctgagaccatacctgagcagcgaggaagatcggaagaagggaaagaaattcgctcggtaccagctgggcgacctgctgctgcacctggaaaagaagcacggcgaggactggggaaaggtgtacgacgaggcctgggagcggattgacaagaaagtggaaggcctgagcaagcacatcaagctggaagaggaacggagaagcgaggacgcccagagcaaggccgccctgaccgactggctgcgggctaaggccagcttcgtgatcgagggcctgaaggaggccgacaaggacgagttctgcagatgcgagctgaagctgcagaagtggtacggggacctgcggggaaagcccttcgccatcgaagccgagaacagcatcctggacatcagcggcttcagcaagcagtacaactgtgccttcatctggcagaaggacggcgtgaagaagctgaacctgtacctgatcatcaactacttcaagggcggcaagctgcggttcaagaagatcaaacctgaagccttcgaagccaacagattctacaccgtgatcaacaaaaagagcggcgagatcgtgcccatggaggtgaacttcaacttcgacgaccccaacctgatcatcctgcctctggcctttggcaagagacagggcagagaattcatctggaacgacctgctgtccctggaaaccggcagcctgaagctggccaacggaagagtgatcgagaagacactgtacaacagaagaacccggcaggatgagcctgccctgttcgtggccctgaccttcgagcggcgggaggtcctggactcctccaatatcaaaccaatgaacctgatcggcgtggcaagaggcgaaaacatccccgccgtgatcgccctgaccgaccccgagggctgcccactgagccggtttaaggatagcctgggaaacccaacccacatcctgagaatcggcgagagctataaggagaagcagcggaccatccaggccaagaaggaggtggagcagcggagagccggcggctacagccggaagtacgccagcaaagccaagaatctggcagacgatatggtgagaaacaccgctagagatctgctgtactacgccgtgacccaggatgccatgctgatcttcgccaacctgagccggggcttcggccggcagggcaagcggaccttcatggccgagagacagtacacacggatggaggactggctgaccgccaagctggcctacgagggcctgagcaagacctacctgtccaagacactggcccagtacacctccaagacatgcagcaactgtgggtttaccatcaccagcgccgactacgacagggtgctggagaagctgaagaagacagcaacaggctggatgaccacaattaacggcaaggagctgaaggtggagggccagattacctactacaacagatacaagagacagaacgtagtcaaggacctgtccgtcgagctggatagactgagcgaagaatctgtgaacaacgacatctcctcctggacaaagggcagaagcggagaagctctgagcctcctgaagaaaagattctcccatagacccgtgcaggagaagttcgtgtgcctgaactgcggcttcgagacacacgcagccgagcaagccgccctgaacatcgccagatcctggctgttcctgcggagccaggagtacaagaaataccagacaaacaagacaaccggcaacaccgataagagagccttcgtcgagacctggcagtccttttaccggaagaagcttaaggaggtgtggaaacctgccgtgcggtctggcggatctggcggaggctcctaagcccggcgccgtgagcttcgccgacgtggccgtgtacttcagccccgaggagtggggctgcctgaggcccgcccagagggccctgtacagggaggtgatgagggagacctacggcctgctgggcgccctgggcgtgggcggcgccaagcccgccctgatcagctgggtggaggaggaggccgagctgtggggccccggcgcccaggaccccgaggtggccatgtgccagacccaggccgacggatctggctccggcagcggccccaagaaaaagagaaaagtctaagctgccttctgcggggcttgccttctggccatgcccttcttctctcccttgcacctgtacctcttggtctttgaataaagcctgagtaggaaggctagcaaaaaaaaaaaaaaaaaaaaaaaaaaaaaaaaaaaaaaaaaaaaaaaaaaaaaaaaaaaaaaaaaaaaaaaaaaaaaaaa

SEQ ID NO: 16225 - RNA, 9485 nt, synthetic construct
  source 1..9485: mol_type = other RNA
aggaaataagagagaaaagaagagtaagaagaaatataagagccaccatggcccctaagaagaagcgtaaagtgagccggatggaacgcctcgtctacgaggtgcggcagaagtgcagaaacatcgaggacatctgcatctcctgcggatctctgaacgtgaccctggagcacccactgttcatcggcggcatgtgccagaactgtaaaaactgttttctggagtgtgcctatcaatacgacgatgacggctaccagagctactgcaccatctgttgcggcggaagagaggtgctgatgtgtggaaataacaactgctgccggtgcttctgcgtggaatgcgtggacctgctggtgggccccggcgccgcccaggccgctattaaggaagatccttggaactgctacatgtgcggccacaagggcacatacggcctgctgagacggagagaggactggcctagcagactgcagatgttcttcgccaataaccacgaccaggagttcgacccccctaaggtgtaccctcccgtccccgccgagaagagaaagcccatccgggtcctgagcctgttcgatggcatcgccaccggtctgctggtgctgaaggacctgggcatccaggtggataggtacattgcctccgaggtgtgcgaggactccatcaccgtgggaatggtgcgtcatcagggcaagatcatgtacgtgggcgacgtgcggagcgtgacacagaagcatatccaggagtggggccctttcgacctggtgatcggcggcagcccttgcaatgacctgagcatcgtgaacccagcccggaagggcctgtacgagggaaccggcagactgttcttcgagttttacagactgctgcacgacgcccggcctaaggaaggcgacgaccggcccttcttttggctgttcgagaatgtggtggccatgggagtcagcgacaagcgggatattagccggttcctggagagcaaccccgtgatgatcgatgccaaggaagtgagcgccgcccaccgggccagatacttctggggcaatctgcctggcatgaacagacccctggccagcaccgtgaacgacaagctggagctgcaggagtgcctggagcacggccggatcgccaagttcagcaaggtgagaaccatcaccacccgaagcaacagcatcaaacaaggcaaggaccagcactttcctgtgttcatgaacgagaaggaggacatcctgtggtgtaccgagatggagagagtgttcgggttcccagtccactacacagatgtcagcaacatgtctagactggccagacagagactgctgggaagaagctggtccgtccctgtgatcagacacctgttcgcccctctgaaggagtacttcgcctgcgtgagcagcggcaacagcaacgccaacagccggggccccagcttctctagcggcctggtgccactgtccctgagagggagccacatgggccccatggagatctacaaaaccgtgagcgcctggaagcggcagcctgtgcgcgtgctgagcctgtttcggaatatcgataaagtcctgaaaagcctgggattcctggagagcggctctggctccggcggtggcaccctgaagtacgtggaggatgtgacaaacgtggtcagacgggatgtggagaagtggggccccttcgatctggtgtacggcagcacccaacccctgggcagctcttgtgaccggtgccctggctggtacatgtttcagttccaccggatcctgcagtacgccctgccgagacaggagtcccagcggccattcttttggattttcatggacaacttgctgctgaccgaggatgaccaggaaactaccactcggttcctgcagaccgaagccgtgaccctgcaggacgtgagaggccgggactaccagaacgccatgcgggtgtggtccaacatccctggactgaaaagcaagcacgcacctctgacccctaaagaagaggagtacctgcaggcccaggtgcggagcagaagcaagctggacgcccctaaggtggatctgctggtgaagaattgcctcctgcccctgagagagtacttcaagtatttcagccagaatagtctgcccctgggaggcagcggcggcggcgccctggtgacatttgaggacgtcgccgtgcggttcacccaggaggaatgggctctgctggatccttctcagaaaatcctgtaccgggacgtgatgagagagacataccggaatctgacctccgtgggcatcaactgggaatgttgggaccttgaagcctgcttcagaagcctgggaagaaacctgagagtgcaggtggtgaagagaaagtgcgagctgaccaacagcggcccctgcgccgagggcggcccaagcagcggcgcccctcctcccagcggcggcagcccagccggctccccaacctctaccgaggagggcacctctgagtccgccacccccgagagcggccctggcacctccaccgagcccagcgagggcagcgcacccggcagccctgccggcagccccacctccacagaggagggaaccagcaccgagcccagcgaaggcagcgccccaggcaccagcaccgagcctagtgagcaggagattaaacggatcaacaagatcagaagaagacttgtgaaagacagcaacaccaagaaggccggcaagacaggccccatgaaaaccctgctggttagagtgatgacacccgatctgagagagcggctggaaaacctgagaaagaagcctgaaaatatcccccagcccatcagcaatacatctagagccaacctgaataagctgctgaccgattacaccgaaatgaagaaggcgatcctgcatgtgtactgggaagagttccagaaggaccctgtgggcctgatgagccgggtggcccagcctgccagcaagaagatcgatcagaacaagctgaaacctgagatggacgagaagggcaacctgaccaccgccggctttgcctgctctcagtgtggccagcccctgttcgtgtacaagctggagcaggtgtctgagaagggcaaggcttacaccaactacttcggacggtgcaatgtggccgagcacgaaaagctgatcctgctggcccagctgaagcccgagaaggatagcgacgaagccgtgacatatagcctgggaaagtttgggcagagggccctggatttctacagcattcatgtgaccaaggagtccacccaccccgtgaagcccctggcccagatcgccggaaacagatacgcctccggacctgtgggaaaggccctgagcgacgcatgtatgggcacaatcgcctccttcctgtctaagtaccaggacatcatcatcgaacaccagaaggtggtgaagggcaaccagaagagactggagagcctgcgggagctggccggcaaggaaaacctggaataccctagcgtgaccctgccacctcagcctcacaccaaggagggcgttgatgcctacaacgaagtgatcgcccgggtgcgaatgtgggtgaacctgaacctgtggcagaagctgaagctaagcagagatgatgccaagcctctgctgagactgaagggattcccttcctttcctctggtcgagagacaggccaacgaagtggactggtgggacatggtgtgtaacgtgaagaagctgatcaacgagaaaaaggaggatggcaaggtgttttggcagaatctggctggctacaagagacaggaagccctgagaccatacctgagcagcgaggaagatcggaagaagggaaagaaattcgctcggtaccagctgggcgacctgctgctgcacctggaaaagaagcacggcgaggactggggaaaggtgtacgacgaggcctgggagcggattgacaagaaagtggaaggcctgagcaagcacatcaagctggaagaggaacggagaagcgaggacgcccagagcaaggccgccctgaccgactggctgcgggctaaggccagcttcgtgatcgagggcctgaaggaggccgacaaggacgagttctgcagatgcgagctgaagctgcagaagtggtacggggacctgcggggaaagcccttcgccatcgaagccgagaacagcatcctggacatcagcggcttcagcaagcagtacaactgtgccttcatctggcagaaggacggcgtgaagaagctgaacctgtacctgatcatcaactacttcaagggcggcaagctgcggttcaagaagatcaaacctgaagccttcgaagccaacagattctacaccgtgatcaacaaaaagagcggcgagatcgtgcccatggaggtgaacttcaacttcgacgaccccaacctgatcatcctgcctctggcctttggcaagagacagggcagagaattcatctggaacgacctgctgtccctggaaaccggcagcctgaagctggccaacggaagagtgatcgagaagacactgtacaacagaagaacccggcaggatgagcctgccctgttcgtggccctgaccttcgagcggcgggaggtcctggactcctccaatatcaaaccaatgaacctgatcggcgtggcaagaggcgaaaacatccccgccgtgatcgccctgaccgaccccgagggctgcccactgagccggtttaaggatagcctgggaaacccaacccacatcctgagaatcggcgagagctataaggagaagcagcggaccatccaggccaagaaggaggtggagcagcggagagccggcggctacagccggaagtacgccagcaaagccaagaatctggcagacgatatggtgagaaacaccgctagagatctgctgtactacgccgtgacccaggatgccatgctgatcttcgccaacctgagccggggcttcggccggcagggcaagcggaccttcatggccgagagacagtacacacggatggaggactggctgaccgccaagctggcctacgagggcctgagcaagacctacctgtccaagacactggcccagtacacctccaagacatgcagcaactgtgggtttaccatcaccagcgccgactacgacagggtgctggagaagctgaagaagacagcaacaggctggatgaccacaattaacggcaaggagctgaaggtggagggccagattacctactacaacagatacaagagacagaacgtagtcaaggacctgtccgtcgagctggatagactgagcgaagaatctgtgaacaacgacatctcctcctggacaaagggcagaagcggagaagctctgagcctcctgaagaaaagattctcccatagacccgtgcaggagaagttcgtgtgcctgaactgcggcttcgagacacacgcagccgagcaagccgccctgaacatcgccagatcctggctgttcctgcggagccaggagtacaagaaataccagacaaacaagacaaccggcaacaccgataagagagccttcgtcgagacctggcagtccttttaccggaagaagcttaaggaggtgtggaaacctgccgtgcggtctggcggatctggcggaggctccgcccaggaggtggtgaccttcaaggacgtggccgtggacttcaccagggaggagtggtgcctgctgagccccccccagaaggagctgtacaaggaggtgatgctggagaacgcccagaacctgctgagcgtgggcctgcccggcccccccgaggacgtgatcagctacctgaagcagaggaaggacccctggatgctggagcaggagggcctgaggagctgctgccccgagggcgagatcaggggcggcccaagcagcggcgcccctcctcccagcggcggcagcccagccggctccccaacctctaccgaggagggcacctctgagtccgccacccccgagagcggccctggcacctccaccgagcccagcgagggcagcgcacccggcagccctgccggcagccccacctccacagaggagggaaccagcaccgagcccagcgaaggcagcgccccaggcaccagcaccgagcctagtgagcaggagattaaacggatcaacaagatcagaagaagacttgtgaaagacagcaacaccaagaaggccggcaagacaggccccatgaaaaccctgctggttagagtgatgacacccgatctgagagagcggctggaaaacctgagaaagaagcctgaaaatatcccccagcccatcagcaatacatctagagccaacctgaataagctgctgaccgattacaccgaaatgaagaaggcgatcctgcatgtgtactgggaagagttccagaaggaccctgtgggcctgatgagccgggtggcccagcctgccagcaagaagatcgatcagaacaagctgaaacctgagatggacgagaagggcaacctgaccaccgccggctttgcctgctctcagtgtggccagcccctgttcgtgtacaagctggagcaggtgtctgagaagggcaaggcttacaccaactacttcggacggtgcaatgtggccgagcacgaaaagctgatcctgctggcccagctgaagcccgagaaggatagcgacgaagccgtgacatatagcctgggaaagtttgggcagagggccctggatttctacagcattcatgtgaccaaggagtccacccaccccgtgaagcccctggcccagatcgccggaaacagatacgcctccggacctgtgggaaaggccctgagcgacgcatgtatgggcacaatcgcctccttcctgtctaagtaccaggacatcatcatcgaacaccagaaggtggtgaagggcaaccagaagagactggagagcctgcgggagctggccggcaaggaaaacctggaataccctagcgtgaccctgccacctcagcctcacaccaaggagggcgttgatgcctacaacgaagtgatcgcccgggtgcgaatgtgggtgaacctgaacctgtggcagaagctgaagctaagcagagatgatgccaagcctctgctgagactgaagggattcccttcctttcctctggtcgagagacaggccaacgaagtggactggtgggacatggtgtgtaacgtgaagaagctgatcaacgagaaaaaggaggatggcaaggtgttttggcagaatctggctggctacaagagacaggaagccctgagaccatacctgagcagcgaggaagatcggaagaagggaaagaaattcgctcggtaccagctgggcgacctgctgctgcacctggaaaagaagcacggcgaggactggggaaaggtgtacgacgaggcctgggagcggattgacaagaaagtggaaggcctgagcaagcacatcaagctggaagaggaacggagaagcgaggacgcccagagcaaggccgccctgaccgactggctgcgggctaaggccagcttcgtgatcgagggcctgaaggaggccgacaaggacgagttctgcagatgcgagctgaagctgcagaagtggtacggggacctgcggggaaagcccttcgccatcgaagccgagaacagcatcctggacatcagcggcttcagcaagcagtacaactgtgccttcatctggcagaaggacggcgtgaagaagctgaacctgtacctgatcatcaactacttcaagggcggcaagctgcggttcaagaagatcaaacctgaagccttcgaagccaacagattctacaccgtgatcaacaaaaagagcggcgagatcgtgcccatggaggtgaacttcaacttcgacgaccccaacctgatcatcctgcctctggcctttggcaagagacagggcagagaattcatctggaacgacctgctgtccctggaaaccggcagcctgaagctggccaacggaagagtgatcgagaagacactgtacaacagaagaacccggcaggatgagcctgccctgttcgtggccctgaccttcgagcggcgggaggtcctggactcctccaatatcaaaccaatgaacctgatcggcgtggcaagaggcgaaaacatccccgccgtgatcgccctgaccgaccccgagggctgcccactgagccggtttaaggatagcctgggaaacccaacccacatcctgagaatcggcgagagctataaggagaagcagcggaccatccaggccaagaaggaggtggagcagcggagagccggcggctacagccggaagtacgccagcaaagccaagaatctggcagacgatatggtgagaaacaccgctagagatctgctgtactacgccgtgacccaggatgccatgctgatcttcgccaacctgagccggggcttcggccggcagggcaagcggaccttcatggccgagagacagtacacacggatggaggactggctgaccgccaagctggcctacgagggcctgagcaagacctacctgtccaagacactggcccagtacacctccaagacatgcagcaactgtgggtttaccatcaccagcgccgactacgacagggtgctggagaagctgaagaagacagcaacaggctggatgaccacaattaacggcaaggagctgaaggtggagggccagattacctactacaacagatacaagagacagaacgtagtcaaggacctgtccgtcgagctggatagactgagcgaagaatctgtgaacaacgacatctcctcctggacaaagggcagaagcggagaagctctgagcctcctgaagaaaagattctcccatagacccgtgcaggagaagttcgtgtgcctgaactgcggcttcgagacacacgcagccgagcaagccgccctgaacatcgccagatcctggctgttcctgcggagccaggagtacaagaaataccagacaaacaagacaaccggcaacaccgataagagagccttcgtcgagacctggcagtccttttaccggaagaagcttaaggaggtgtggaaacctgccgtgcggtctggcggatctggcggaggctcctgcccaggaggtggtgaccttcaaggacgtggccgtggacttcaccagggaggagtggtgcctgctgagccccccccagaaggagctgtacaaggaggtgatgctggagaacgcccagaacctgctgagcgtgggcctgcccggcccccccgaggacgtgatcagctacctgaagcagaggaaggacccctggatgctggagcaggagggcctgaggagctgctgccccgagggcgagatcaggggatctggctccggcagcggccccaagaaaaagagaaaagtctaagctgccttctgcggggcttgccttctggccatgcccttcttctctcccttgcacctgtacctcttggtctttgaataaagcctgagtaggaaggctagcaaaaaaaaaaaaaaaaaaaaaaaaaaaaaaaaaaaaaaaaaaaaaaaaaaaaaaaaaaaaaaaaaaaaaaaaaaaaaaaa

SEQ ID NO: 16226 - RNA, 9485 nt, synthetic construct
  source 1..9485: mol_type = other RNA
aggaaataagagagaaaagaagagtaagaagaaatataagagccaccatggcccctaagaagaagcgtaaagtgagccggatggaacgcctcgtctacgaggtgcggcagaagtgcagaaacatcgaggacatctgcatctcctgcggatctctgaacgtgaccctggagcacccactgttcatcggcggcatgtgccagaactgtaaaaactgttttctggagtgtgcctatcaatacgacgatgacggctaccagagctactgcaccatctgttgcggcggaagagaggtgctgatgtgtggaaataacaactgctgccggtgcttctgcgtggaatgcgtggacctgctggtgggccccggcgccgcccaggccgctattaaggaagatccttggaactgctacatgtgcggccacaagggcacatacggcctgctgagacggagagaggactggcctagcagactgcagatgttcttcgccaataaccacgaccaggagttcgacccccctaaggtgtaccctcccgtccccgccgagaagagaaagcccatccgggtcctgagcctgttcgatggcatcgccaccggtctgctggtgctgaaggacctgggcatccaggtggataggtacattgcctccgaggtgtgcgaggactccatcaccgtgggaatggtgcgtcatcagggcaagatcatgtacgtgggcgacgtgcggagcgtgacacagaagcatatccaggagtggggccctttcgacctggtgatcggcggcagcccttgcaatgacctgagcatcgtgaacccagcccggaagggcctgtacgagggaaccggcagactgttcttcgagttttacagactgctgcacgacgcccggcctaaggaaggcgacgaccggcccttcttttggctgttcgagaatgtggtggccatgggagtcagcgacaagcgggatattagccggttcctggagagcaaccccgtgatgatcgatgccaaggaagtgagcgccgcccaccgggccagatacttctggggcaatctgcctggcatgaacagacccctggccagcaccgtgaacgacaagctggagctgcaggagtgcctggagcacggccggatcgccaagttcagcaaggtgagaaccatcaccacccgaagcaacagcatcaaacaaggcaaggaccagcactttcctgtgttcatgaacgagaaggaggacatcctgtggtgtaccgagatggagagagtgttcgggttcccagtccactacacagatgtcagcaacatgtctagactggccagacagagactgctgggaagaagctggtccgtccctgtgatcagacacctgttcgcccctctgaaggagtacttcgcctgcgtgagcagcggcaacagcaacgccaacagccggggccccagcttctctagcggcctggtgccactgtccctgagagggagccacatgggccccatggagatctacaaaaccgtgagcgcctggaagcggcagcctgtgcgcgtgctgagcctgtttcggaatatcgataaagtcctgaaaagcctgggattcctggagagcggctctggctccggcggtggcaccctgaagtacgtggaggatgtgacaaacgtggtcagacgggatgtggagaagtggggccccttcgatctggtgtacggcagcacccaacccctgggcagctcttgtgaccggtgccctggctggtacatgtttcagttccaccggatcctgcagtacgccctgccgagacaggagtcccagcggccattcttttggattttcatggacaacttgctgctgaccgaggatgaccaggaaactaccactcggttcctgcagaccgaagccgtgaccctgcaggacgtgagaggccgggactaccagaacgccatgcgggtgtggtccaacatccctggactgaaaagcaagcacgcacctctgacccctaaagaagaggagtacctgcaggcccaggtgcggagcagaagcaagctggacgcccctaaggtggatctgctggtgaagaattgcctcctgcccctgagagagtacttcaagtatttcagccagaatagtctgcccctgggaggcagcggcggcggcgccctggtgacatttgaggacgtcgccgtgcggttcacccaggaggaatgggctctgctggatccttctcagaaaatcctgtaccgggacgtgatgagagagacataccggaatctgacctccgtgggcatcaactgggaatgttgggaccttgaagcctgcttcagaagcctgggaagaaacctgagagtgcaggtggtgaagagaaagtgcgagctgaccaacagcggcccctgcgccgagggcggcccaagcagcggcgcccctcctcccagcggcggcagcccagccggctccccaacctctaccgaggagggcacctctgagtccgccacccccgagagcggccctggcacctccaccgagcccagcgagggcagcgcacccggcagccctgccggcagccccacctccacagaggagggaaccagcaccgagcccagcgaaggcagcgccccaggcaccagcaccgagcctagtgagcaggagattaaacggatcaacaagatcagaagaagacttgtgaaagacagcaacaccaagaaggccggcaagacaggccccatgaaaaccctgctggttagagtgatgacacccgatctgagagagcggctggaaaacctgagaaagaagcctgaaaatatcccccagcccatcagcaatacatctagagccaacctgaataagctgctgaccgattacaccgaaatgaagaaggcgatcctgcatgtgtactgggaagagttccagaaggaccctgtgggcctgatgagccgggtggcccagcctgccagcaagaagatcgatcagaacaagctgaaacctgagatggacgagaagggcaacctgaccaccgccggctttgcctgctctcagtgtggccagcccctgttcgtgtacaagctggagcaggtgtctgagaagggcaaggcttacaccaactacttcggacggtgcaatgtggccgagcacgaaaagctgatcctgctggcccagctgaagcccgagaaggatagcgacgaagccgtgacatatagcctgggaaagtttgggcagagggccctggatttctacagcattcatgtgaccaaggagtccacccaccccgtgaagcccctggcccagatcgccggaaacagatacgcctccggacctgtgggaaaggccctgagcgacgcatgtatgggcacaatcgcctccttcctgtctaagtaccaggacatcatcatcgaacaccagaaggtggtgaagggcaaccagaagagactggagagcctgcgggagctggccggcaaggaaaacctggaataccctagcgtgaccctgccacctcagcctcacaccaaggagggcgttgatgcctacaacgaagtgatcgcccgggtgcgaatgtgggtgaacctgaacctgtggcagaagctgaagctaagcagagatgatgccaagcctctgctgagactgaagggattcccttcctttcctctggtcgagagacaggccaacgaagtggactggtgggacatggtgtgtaacgtgaagaagctgatcaacgagaaaaaggaggatggcaaggtgttttggcagaatctggctggctacaagagacaggaagccctgagaccatacctgagcagcgaggaagatcggaagaagggaaagaaattcgctcggtaccagctgggcgacctgctgctgcacctggaaaagaagcacggcgaggactggggaaaggtgtacgacgaggcctgggagcggattgacaagaaagtggaaggcctgagcaagcacatcaagctggaagaggaacggagaagcgaggacgcccagagcaaggccgccctgaccgactggctgcgggctaaggccagcttcgtgatcgagggcctgaaggaggccgacaaggacgagttctgcagatgcgagctgaagctgcagaagtggtacggggacctgcggggaaagcccttcgccatcgaagccgagaacagcatcctggacatcagcggcttcagcaagcagtacaactgtgccttcatctggcagaaggacggcgtgaagaagctgaacctgtacctgatcatcaactacttcaagggcggcaagctgcggttcaagaagatcaaacctgaagccttcgaagccaacagattctacaccgtgatcaacaaaaagagcggcgagatcgtgcccatggaggtgaacttcaacttcgacgaccccaacctgatcatcctgcctctggcctttggcaagagacagggcagagaattcatctggaacgacctgctgtccctggaaaccggcagcctgaagctggccaacggaagagtgatcgagaagacactgtacaacagaagaacccggcaggatgagcctgccctgttcgtggccctgaccttcgagcggcgggaggtcctggactcctccaatatcaaaccaatgaacctgatcggcgtggcaagaggcgaaaacatccccgccgtgatcgccctgaccgaccccgagggctgcccactgagccggtttaaggatagcctgggaaacccaacccacatcctgagaatcggcgagagctataaggagaagcagcggaccatccaggccaagaaggaggtggagcagcggagagccggcggctacagccggaagtacgccagcaaagccaagaatctggcagacgatatggtgagaaacaccgctagagatctgctgtactacgccgtgacccaggatgccatgctgatcttcgccaacctgagccggggcttcggccggcagggcaagcggaccttcatggccgagagacagtacacacggatggaggactggctgaccgccaagctggcctacgagggcctgagcaagacctacctgtccaagacactggcccagtacacctccaagacatgcagcaactgtgggtttaccatcaccagcgccgactacgacagggtgctggagaagctgaagaagacagcaacaggctggatgaccacaattaacggcaaggagctgaaggtggagggccagattacctactacaacagatacaagagacagaacgtagtcaaggacctgtccgtcgagctggatagactgagcgaagaatctgtgaacaacgacatctcctcctggacaaagggcagaagcggagaagctctgagcctcctgaagaaaagattctcccatagacccgtgcaggagaagttcgtgtgcctgaactgcggcttcgagacacacgcagccgagcaagccgccctgaacatcgccagatcctggctgttcctgcggagccaggagtacaagaaataccagacaaacaagacaaccggcaacaccgataagagagccttcgtcgagacctggcagtccttttaccggaagaagcttaaggaggtgtggaaacctgccgtgcggtctggcggatctggcggaggctccgccaaggcccccgtgaccttcggcgacctggccatctacttcagccaggaggagtgggagtggctgagccccatccagaaggacctgtacgaggacgtgatgctggagaactaccagaacctggtgagcctgggcctgagcttcaggaggcccaacgtgatcagcctgctggagaagggcaaggccccctggatggtggaccccgtgaagaggaggaggggcctggacctgggcagcaagtgcggcggcccaagcagcggcgcccctcctcccagcggcggcagcccagccggctccccaacctctaccgaggagggcacctctgagtccgccacccccgagagcggccctggcacctccaccgagcccagcgagggcagcgcacccggcagccctgccggcagccccacctccacagaggagggaaccagcaccgagcccagcgaaggcagcgccccaggcaccagcaccgagcctagtgagcaggagattaaacggatcaacaagatcagaagaagacttgtgaaagacagcaacaccaagaaggccggcaagacaggccccatgaaaaccctgctggttagagtgatgacacccgatctgagagagcggctggaaaacctgagaaagaagcctgaaaatatcccccagcccatcagcaatacatctagagccaacctgaataagctgctgaccgattacaccgaaatgaagaaggcgatcctgcatgtgtactgggaagagttccagaaggaccctgtgggcctgatgagccgggtggcccagcctgccagcaagaagatcgatcagaacaagctgaaacctgagatggacgagaagggcaacctgaccaccgccggctttgcctgctctcagtgtggccagcccctgttcgtgtacaagctggagcaggtgtctgagaagggcaaggcttacaccaactacttcggacggtgcaatgtggccgagcacgaaaagctgatcctgctggcccagctgaagcccgagaaggatagcgacgaagccgtgacatatagcctgggaaagtttgggcagagggccctggatttctacagcattcatgtgaccaaggagtccacccaccccgtgaagcccctggcccagatcgccggaaacagatacgcctccggacctgtgggaaaggccctgagcgacgcatgtatgggcacaatcgcctccttcctgtctaagtaccaggacatcatcatcgaacaccagaaggtggtgaagggcaaccagaagagactggagagcctgcgggagctggccggcaaggaaaacctggaataccctagcgtgaccctgccacctcagcctcacaccaaggagggcgttgatgcctacaacgaagtgatcgcccgggtgcgaatgtgggtgaacctgaacctgtggcagaagctgaagctaagcagagatgatgccaagcctctgctgagactgaagggattcccttcctttcctctggtcgagagacaggccaacgaagtggactggtgggacatggtgtgtaacgtgaagaagctgatcaacgagaaaaaggaggatggcaaggtgttttggcagaatctggctggctacaagagacaggaagccctgagaccatacctgagcagcgaggaagatcggaagaagggaaagaaattcgctcggtaccagctgggcgacctgctgctgcacctggaaaagaagcacggcgaggactggggaaaggtgtacgacgaggcctgggagcggattgacaagaaagtggaaggcctgagcaagcacatcaagctggaagaggaacggagaagcgaggacgcccagagcaaggccgccctgaccgactggctgcgggctaaggccagcttcgtgatcgagggcctgaaggaggccgacaaggacgagttctgcagatgcgagctgaagctgcagaagtggtacggggacctgcggggaaagcccttcgccatcgaagccgagaacagcatcctggacatcagcggcttcagcaagcagtacaactgtgccttcatctggcagaaggacggcgtgaagaagctgaacctgtacctgatcatcaactacttcaagggcggcaagctgcggttcaagaagatcaaacctgaagccttcgaagccaacagattctacaccgtgatcaacaaaaagagcggcgagatcgtgcccatggaggtgaacttcaacttcgacgaccccaacctgatcatcctgcctctggcctttggcaagagacagggcagagaattcatctggaacgacctgctgtccctggaaaccggcagcctgaagctggccaacggaagagtgatcgagaagacactgtacaacagaagaacccggcaggatgagcctgccctgttcgtggccctgaccttcgagcggcgggaggtcctggactcctccaatatcaaaccaatgaacctgatcggcgtggcaagaggcgaaaacatccccgccgtgatcgccctgaccgaccccgagggctgcccactgagccggtttaaggatagcctgggaaacccaacccacatcctgagaatcggcgagagctataaggagaagcagcggaccatccaggccaagaaggaggtggagcagcggagagccggcggctacagccggaagtacgccagcaaagccaagaatctggcagacgatatggtgagaaacaccgctagagatctgctgtactacgccgtgacccaggatgccatgctgatcttcgccaacctgagccggggcttcggccggcagggcaagcggaccttcatggccgagagacagtacacacggatggaggactggctgaccgccaagctggcctacgagggcctgagcaagacctacctgtccaagacactggcccagtacacctccaagacatgcagcaactgtgggtttaccatcaccagcgccgactacgacagggtgctggagaagctgaagaagacagcaacaggctggatgaccacaattaacggcaaggagctgaaggtggagggccagattacctactacaacagatacaagagacagaacgtagtcaaggacctgtccgtcgagctggatagactgagcgaagaatctgtgaacaacgacatctcctcctggacaaagggcagaagcggagaagctctgagcctcctgaagaaaagattctcccatagacccgtgcaggagaagttcgtgtgcctgaactgcggcttcgagacacacgcagccgagcaagccgccctgaacatcgccagatcctggctgttcctgcggagccaggagtacaagaaataccagacaaacaagacaaccggcaacaccgataagagagccttcgtcgagacctggcagtccttttaccggaagaagcttaaggaggtgtggaaacctgccgtgcggtctggcggatctggcggaggctcctgccaaggcccccgtgaccttcggcgacctggccatctacttcagccaggaggagtgggagtggctgagccccatccagaaggacctgtacgaggacgtgatgctggagaactaccagaacctggtgagcctgggcctgagcttcaggaggcccaacgtgatcagcctgctggagaagggcaaggccccctggatggtggaccccgtgaagaggaggaggggcctggacctgggcagcaagtgcggatctggctccggcagcggccccaagaaaaagagaaaagtctaagctgccttctgcggggcttgccttctggccatgcccttcttctctcccttgcacctgtacctcttggtctttgaataaagcctgagtaggaaggctagcaaaaaaaaaaaaaaaaaaaaaaaaaaaaaaaaaaaaaaaaaaaaaaaaaaaaaaaaaaaaaaaaaaaaaaaaaaaaaaaa

SEQ ID NO: 16227 - RNA, 9485 nt, synthetic construct
  source 1..9485: mol_type = other RNA
aggaaataagagagaaaagaagagtaagaagaaatataagagccaccatggcccctaagaagaagcgtaaagtgagccggatggaacgcctcgtctacgaggtgcggcagaagtgcagaaacatcgaggacatctgcatctcctgcggatctctgaacgtgaccctggagcacccactgttcatcggcggcatgtgccagaactgtaaaaactgttttctggagtgtgcctatcaatacgacgatgacggctaccagagctactgcaccatctgttgcggcggaagagaggtgctgatgtgtggaaataacaactgctgccggtgcttctgcgtggaatgcgtggacctgctggtgggccccggcgccgcccaggccgctattaaggaagatccttggaactgctacatgtgcggccacaagggcacatacggcctgctgagacggagagaggactggcctagcagactgcagatgttcttcgccaataaccacgaccaggagttcgacccccctaaggtgtaccctcccgtccccgccgagaagagaaagcccatccgggtcctgagcctgttcgatggcatcgccaccggtctgctggtgctgaaggacctgggcatccaggtggataggtacattgcctccgaggtgtgcgaggactccatcaccgtgggaatggtgcgtcatcagggcaagatcatgtacgtgggcgacgtgcggagcgtgacacagaagcatatccaggagtggggccctttcgacctggtgatcggcggcagcccttgcaatgacctgagcatcgtgaacccagcccggaagggcctgtacgagggaaccggcagactgttcttcgagttttacagactgctgcacgacgcccggcctaaggaaggcgacgaccggcccttcttttggctgttcgagaatgtggtggccatgggagtcagcgacaagcgggatattagccggttcctggagagcaaccccgtgatgatcgatgccaaggaagtgagcgccgcccaccgggccagatacttctggggcaatctgcctggcatgaacagacccctggccagcaccgtgaacgacaagctggagctgcaggagtgcctggagcacggccggatcgccaagttcagcaaggtgagaaccatcaccacccgaagcaacagcatcaaacaaggcaaggaccagcactttcctgtgttcatgaacgagaaggaggacatcctgtggtgtaccgagatggagagagtgttcgggttcccagtccactacacagatgtcagcaacatgtctagactggccagacagagactgctgggaagaagctggtccgtccctgtgatcagacacctgttcgcccctctgaaggagtacttcgcctgcgtgagcagcggcaacagcaacgccaacagccggggccccagcttctctagcggcctggtgccactgtccctgagagggagccacatgggccccatggagatctacaaaaccgtgagcgcctggaagcggcagcctgtgcgcgtgctgagcctgtttcggaatatcgataaagtcctgaaaagcctgggattcctggagagcggctctggctccggcggtggcaccctgaagtacgtggaggatgtgacaaacgtggtcagacgggatgtggagaagtggggccccttcgatctggtgtacggcagcacccaacccctgggcagctcttgtgaccggtgccctggctggtacatgtttcagttccaccggatcctgcagtacgccctgccgagacaggagtcccagcggccattcttttggattttcatggacaacttgctgctgaccgaggatgaccaggaaactaccactcggttcctgcagaccgaagccgtgaccctgcaggacgtgagaggccgggactaccagaacgccatgcgggtgtggtccaacatccctggactgaaaagcaagcacgcacctctgacccctaaagaagaggagtacctgcaggcccaggtgcggagcagaagcaagctggacgcccctaaggtggatctgctggtgaagaattgcctcctgcccctgagagagtacttcaagtatttcagccagaatagtctgcccctgggaggcagcggcggcggcgccctggtgacatttgaggacgtcgccgtgcggttcacccaggaggaatgggctctgctggatccttctcagaaaatcctgtaccgggacgtgatgagagagacataccggaatctgacctccgtgggcatcaactgggaatgttgggaccttgaagcctgcttcagaagcctgggaagaaacctgagagtgcaggtggtgaagagaaagtgcgagctgaccaacagcggcccctgcgccgagggcggcccaagcagcggcgcccctcctcccagcggcggcagcccagccggctccccaacctctaccgaggagggcacctctgagtccgccacccccgagagcggccctggcacctccaccgagcccagcgagggcagcgcacccggcagccctgccggcagccccacctccacagaggagggaaccagcaccgagcccagcgaaggcagcgccccaggcaccagcaccgagcctagtgagcaggagattaaacggatcaacaagatcagaagaagacttgtgaaagacagcaacaccaagaaggccggcaagacaggccccatgaaaaccctgctggttagagtgatgacacccgatctgagagagcggctggaaaacctgagaaagaagcctgaaaatatcccccagcccatcagcaatacatctagagccaacctgaataagctgctgaccgattacaccgaaatgaagaaggcgatcctgcatgtgtactgggaagagttccagaaggaccctgtgggcctgatgagccgggtggcccagcctgccagcaagaagatcgatcagaacaagctgaaacctgagatggacgagaagggcaacctgaccaccgccggctttgcctgctctcagtgtggccagcccctgttcgtgtacaagctggagcaggtgtctgagaagggcaaggcttacaccaactacttcggacggtgcaatgtggccgagcacgaaaagctgatcctgctggcccagctgaagcccgagaaggatagcgacgaagccgtgacatatagcctgggaaagtttgggcagagggccctggatttctacagcattcatgtgaccaaggagtccacccaccccgtgaagcccctggcccagatcgccggaaacagatacgcctccggacctgtgggaaaggccctgagcgacgcatgtatgggcacaatcgcctccttcctgtctaagtaccaggacatcatcatcgaacaccagaaggtggtgaagggcaaccagaagagactggagagcctgcgggagctggccggcaaggaaaacctggaataccctagcgtgaccctgccacctcagcctcacaccaaggagggcgttgatgcctacaacgaagtgatcgcccgggtgcgaatgtgggtgaacctgaacctgtggcagaagctgaagctaagcagagatgatgccaagcctctgctgagactgaagggattcccttcctttcctctggtcgagagacaggccaacgaagtggactggtgggacatggtgtgtaacgtgaagaagctgatcaacgagaaaaaggaggatggcaaggtgttttggcagaatctggctggctacaagagacaggaagccctgagaccatacctgagcagcgaggaagatcggaagaagggaaagaaattcgctcggtaccagctgggcgacctgctgctgcacctggaaaagaagcacggcgaggactggggaaaggtgtacgacgaggcctgggagcggattgacaagaaagtggaaggcctgagcaagcacatcaagctggaagaggaacggagaagcgaggacgcccagagcaaggccgccctgaccgactggctgcgggctaaggccagcttcgtgatcgagggcctgaaggaggccgacaaggacgagttctgcagatgcgagctgaagctgcagaagtggtacggggacctgcggggaaagcccttcgccatcgaagccgagaacagcatcctggacatcagcggcttcagcaagcagtacaactgtgccttcatctggcagaaggacggcgtgaagaagctgaacctgtacctgatcatcaactacttcaagggcggcaagctgcggttcaagaagatcaaacctgaagccttcgaagccaacagattctacaccgtgatcaacaaaaagagcggcgagatcgtgcccatggaggtgaacttcaacttcgacgaccccaacctgatcatcctgcctctggcctttggcaagagacagggcagagaattcatctggaacgacctgctgtccctggaaaccggcagcctgaagctggccaacggaagagtgatcgagaagacactgtacaacagaagaacccggcaggatgagcctgccctgttcgtggccctgaccttcgagcggcgggaggtcctggactcctccaatatcaaaccaatgaacctgatcggcgtggcaagaggcgaaaacatccccgccgtgatcgccctgaccgaccccgagggctgcccactgagccggtttaaggatagcctgggaaacccaacccacatcctgagaatcggcgagagctataaggagaagcagcggaccatccaggccaagaaggaggtggagcagcggagagccggcggctacagccggaagtacgccagcaaagccaagaatctggcagacgatatggtgagaaacaccgctagagatctgctgtactacgccgtgacccaggatgccatgctgatcttcgccaacctgagccggggcttcggccggcagggcaagcggaccttcatggccgagagacagtacacacggatggaggactggctgaccgccaagctggcctacgagggcctgagcaagacctacctgtccaagacactggcccagtacacctccaagacatgcagcaactgtgggtttaccatcaccagcgccgactacgacagggtgctggagaagctgaagaagacagcaacaggctggatgaccacaattaacggcaaggagctgaaggtggagggccagattacctactacaacagatacaagagacagaacgtagtcaaggacctgtccgtcgagctggatagactgagcgaagaatctgtgaacaacgacatctcctcctggacaaagggcagaagcggagaagctctgagcctcctgaagaaaagattctcccatagacccgtgcaggagaagttcgtgtgcctgaactgcggcttcgagacacacgcagccgagcaagccgccctgaacatcgccagatcctggctgttcctgcggagccaggagtacaagaaataccagacaaacaagacaaccggcaacaccgataagagagccttcgtcgagacctggcagtccttttaccggaagaagcttaaggaggtgtggaaacctgccgtgcggtctggcggatctggcggaggctccatggccttcagggacgtggccgtggacttcacccaggacgagtggaggctgctgagccccgcccagaggaccctgtacagggaggtgatgctggagaactacagcaacctggtgagcctgggcatcagcttcagcaagcccgagatcatcacccagctggagcagggcaaggagacctggagggaggagaagaagtgcccccccgccacctgccccgccgaccccgagcccgagctgtgcctgggcggcccaagcagcggcgcccctcctcccagcggcggcagcccagccggctccccaacctctaccgaggagggcacctctgagtccgccacccccgagagcggccctggcacctccaccgagcccagcgagggcagcgcacccggcagccctgccggcagccccacctccacagaggagggaaccagcaccgagcccagcgaaggcagcgccccaggcaccagcaccgagcctagtgagcaggagattaaacggatcaacaagatcagaagaagacttgtgaaagacagcaacaccaagaaggccggcaagacaggccccatgaaaaccctgctggttagagtgatgacacccgatctgagagagcggctggaaaacctgagaaagaagcctgaaaatatcccccagcccatcagcaatacatctagagccaacctgaataagctgctgaccgattacaccgaaatgaagaaggcgatcctgcatgtgtactgggaagagttccagaaggaccctgtgggcctgatgagccgggtggcccagcctgccagcaagaagatcgatcagaacaagctgaaacctgagatggacgagaagggcaacctgaccaccgccggctttgcctgctctcagtgtggccagcccctgttcgtgtacaagctggagcaggtgtctgagaagggcaaggcttacaccaactacttcggacggtgcaatgtggccgagcacgaaaagctgatcctgctggcccagctgaagcccgagaaggatagcgacgaagccgtgacatatagcctgggaaagtttgggcagagggccctggatttctacagcattcatgtgaccaaggagtccacccaccccgtgaagcccctggcccagatcgccggaaacagatacgcctccggacctgtgggaaaggccctgagcgacgcatgtatgggcacaatcgcctccttcctgtctaagtaccaggacatcatcatcgaacaccagaaggtggtgaagggcaaccagaagagactggagagcctgcgggagctggccggcaaggaaaacctggaataccctagcgtgaccctgccacctcagcctcacaccaaggagggcgttgatgcctacaacgaagtgatcgcccgggtgcgaatgtgggtgaacctgaacctgtggcagaagctgaagctaagcagagatgatgccaagcctctgctgagactgaagggattcccttcctttcctctggtcgagagacaggccaacgaagtggactggtgggacatggtgtgtaacgtgaagaagctgatcaacgagaaaaaggaggatggcaaggtgttttggcagaatctggctggctacaagagacaggaagccctgagaccatacctgagcagcgaggaagatcggaagaagggaaagaaattcgctcggtaccagctgggcgacctgctgctgcacctggaaaagaagcacggcgaggactggggaaaggtgtacgacgaggcctgggagcggattgacaagaaagtggaaggcctgagcaagcacatcaagctggaagaggaacggagaagcgaggacgcccagagcaaggccgccctgaccgactggctgcgggctaaggccagcttcgtgatcgagggcctgaaggaggccgacaaggacgagttctgcagatgcgagctgaagctgcagaagtggtacggggacctgcggggaaagcccttcgccatcgaagccgagaacagcatcctggacatcagcggcttcagcaagcagtacaactgtgccttcatctggcagaaggacggcgtgaagaagctgaacctgtacctgatcatcaactacttcaagggcggcaagctgcggttcaagaagatcaaacctgaagccttcgaagccaacagattctacaccgtgatcaacaaaaagagcggcgagatcgtgcccatggaggtgaacttcaacttcgacgaccccaacctgatcatcctgcctctggcctttggcaagagacagggcagagaattcatctggaacgacctgctgtccctggaaaccggcagcctgaagctggccaacggaagagtgatcgagaagacactgtacaacagaagaacccggcaggatgagcctgccctgttcgtggccctgaccttcgagcggcgggaggtcctggactcctccaatatcaaaccaatgaacctgatcggcgtggcaagaggcgaaaacatccccgccgtgatcgccctgaccgaccccgagggctgcccactgagccggtttaaggatagcctgggaaacccaacccacatcctgagaatcggcgagagctataaggagaagcagcggaccatccaggccaagaaggaggtggagcagcggagagccggcggctacagccggaagtacgccagcaaagccaagaatctggcagacgatatggtgagaaacaccgctagagatctgctgtactacgccgtgacccaggatgccatgctgatcttcgccaacctgagccggggcttcggccggcagggcaagcggaccttcatggccgagagacagtacacacggatggaggactggctgaccgccaagctggcctacgagggcctgagcaagacctacctgtccaagacactggcccagtacacctccaagacatgcagcaactgtgggtttaccatcaccagcgccgactacgacagggtgctggagaagctgaagaagacagcaacaggctggatgaccacaattaacggcaaggagctgaaggtggagggccagattacctactacaacagatacaagagacagaacgtagtcaaggacctgtccgtcgagctggatagactgagcgaagaatctgtgaacaacgacatctcctcctggacaaagggcagaagcggagaagctctgagcctcctgaagaaaagattctcccatagacccgtgcaggagaagttcgtgtgcctgaactgcggcttcgagacacacgcagccgagcaagccgccctgaacatcgccagatcctggctgttcctgcggagccaggagtacaagaaataccagacaaacaagacaaccggcaacaccgataagagagccttcgtcgagacctggcagtccttttaccggaagaagcttaaggaggtgtggaaacctgccgtgcggtctggcggatctggcggaggctcctatggccttcagggacgtggccgtggacttcacccaggacgagtggaggctgctgagccccgcccagaggaccctgtacagggaggtgatgctggagaactacagcaacctggtgagcctgggcatcagcttcagcaagcccgagatcatcacccagctggagcagggcaaggagacctggagggaggagaagaagtgcccccccgccacctgccccgccgaccccgagcccgagctgtgcctgggatctggctccggcagcggccccaagaaaaagagaaaagtctaagctgccttctgcggggcttgccttctggccatgcccttcttctctcccttgcacctgtacctcttggtctttgaataaagcctgagtaggaaggctagcaaaaaaaaaaaaaaaaaaaaaaaaaaaaaaaaaaaaaaaaaaaaaaaaaaaaaaaaaaaaaaaaaaaaaaaaaaaaaaaa

SEQ ID NO: 16228 - RNA, 9485 nt, synthetic construct
  source 1..9485: mol_type = other RNA
aggaaataagagagaaaagaagagtaagaagaaatataagagccaccatggcccctaagaagaagcgtaaagtgagccggatggaacgcctcgtctacgaggtgcggcagaagtgcagaaacatcgaggacatctgcatctcctgcggatctctgaacgtgaccctggagcacccactgttcatcggcggcatgtgccagaactgtaaaaactgttttctggagtgtgcctatcaatacgacgatgacggctaccagagctactgcaccatctgttgcggcggaagagaggtgctgatgtgtggaaataacaactgctgccggtgcttctgcgtggaatgcgtggacctgctggtgggccccggcgccgcccaggccgctattaaggaagatccttggaactgctacatgtgcggccacaagggcacatacggcctgctgagacggagagaggactggcctagcagactgcagatgttcttcgccaataaccacgaccaggagttcgacccccctaaggtgtaccctcccgtccccgccgagaagagaaagcccatccgggtcctgagcctgttcgatggcatcgccaccggtctgctggtgctgaaggacctgggcatccaggtggataggtacattgcctccgaggtgtgcgaggactccatcaccgtgggaatggtgcgtcatcagggcaagatcatgtacgtgggcgacgtgcggagcgtgacacagaagcatatccaggagtggggccctttcgacctggtgatcggcggcagcccttgcaatgacctgagcatcgtgaacccagcccggaagggcctgtacgagggaaccggcagactgttcttcgagttttacagactgctgcacgacgcccggcctaaggaaggcgacgaccggcccttcttttggctgttcgagaatgtggtggccatgggagtcagcgacaagcgggatattagccggttcctggagagcaaccccgtgatgatcgatgccaaggaagtgagcgccgcccaccgggccagatacttctggggcaatctgcctggcatgaacagacccctggccagcaccgtgaacgacaagctggagctgcaggagtgcctggagcacggccggatcgccaagttcagcaaggtgagaaccatcaccacccgaagcaacagcatcaaacaaggcaaggaccagcactttcctgtgttcatgaacgagaaggaggacatcctgtggtgtaccgagatggagagagtgttcgggttcccagtccactacacagatgtcagcaacatgtctagactggccagacagagactgctgggaagaagctggtccgtccctgtgatcagacacctgttcgcccctctgaaggagtacttcgcctgcgtgagcagcggcaacagcaacgccaacagccggggccccagcttctctagcggcctggtgccactgtccctgagagggagccacatgggccccatggagatctacaaaaccgtgagcgcctggaagcggcagcctgtgcgcgtgctgagcctgtttcggaatatcgataaagtcctgaaaagcctgggattcctggagagcggctctggctccggcggtggcaccctgaagtacgtggaggatgtgacaaacgtggtcagacgggatgtggagaagtggggccccttcgatctggtgtacggcagcacccaacccctgggcagctcttgtgaccggtgccctggctggtacatgtttcagttccaccggatcctgcagtacgccctgccgagacaggagtcccagcggccattcttttggattttcatggacaacttgctgctgaccgaggatgaccaggaaactaccactcggttcctgcagaccgaagccgtgaccctgcaggacgtgagaggccgggactaccagaacgccatgcgggtgtggtccaacatccctggactgaaaagcaagcacgcacctctgacccctaaagaagaggagtacctgcaggcccaggtgcggagcagaagcaagctggacgcccctaaggtggatctgctggtgaagaattgcctcctgcccctgagagagtacttcaagtatttcagccagaatagtctgcccctgggaggcagcggcggcggcgccctggtgacatttgaggacgtcgccgtgcggttcacccaggaggaatgggctctgctggatccttctcagaaaatcctgtaccgggacgtgatgagagagacataccggaatctgacctccgtgggcatcaactgggaatgttgggaccttgaagcctgcttcagaagcctgggaagaaacctgagagtgcaggtggtgaagagaaagtgcgagctgaccaacagcggcccctgcgccgagggcggcccaagcagcggcgcccctcctcccagcggcggcagcccagccggctccccaacctctaccgaggagggcacctctgagtccgccacccccgagagcggccctggcacctccaccgagcccagcgagggcagcgcacccggcagccctgccggcagccccacctccacagaggagggaaccagcaccgagcccagcgaaggcagcgccccaggcaccagcaccgagcctagtgagcaggagattaaacggatcaacaagatcagaagaagacttgtgaaagacagcaacaccaagaaggccggcaagacaggccccatgaaaaccctgctggttagagtgatgacacccgatctgagagagcggctggaaaacctgagaaagaagcctgaaaatatcccccagcccatcagcaatacatctagagccaacctgaataagctgctgaccgattacaccgaaatgaagaaggcgatcctgcatgtgtactgggaagagttccagaaggaccctgtgggcctgatgagccgggtggcccagcctgccagcaagaagatcgatcagaacaagctgaaacctgagatggacgagaagggcaacctgaccaccgccggctttgcctgctctcagtgtggccagcccctgttcgtgtacaagctggagcaggtgtctgagaagggcaaggcttacaccaactacttcggacggtgcaatgtggccgagcacgaaaagctgatcctgctggcccagctgaagcccgagaaggatagcgacgaagccgtgacatatagcctgggaaagtttgggcagagggccctggatttctacagcattcatgtgaccaaggagtccacccaccccgtgaagcccctggcccagatcgccggaaacagatacgcctccggacctgtgggaaaggccctgagcgacgcatgtatgggcacaatcgcctccttcctgtctaagtaccaggacatcatcatcgaacaccagaaggtggtgaagggcaaccagaagagactggagagcctgcgggagctggccggcaaggaaaacctggaataccctagcgtgaccctgccacctcagcctcacaccaaggagggcgttgatgcctacaacgaagtgatcgcccgggtgcgaatgtgggtgaacctgaacctgtggcagaagctgaagctaagcagagatgatgccaagcctctgctgagactgaagggattcccttcctttcctctggtcgagagacaggccaacgaagtggactggtgggacatggtgtgtaacgtgaagaagctgatcaacgagaaaaaggaggatggcaaggtgttttggcagaatctggctggctacaagagacaggaagccctgagaccatacctgagcagcgaggaagatcggaagaagggaaagaaattcgctcggtaccagctgggcgacctgctgctgcacctggaaaagaagcacggcgaggactggggaaaggtgtacgacgaggcctgggagcggattgacaagaaagtggaaggcctgagcaagcacatcaagctggaagaggaacggagaagcgaggacgcccagagcaaggccgccctgaccgactggctgcgggctaaggccagcttcgtgatcgagggcctgaaggaggccgacaaggacgagttctgcagatgcgagctgaagctgcagaagtggtacggggacctgcggggaaagcccttcgccatcgaagccgagaacagcatcctggacatcagcggcttcagcaagcagtacaactgtgccttcatctggcagaaggacggcgtgaagaagctgaacctgtacctgatcatcaactacttcaagggcggcaagctgcggttcaagaagatcaaacctgaagccttcgaagccaacagattctacaccgtgatcaacaaaaagagcggcgagatcgtgcccatggaggtgaacttcaacttcgacgaccccaacctgatcatcctgcctctggcctttggcaagagacagggcagagaattcatctggaacgacctgctgtccctggaaaccggcagcctgaagctggccaacggaagagtgatcgagaagacactgtacaacagaagaacccggcaggatgagcctgccctgttcgtggccctgaccttcgagcggcgggaggtcctggactcctccaatatcaaaccaatgaacctgatcggcgtggcaagaggcgaaaacatccccgccgtgatcgccctgaccgaccccgagggctgcccactgagccggtttaaggatagcctgggaaacccaacccacatcctgagaatcggcgagagctataaggagaagcagcggaccatccaggccaagaaggaggtggagcagcggagagccggcggctacagccggaagtacgccagcaaagccaagaatctggcagacgatatggtgagaaacaccgctagagatctgctgtactacgccgtgacccaggatgccatgctgatcttcgccaacctgagccggggcttcggccggcagggcaagcggaccttcatggccgagagacagtacacacggatggaggactggctgaccgccaagctggcctacgagggcctgagcaagacctacctgtccaagacactggcccagtacacctccaagacatgcagcaactgtgggtttaccatcaccagcgccgactacgacagggtgctggagaagctgaagaagacagcaacaggctggatgaccacaattaacggcaaggagctgaaggtggagggccagattacctactacaacagatacaagagacagaacgtagtcaaggacctgtccgtcgagctggatagactgagcgaagaatctgtgaacaacgacatctcctcctggacaaagggcagaagcggagaagctctgagcctcctgaagaaaagattctcccatagacccgtgcaggagaagttcgtgtgcctgaactgcggcttcgagacacacgcagccgagcaagccgccctgaacatcgccagatcctggctgttcctgcggagccaggagtacaagaaataccagacaaacaagacaaccggcaacaccgataagagagccttcgtcgagacctggcagtccttttaccggaagaagcttaaggaggtgtggaaacctgccgtgcggtctggcggatctggcggaggctccttctgggagagcgtgaccttccaggacgtggccgtggacttcacctgggaggagtggggccacctgggccccgcccagaaggagctgtacagggaggtgatgctggagaactacaggaacctggtgtgcctgggcctggccgtgagcaagcccgacgtgatctgccagctggagcagggcggcgccccctggtggcccgagggcggcgtgcccggcagcagctgcgccgtgtgggacaccaggggcggcccaagcagcggcgcccctcctcccagcggcggcagcccagccggctccccaacctctaccgaggagggcacctctgagtccgccacccccgagagcggccctggcacctccaccgagcccagcgagggcagcgcacccggcagccctgccggcagccccacctccacagaggagggaaccagcaccgagcccagcgaaggcagcgccccaggcaccagcaccgagcctagtgagcaggagattaaacggatcaacaagatcagaagaagacttgtgaaagacagcaacaccaagaaggccggcaagacaggccccatgaaaaccctgctggttagagtgatgacacccgatctgagagagcggctggaaaacctgagaaagaagcctgaaaatatcccccagcccatcagcaatacatctagagccaacctgaataagctgctgaccgattacaccgaaatgaagaaggcgatcctgcatgtgtactgggaagagttccagaaggaccctgtgggcctgatgagccgggtggcccagcctgccagcaagaagatcgatcagaacaagctgaaacctgagatggacgagaagggcaacctgaccaccgccggctttgcctgctctcagtgtggccagcccctgttcgtgtacaagctggagcaggtgtctgagaagggcaaggcttacaccaactacttcggacggtgcaatgtggccgagcacgaaaagctgatcctgctggcccagctgaagcccgagaaggatagcgacgaagccgtgacatatagcctgggaaagtttgggcagagggccctggatttctacagcattcatgtgaccaaggagtccacccaccccgtgaagcccctggcccagatcgccggaaacagatacgcctccggacctgtgggaaaggccctgagcgacgcatgtatgggcacaatcgcctccttcctgtctaagtaccaggacatcatcatcgaacaccagaaggtggtgaagggcaaccagaagagactggagagcctgcgggagctggccggcaaggaaaacctggaataccctagcgtgaccctgccacctcagcctcacaccaaggagggcgttgatgcctacaacgaagtgatcgcccgggtgcgaatgtgggtgaacctgaacctgtggcagaagctgaagctaagcagagatgatgccaagcctctgctgagactgaagggattcccttcctttcctctggtcgagagacaggccaacgaagtggactggtgggacatggtgtgtaacgtgaagaagctgatcaacgagaaaaaggaggatggcaaggtgttttggcagaatctggctggctacaagagacaggaagccctgagaccatacctgagcagcgaggaagatcggaagaagggaaagaaattcgctcggtaccagctgggcgacctgctgctgcacctggaaaagaagcacggcgaggactggggaaaggtgtacgacgaggcctgggagcggattgacaagaaagtggaaggcctgagcaagcacatcaagctggaagaggaacggagaagcgaggacgcccagagcaaggccgccctgaccgactggctgcgggctaaggccagcttcgtgatcgagggcctgaaggaggccgacaaggacgagttctgcagatgcgagctgaagctgcagaagtggtacggggacctgcggggaaagcccttcgccatcgaagccgagaacagcatcctggacatcagcggcttcagcaagcagtacaactgtgccttcatctggcagaaggacggcgtgaagaagctgaacctgtacctgatcatcaactacttcaagggcggcaagctgcggttcaagaagatcaaacctgaagccttcgaagccaacagattctacaccgtgatcaacaaaaagagcggcgagatcgtgcccatggaggtgaacttcaacttcgacgaccccaacctgatcatcctgcctctggcctttggcaagagacagggcagagaattcatctggaacgacctgctgtccctggaaaccggcagcctgaagctggccaacggaagagtgatcgagaagacactgtacaacagaagaacccggcaggatgagcctgccctgttcgtggccctgaccttcgagcggcgggaggtcctggactcctccaatatcaaaccaatgaacctgatcggcgtggcaagaggcgaaaacatccccgccgtgatcgccctgaccgaccccgagggctgcccactgagccggtttaaggatagcctgggaaacccaacccacatcctgagaatcggcgagagctataaggagaagcagcggaccatccaggccaagaaggaggtggagcagcggagagccggcggctacagccggaagtacgccagcaaagccaagaatctggcagacgatatggtgagaaacaccgctagagatctgctgtactacgccgtgacccaggatgccatgctgatcttcgccaacctgagccggggcttcggccggcagggcaagcggaccttcatggccgagagacagtacacacggatggaggactggctgaccgccaagctggcctacgagggcctgagcaagacctacctgtccaagacactggcccagtacacctccaagacatgcagcaactgtgggtttaccatcaccagcgccgactacgacagggtgctggagaagctgaagaagacagcaacaggctggatgaccacaattaacggcaaggagctgaaggtggagggccagattacctactacaacagatacaagagacagaacgtagtcaaggacctgtccgtcgagctggatagactgagcgaagaatctgtgaacaacgacatctcctcctggacaaagggcagaagcggagaagctctgagcctcctgaagaaaagattctcccatagacccgtgcaggagaagttcgtgtgcctgaactgcggcttcgagacacacgcagccgagcaagccgccctgaacatcgccagatcctggctgttcctgcggagccaggagtacaagaaataccagacaaacaagacaaccggcaacaccgataagagagccttcgtcgagacctggcagtccttttaccggaagaagcttaaggaggtgtggaaacctgccgtgcggtctggcggatctggcggaggctcctttctgggagagcgtgaccttccaggacgtggccgtggacttcacctgggaggagtggggccacctgggccccgcccagaaggagctgtacagggaggtgatgctggagaactacaggaacctggtgtgcctgggcctggccgtgagcaagcccgacgtgatctgccagctggagcagggcggcgccccctggtggcccgagggcggcgtgcccggcagcagctgcgccgtgtgggacaccaggggatctggctccggcagcggccccaagaaaaagagaaaagtctaagctgccttctgcggggcttgccttctggccatgcccttcttctctcccttgcacctgtacctcttggtctttgaataaagcctgagtaggaaggctagcaaaaaaaaaaaaaaaaaaaaaaaaaaaaaaaaaaaaaaaaaaaaaaaaaaaaaaaaaaaaaaaaaaaaaaaaaaaaaaaa

SEQ ID NO: 16229 - RNA, 9485 nt, synthetic construct
  source 1..9485: mol_type = other RNA
aggaaataagagagaaaagaagagtaagaagaaatataagagccaccatggcccctaagaagaagcgtaaagtgagccggatggaacgcctcgtctacgaggtgcggcagaagtgcagaaacatcgaggacatctgcatctcctgcggatctctgaacgtgaccctggagcacccactgttcatcggcggcatgtgccagaactgtaaaaactgttttctggagtgtgcctatcaatacgacgatgacggctaccagagctactgcaccatctgttgcggcggaagagaggtgctgatgtgtggaaataacaactgctgccggtgcttctgcgtggaatgcgtggacctgctggtgggccccggcgccgcccaggccgctattaaggaagatccttggaactgctacatgtgcggccacaagggcacatacggcctgctgagacggagagaggactggcctagcagactgcagatgttcttcgccaataaccacgaccaggagttcgacccccctaaggtgtaccctcccgtccccgccgagaagagaaagcccatccgggtcctgagcctgttcgatggcatcgccaccggtctgctggtgctgaaggacctgggcatccaggtggataggtacattgcctccgaggtgtgcgaggactccatcaccgtgggaatggtgcgtcatcagggcaagatcatgtacgtgggcgacgtgcggagcgtgacacagaagcatatccaggagtggggccctttcgacctggtgatcggcggcagcccttgcaatgacctgagcatcgtgaacccagcccggaagggcctgtacgagggaaccggcagactgttcttcgagttttacagactgctgcacgacgcccggcctaaggaaggcgacgaccggcccttcttttggctgttcgagaatgtggtggccatgggagtcagcgacaagcgggatattagccggttcctggagagcaaccccgtgatgatcgatgccaaggaagtgagcgccgcccaccgggccagatacttctggggcaatctgcctggcatgaacagacccctggccagcaccgtgaacgacaagctggagctgcaggagtgcctggagcacggccggatcgccaagttcagcaaggtgagaaccatcaccacccgaagcaacagcatcaaacaaggcaaggaccagcactttcctgtgttcatgaacgagaaggaggacatcctgtggtgtaccgagatggagagagtgttcgggttcccagtccactacacagatgtcagcaacatgtctagactggccagacagagactgctgggaagaagctggtccgtccctgtgatcagacacctgttcgcccctctgaaggagtacttcgcctgcgtgagcagcggcaacagcaacgccaacagccggggccccagcttctctagcggcctggtgccactgtccctgagagggagccacatgggccccatggagatctacaaaaccgtgagcgcctggaagcggcagcctgtgcgcgtgctgagcctgtttcggaatatcgataaagtcctgaaaagcctgggattcctggagagcggctctggctccggcggtggcaccctgaagtacgtggaggatgtgacaaacgtggtcagacgggatgtggagaagtggggccccttcgatctggtgtacggcagcacccaacccctgggcagctcttgtgaccggtgccctggctggtacatgtttcagttccaccggatcctgcagtacgccctgccgagacaggagtcccagcggccattcttttggattttcatggacaacttgctgctgaccgaggatgaccaggaaactaccactcggttcctgcagaccgaagccgtgaccctgcaggacgtgagaggccgggactaccagaacgccatgcgggtgtggtccaacatccctggactgaaaagcaagcacgcacctctgacccctaaagaagaggagtacctgcaggcccaggtgcggagcagaagcaagctggacgcccctaaggtggatctgctggtgaagaattgcctcctgcccctgagagagtacttcaagtatttcagccagaatagtctgcccctgggaggcagcggcggcggcgccctggtgacatttgaggacgtcgccgtgcggttcacccaggaggaatgggctctgctggatccttctcagaaaatcctgtaccgggacgtgatgagagagacataccggaatctgacctccgtgggcatcaactgggaatgttgggaccttgaagcctgcttcagaagcctgggaagaaacctgagagtgcaggtggtgaagagaaagtgcgagctgaccaacagcggcccctgcgccgagggcggcccaagcagcggcgcccctcctcccagcggcggcagcccagccggctccccaacctctaccgaggagggcacctctgagtccgccacccccgagagcggccctggcacctccaccgagcccagcgagggcagcgcacccggcagccctgccggcagccccacctccacagaggagggaaccagcaccgagcccagcgaaggcagcgccccaggcaccagcaccgagcctagtgagcaggagattaaacggatcaacaagatcagaagaagacttgtgaaagacagcaacaccaagaaggccggcaagacaggccccatgaaaaccctgctggttagagtgatgacacccgatctgagagagcggctggaaaacctgagaaagaagcctgaaaatatcccccagcccatcagcaatacatctagagccaacctgaataagctgctgaccgattacaccgaaatgaagaaggcgatcctgcatgtgtactgggaagagttccagaaggaccctgtgggcctgatgagccgggtggcccagcctgccagcaagaagatcgatcagaacaagctgaaacctgagatggacgagaagggcaacctgaccaccgccggctttgcctgctctcagtgtggccagcccctgttcgtgtacaagctggagcaggtgtctgagaagggcaaggcttacaccaactacttcggacggtgcaatgtggccgagcacgaaaagctgatcctgctggcccagctgaagcccgagaaggatagcgacgaagccgtgacatatagcctgggaaagtttgggcagagggccctggatttctacagcattcatgtgaccaaggagtccacccaccccgtgaagcccctggcccagatcgccggaaacagatacgcctccggacctgtgggaaaggccctgagcgacgcatgtatgggcacaatcgcctccttcctgtctaagtaccaggacatcatcatcgaacaccagaaggtggtgaagggcaaccagaagagactggagagcctgcgggagctggccggcaaggaaaacctggaataccctagcgtgaccctgccacctcagcctcacaccaaggagggcgttgatgcctacaacgaagtgatcgcccgggtgcgaatgtgggtgaacctgaacctgtggcagaagctgaagctaagcagagatgatgccaagcctctgctgagactgaagggattcccttcctttcctctggtcgagagacaggccaacgaagtggactggtgggacatggtgtgtaacgtgaagaagctgatcaacgagaaaaaggaggatggcaaggtgttttggcagaatctggctggctacaagagacaggaagccctgagaccatacctgagcagcgaggaagatcggaagaagggaaagaaattcgctcggtaccagctgggcgacctgctgctgcacctggaaaagaagcacggcgaggactggggaaaggtgtacgacgaggcctgggagcggattgacaagaaagtggaaggcctgagcaagcacatcaagctggaagaggaacggagaagcgaggacgcccagagcaaggccgccctgaccgactggctgcgggctaaggccagcttcgtgatcgagggcctgaaggaggccgacaaggacgagttctgcagatgcgagctgaagctgcagaagtggtacggggacctgcggggaaagcccttcgccatcgaagccgagaacagcatcctggacatcagcggcttcagcaagcagtacaactgtgccttcatctggcagaaggacggcgtgaagaagctgaacctgtacctgatcatcaactacttcaagggcggcaagctgcggttcaagaagatcaaacctgaagccttcgaagccaacagattctacaccgtgatcaacaaaaagagcggcgagatcgtgcccatggaggtgaacttcaacttcgacgaccccaacctgatcatcctgcctctggcctttggcaagagacagggcagagaattcatctggaacgacctgctgtccctggaaaccggcagcctgaagctggccaacggaagagtgatcgagaagacactgtacaacagaagaacccggcaggatgagcctgccctgttcgtggccctgaccttcgagcggcgggaggtcctggactcctccaatatcaaaccaatgaacctgatcggcgtggcaagaggcgaaaacatccccgccgtgatcgccctgaccgaccccgagggctgcccactgagccggtttaaggatagcctgggaaacccaacccacatcctgagaatcggcgagagctataaggagaagcagcggaccatccaggccaagaaggaggtggagcagcggagagccggcggctacagccggaagtacgccagcaaagccaagaatctggcagacgatatggtgagaaacaccgctagagatctgctgtactacgccgtgacccaggatgccatgctgatcttcgccaacctgagccggggcttcggccggcagggcaagcggaccttcatggccgagagacagtacacacggatggaggactggctgaccgccaagctggcctacgagggcctgagcaagacctacctgtccaagacactggcccagtacacctccaagacatgcagcaactgtgggtttaccatcaccagcgccgactacgacagggtgctggagaagctgaagaagacagcaacaggctggatgaccacaattaacggcaaggagctgaaggtggagggccagattacctactacaacagatacaagagacagaacgtagtcaaggacctgtccgtcgagctggatagactgagcgaagaatctgtgaacaacgacatctcctcctggacaaagggcagaagcggagaagctctgagcctcctgaagaaaagattctcccatagacccgtgcaggagaagttcgtgtgcctgaactgcggcttcgagacacacgcagccgagcaagccgccctgaacatcgccagatcctggctgttcctgcggagccaggagtacaagaaataccagacaaacaagacaaccggcaacaccgataagagagccttcgtcgagacctggcagtccttttaccggaagaagcttaaggaggtgtggaaacctgccgtgcggtctggcggatctggcggaggctccagccaggtgagcgtgaccttcgaggacgtggccgtgctgttcaccagggacgagtggaggaagctgggccccagccagaggaacgtgtaccaggaggtgatgctggagaactacagcaacctggtgagcctgggcctgctgttcagcaagcccagggtgatcagcctgctgcaggagggcgaggacccctggaaggtggagaaggagagccccggcggccccagcctgggctggaacagcagcggcggcccaagcagcggcgcccctcctcccagcggcggcagcccagccggctccccaacctctaccgaggagggcacctctgagtccgccacccccgagagcggccctggcacctccaccgagcccagcgagggcagcgcacccggcagccctgccggcagccccacctccacagaggagggaaccagcaccgagcccagcgaaggcagcgccccaggcaccagcaccgagcctagtgagcaggagattaaacggatcaacaagatcagaagaagacttgtgaaagacagcaacaccaagaaggccggcaagacaggccccatgaaaaccctgctggttagagtgatgacacccgatctgagagagcggctggaaaacctgagaaagaagcctgaaaatatcccccagcccatcagcaatacatctagagccaacctgaataagctgctgaccgattacaccgaaatgaagaaggcgatcctgcatgtgtactgggaagagttccagaaggaccctgtgggcctgatgagccgggtggcccagcctgccagcaagaagatcgatcagaacaagctgaaacctgagatggacgagaagggcaacctgaccaccgccggctttgcctgctctcagtgtggccagcccctgttcgtgtacaagctggagcaggtgtctgagaagggcaaggcttacaccaactacttcggacggtgcaatgtggccgagcacgaaaagctgatcctgctggcccagctgaagcccgagaaggatagcgacgaagccgtgacatatagcctgggaaagtttgggcagagggccctggatttctacagcattcatgtgaccaaggagtccacccaccccgtgaagcccctggcccagatcgccggaaacagatacgcctccggacctgtgggaaaggccctgagcgacgcatgtatgggcacaatcgcctccttcctgtctaagtaccaggacatcatcatcgaacaccagaaggtggtgaagggcaaccagaagagactggagagcctgcgggagctggccggcaaggaaaacctggaataccctagcgtgaccctgccacctcagcctcacaccaaggagggcgttgatgcctacaacgaagtgatcgcccgggtgcgaatgtgggtgaacctgaacctgtggcagaagctgaagctaagcagagatgatgccaagcctctgctgagactgaagggattcccttcctttcctctggtcgagagacaggccaacgaagtggactggtgggacatggtgtgtaacgtgaagaagctgatcaacgagaaaaaggaggatggcaaggtgttttggcagaatctggctggctacaagagacaggaagccctgagaccatacctgagcagcgaggaagatcggaagaagggaaagaaattcgctcggtaccagctgggcgacctgctgctgcacctggaaaagaagcacggcgaggactggggaaaggtgtacgacgaggcctgggagcggattgacaagaaagtggaaggcctgagcaagcacatcaagctggaagaggaacggagaagcgaggacgcccagagcaaggccgccctgaccgactggctgcgggctaaggccagcttcgtgatcgagggcctgaaggaggccgacaaggacgagttctgcagatgcgagctgaagctgcagaagtggtacggggacctgcggggaaagcccttcgccatcgaagccgagaacagcatcctggacatcagcggcttcagcaagcagtacaactgtgccttcatctggcagaaggacggcgtgaagaagctgaacctgtacctgatcatcaactacttcaagggcggcaagctgcggttcaagaagatcaaacctgaagccttcgaagccaacagattctacaccgtgatcaacaaaaagagcggcgagatcgtgcccatggaggtgaacttcaacttcgacgaccccaacctgatcatcctgcctctggcctttggcaagagacagggcagagaattcatctggaacgacctgctgtccctggaaaccggcagcctgaagctggccaacggaagagtgatcgagaagacactgtacaacagaagaacccggcaggatgagcctgccctgttcgtggccctgaccttcgagcggcgggaggtcctggactcctccaatatcaaaccaatgaacctgatcggcgtggcaagaggcgaaaacatccccgccgtgatcgccctgaccgaccccgagggctgcccactgagccggtttaaggatagcctgggaaacccaacccacatcctgagaatcggcgagagctataaggagaagcagcggaccatccaggccaagaaggaggtggagcagcggagagccggcggctacagccggaagtacgccagcaaagccaagaatctggcagacgatatggtgagaaacaccgctagagatctgctgtactacgccgtgacccaggatgccatgctgatcttcgccaacctgagccggggcttcggccggcagggcaagcggaccttcatggccgagagacagtacacacggatggaggactggctgaccgccaagctggcctacgagggcctgagcaagacctacctgtccaagacactggcccagtacacctccaagacatgcagcaactgtgggtttaccatcaccagcgccgactacgacagggtgctggagaagctgaagaagacagcaacaggctggatgaccacaattaacggcaaggagctgaaggtggagggccagattacctactacaacagatacaagagacagaacgtagtcaaggacctgtccgtcgagctggatagactgagcgaagaatctgtgaacaacgacatctcctcctggacaaagggcagaagcggagaagctctgagcctcctgaagaaaagattctcccatagacccgtgcaggagaagttcgtgtgcctgaactgcggcttcgagacacacgcagccgagcaagccgccctgaacatcgccagatcctggctgttcctgcggagccaggagtacaagaaataccagacaaacaagacaaccggcaacaccgataagagagccttcgtcgagacctggcagtccttttaccggaagaagcttaaggaggtgtggaaacctgccgtgcggtctggcggatctggcggaggctcctagccaggtgagcgtgaccttcgaggacgtggccgtgctgttcaccagggacgagtggaggaagctgggccccagccagaggaacgtgtaccaggaggtgatgctggagaactacagcaacctggtgagcctgggcctgctgttcagcaagcccagggtgatcagcctgctgcaggagggcgaggacccctggaaggtggagaaggagagccccggcggccccagcctgggctggaacagcagcggatctggctccggcagcggccccaagaaaaagagaaaagtctaagctgccttctgcggggcttgccttctggccatgcccttcttctctcccttgcacctgtacctcttggtctttgaataaagcctgagtaggaaggctagcaaaaaaaaaaaaaaaaaaaaaaaaaaaaaaaaaaaaaaaaaaaaaaaaaaaaaaaaaaaaaaaaaaaaaaaaaaaaaaaa

SEQ ID NO: 16230 - RNA, 9485 nt, synthetic construct
  source 1..9485: mol_type = other RNA
aggaaataagagagaaaagaagagtaagaagaaatataagagccaccatggcccctaagaagaagcgtaaagtgagccggatggaacgcctcgtctacgaggtgcggcagaagtgcagaaacatcgaggacatctgcatctcctgcggatctctgaacgtgaccctggagcacccactgttcatcggcggcatgtgccagaactgtaaaaactgttttctggagtgtgcctatcaatacgacgatgacggctaccagagctactgcaccatctgttgcggcggaagagaggtgctgatgtgtggaaataacaactgctgccggtgcttctgcgtggaatgcgtggacctgctggtgggccccggcgccgcccaggccgctattaaggaagatccttggaactgctacatgtgcggccacaagggcacatacggcctgctgagacggagagaggactggcctagcagactgcagatgttcttcgccaataaccacgaccaggagttcgacccccctaaggtgtaccctcccgtccccgccgagaagagaaagcccatccgggtcctgagcctgttcgatggcatcgccaccggtctgctggtgctgaaggacctgggcatccaggtggataggtacattgcctccgaggtgtgcgaggactccatcaccgtgggaatggtgcgtcatcagggcaagatcatgtacgtgggcgacgtgcggagcgtgacacagaagcatatccaggagtggggccctttcgacctggtgatcggcggcagcccttgcaatgacctgagcatcgtgaacccagcccggaagggcctgtacgagggaaccggcagactgttcttcgagttttacagactgctgcacgacgcccggcctaaggaaggcgacgaccggcccttcttttggctgttcgagaatgtggtggccatgggagtcagcgacaagcgggatattagccggttcctggagagcaaccccgtgatgatcgatgccaaggaagtgagcgccgcccaccgggccagatacttctggggcaatctgcctggcatgaacagacccctggccagcaccgtgaacgacaagctggagctgcaggagtgcctggagcacggccggatcgccaagttcagcaaggtgagaaccatcaccacccgaagcaacagcatcaaacaaggcaaggaccagcactttcctgtgttcatgaacgagaaggaggacatcctgtggtgtaccgagatggagagagtgttcgggttcccagtccactacacagatgtcagcaacatgtctagactggccagacagagactgctgggaagaagctggtccgtccctgtgatcagacacctgttcgcccctctgaaggagtacttcgcctgcgtgagcagcggcaacagcaacgccaacagccggggccccagcttctctagcggcctggtgccactgtccctgagagggagccacatgggccccatggagatctacaaaaccgtgagcgcctggaagcggcagcctgtgcgcgtgctgagcctgtttcggaatatcgataaagtcctgaaaagcctgggattcctggagagcggctctggctccggcggtggcaccctgaagtacgtggaggatgtgacaaacgtggtcagacgggatgtggagaagtggggccccttcgatctggtgtacggcagcacccaacccctgggcagctcttgtgaccggtgccctggctggtacatgtttcagttccaccggatcctgcagtacgccctgccgagacaggagtcccagcggccattcttttggattttcatggacaacttgctgctgaccgaggatgaccaggaaactaccactcggttcctgcagaccgaagccgtgaccctgcaggacgtgagaggccgggactaccagaacgccatgcgggtgtggtccaacatccctggactgaaaagcaagcacgcacctctgacccctaaagaagaggagtacctgcaggcccaggtgcggagcagaagcaagctggacgcccctaaggtggatctgctggtgaagaattgcctcctgcccctgagagagtacttcaagtatttcagccagaatagtctgcccctgggaggcagcggcggcggcgccctggtgacatttgaggacgtcgccgtgcggttcacccaggaggaatgggctctgctggatccttctcagaaaatcctgtaccgggacgtgatgagagagacataccggaatctgacctccgtgggcatcaactgggaatgttgggaccttgaagcctgcttcagaagcctgggaagaaacctgagagtgcaggtggtgaagagaaagtgcgagctgaccaacagcggcccctgcgccgagggcggcccaagcagcggcgcccctcctcccagcggcggcagcccagccggctccccaacctctaccgaggagggcacctctgagtccgccacccccgagagcggccctggcacctccaccgagcccagcgagggcagcgcacccggcagccctgccggcagccccacctccacagaggagggaaccagcaccgagcccagcgaaggcagcgccccaggcaccagcaccgagcctagtgagcaggagattaaacggatcaacaagatcagaagaagacttgtgaaagacagcaacaccaagaaggccggcaagacaggccccatgaaaaccctgctggttagagtgatgacacccgatctgagagagcggctggaaaacctgagaaagaagcctgaaaatatcccccagcccatcagcaatacatctagagccaacctgaataagctgctgaccgattacaccgaaatgaagaaggcgatcctgcatgtgtactgggaagagttccagaaggaccctgtgggcctgatgagccgggtggcccagcctgccagcaagaagatcgatcagaacaagctgaaacctgagatggacgagaagggcaacctgaccaccgccggctttgcctgctctcagtgtggccagcccctgttcgtgtacaagctggagcaggtgtctgagaagggcaaggcttacaccaactacttcggacggtgcaatgtggccgagcacgaaaagctgatcctgctggcccagctgaagcccgagaaggatagcgacgaagccgtgacatatagcctgggaaagtttgggcagagggccctggatttctacagcattcatgtgaccaaggagtccacccaccccgtgaagcccctggcccagatcgccggaaacagatacgcctccggacctgtgggaaaggccctgagcgacgcatgtatgggcacaatcgcctccttcctgtctaagtaccaggacatcatcatcgaacaccagaaggtggtgaagggcaaccagaagagactggagagcctgcgggagctggccggcaaggaaaacctggaataccctagcgtgaccctgccacctcagcctcacaccaaggagggcgttgatgcctacaacgaagtgatcgcccgggtgcgaatgtgggtgaacctgaacctgtggcagaagctgaagctaagcagagatgatgccaagcctctgctgagactgaagggattcccttcctttcctctggtcgagagacaggccaacgaagtggactggtgggacatggtgtgtaacgtgaagaagctgatcaacgagaaaaaggaggatggcaaggtgttttggcagaatctggctggctacaagagacaggaagccctgagaccatacctgagcagcgaggaagatcggaagaagggaaagaaattcgctcggtaccagctgggcgacctgctgctgcacctggaaaagaagcacggcgaggactggggaaaggtgtacgacgaggcctgggagcggattgacaagaaagtggaaggcctgagcaagcacatcaagctggaagaggaacggagaagcgaggacgcccagagcaaggccgccctgaccgactggctgcgggctaaggccagcttcgtgatcgagggcctgaaggaggccgacaaggacgagttctgcagatgcgagctgaagctgcagaagtggtacggggacctgcggggaaagcccttcgccatcgaagccgagaacagcatcctggacatcagcggcttcagcaagcagtacaactgtgccttcatctggcagaaggacggcgtgaagaagctgaacctgtacctgatcatcaactacttcaagggcggcaagctgcggttcaagaagatcaaacctgaagccttcgaagccaacagattctacaccgtgatcaacaaaaagagcggcgagatcgtgcccatggaggtgaacttcaacttcgacgaccccaacctgatcatcctgcctctggcctttggcaagagacagggcagagaattcatctggaacgacctgctgtccctggaaaccggcagcctgaagctggccaacggaagagtgatcgagaagacactgtacaacagaagaacccggcaggatgagcctgccctgttcgtggccctgaccttcgagcggcgggaggtcctggactcctccaatatcaaaccaatgaacctgatcggcgtggcaagaggcgaaaacatccccgccgtgatcgccctgaccgaccccgagggctgcccactgagccggtttaaggatagcctgggaaacccaacccacatcctgagaatcggcgagagctataaggagaagcagcggaccatccaggccaagaaggaggtggagcagcggagagccggcggctacagccggaagtacgccagcaaagccaagaatctggcagacgatatggtgagaaacaccgctagagatctgctgtactacgccgtgacccaggatgccatgctgatcttcgccaacctgagccggggcttcggccggcagggcaagcggaccttcatggccgagagacagtacacacggatggaggactggctgaccgccaagctggcctacgagggcctgagcaagacctacctgtccaagacactggcccagtacacctccaagacatgcagcaactgtgggtttaccatcaccagcgccgactacgacagggtgctggagaagctgaagaagacagcaacaggctggatgaccacaattaacggcaaggagctgaaggtggagggccagattacctactacaacagatacaagagacagaacgtagtcaaggacctgtccgtcgagctggatagactgagcgaagaatctgtgaacaacgacatctcctcctggacaaagggcagaagcggagaagctctgagcctcctgaagaaaagattctcccatagacccgtgcaggagaagttcgtgtgcctgaactgcggcttcgagacacacgcagccgagcaagccgccctgaacatcgccagatcctggctgttcctgcggagccaggagtacaagaaataccagacaaacaagacaaccggcaacaccgataagagagccttcgtcgagacctggcagtccttttaccggaagaagcttaaggaggtgtggaaacctgccgtgcggtctggcggatctggcggaggctccccccaggagagcgtgaccttcgaggacgtggccgtgaacttcagccacgaggagtggcagtgcctgacccacgcccagaggcacctgtacaaggacgtgatgctggagaactacggcaacatggtgagcctgggcttcagcttcagcaagccccccctgatcagcaggctggagcagggcaccgagccctacgtgcaggacaggcaggactgggagttcctgagctgcagctaccccgtgagcggcggcccaagcagcggcgcccctcctcccagcggcggcagcccagccggctccccaacctctaccgaggagggcacctctgagtccgccacccccgagagcggccctggcacctccaccgagcccagcgagggcagcgcacccggcagccctgccggcagccccacctccacagaggagggaaccagcaccgagcccagcgaaggcagcgccccaggcaccagcaccgagcctagtgagcaggagattaaacggatcaacaagatcagaagaagacttgtgaaagacagcaacaccaagaaggccggcaagacaggccccatgaaaaccctgctggttagagtgatgacacccgatctgagagagcggctggaaaacctgagaaagaagcctgaaaatatcccccagcccatcagcaatacatctagagccaacctgaataagctgctgaccgattacaccgaaatgaagaaggcgatcctgcatgtgtactgggaagagttccagaaggaccctgtgggcctgatgagccgggtggcccagcctgccagcaagaagatcgatcagaacaagctgaaacctgagatggacgagaagggcaacctgaccaccgccggctttgcctgctctcagtgtggccagcccctgttcgtgtacaagctggagcaggtgtctgagaagggcaaggcttacaccaactacttcggacggtgcaatgtggccgagcacgaaaagctgatcctgctggcccagctgaagcccgagaaggatagcgacgaagccgtgacatatagcctgggaaagtttgggcagagggccctggatttctacagcattcatgtgaccaaggagtccacccaccccgtgaagcccctggcccagatcgccggaaacagatacgcctccggacctgtgggaaaggccctgagcgacgcatgtatgggcacaatcgcctccttcctgtctaagtaccaggacatcatcatcgaacaccagaaggtggtgaagggcaaccagaagagactggagagcctgcgggagctggccggcaaggaaaacctggaataccctagcgtgaccctgccacctcagcctcacaccaaggagggcgttgatgcctacaacgaagtgatcgcccgggtgcgaatgtgggtgaacctgaacctgtggcagaagctgaagctaagcagagatgatgccaagcctctgctgagactgaagggattcccttcctttcctctggtcgagagacaggccaacgaagtggactggtgggacatggtgtgtaacgtgaagaagctgatcaacgagaaaaaggaggatggcaaggtgttttggcagaatctggctggctacaagagacaggaagccctgagaccatacctgagcagcgaggaagatcggaagaagggaaagaaattcgctcggtaccagctgggcgacctgctgctgcacctggaaaagaagcacggcgaggactggggaaaggtgtacgacgaggcctgggagcggattgacaagaaagtggaaggcctgagcaagcacatcaagctggaagaggaacggagaagcgaggacgcccagagcaaggccgccctgaccgactggctgcgggctaaggccagcttcgtgatcgagggcctgaaggaggccgacaaggacgagttctgcagatgcgagctgaagctgcagaagtggtacggggacctgcggggaaagcccttcgccatcgaagccgagaacagcatcctggacatcagcggcttcagcaagcagtacaactgtgccttcatctggcagaaggacggcgtgaagaagctgaacctgtacctgatcatcaactacttcaagggcggcaagctgcggttcaagaagatcaaacctgaagccttcgaagccaacagattctacaccgtgatcaacaaaaagagcggcgagatcgtgcccatggaggtgaacttcaacttcgacgaccccaacctgatcatcctgcctctggcctttggcaagagacagggcagagaattcatctggaacgacctgctgtccctggaaaccggcagcctgaagctggccaacggaagagtgatcgagaagacactgtacaacagaagaacccggcaggatgagcctgccctgttcgtggccctgaccttcgagcggcgggaggtcctggactcctccaatatcaaaccaatgaacctgatcggcgtggcaagaggcgaaaacatccccgccgtgatcgccctgaccgaccccgagggctgcccactgagccggtttaaggatagcctgggaaacccaacccacatcctgagaatcggcgagagctataaggagaagcagcggaccatccaggccaagaaggaggtggagcagcggagagccggcggctacagccggaagtacgccagcaaagccaagaatctggcagacgatatggtgagaaacaccgctagagatctgctgtactacgccgtgacccaggatgccatgctgatcttcgccaacctgagccggggcttcggccggcagggcaagcggaccttcatggccgagagacagtacacacggatggaggactggctgaccgccaagctggcctacgagggcctgagcaagacctacctgtccaagacactggcccagtacacctccaagacatgcagcaactgtgggtttaccatcaccagcgccgactacgacagggtgctggagaagctgaagaagacagcaacaggctggatgaccacaattaacggcaaggagctgaaggtggagggccagattacctactacaacagatacaagagacagaacgtagtcaaggacctgtccgtcgagctggatagactgagcgaagaatctgtgaacaacgacatctcctcctggacaaagggcagaagcggagaagctctgagcctcctgaagaaaagattctcccatagacccgtgcaggagaagttcgtgtgcctgaactgcggcttcgagacacacgcagccgagcaagccgccctgaacatcgccagatcctggctgttcctgcggagccaggagtacaagaaataccagacaaacaagacaaccggcaacaccgataagagagccttcgtcgagacctggcagtccttttaccggaagaagcttaaggaggtgtggaaacctgccgtgcggtctggcggatctggcggaggctcctccccaggagagcgtgaccttcgaggacgtggccgtgaacttcagccacgaggagtggcagtgcctgacccacgcccagaggcacctgtacaaggacgtgatgctggagaactacggcaacatggtgagcctgggcttcagcttcagcaagccccccctgatcagcaggctggagcagggcaccgagccctacgtgcaggacaggcaggactgggagttcctgagctgcagctaccccgtgagcggatctggctccggcagcggccccaagaaaaagagaaaagtctaagctgccttctgcggggcttgccttctggccatgcccttcttctctcccttgcacctgtacctcttggtctttgaataaagcctgagtaggaaggctagcaaaaaaaaaaaaaaaaaaaaaaaaaaaaaaaaaaaaaaaaaaaaaaaaaaaaaaaaaaaaaaaaaaaaaaaaaaaaaaaa

SEQ ID NO: 16231 - RNA, 9485 nt, synthetic construct
  source 1..9485: mol_type = other RNA
aggaaataagagagaaaagaagagtaagaagaaatataagagccaccatggcccctaagaagaagcgtaaagtgagccggatggaacgcctcgtctacgaggtgcggcagaagtgcagaaacatcgaggacatctgcatctcctgcggatctctgaacgtgaccctggagcacccactgttcatcggcggcatgtgccagaactgtaaaaactgttttctggagtgtgcctatcaatacgacgatgacggctaccagagctactgcaccatctgttgcggcggaagagaggtgctgatgtgtggaaataacaactgctgccggtgcttctgcgtggaatgcgtggacctgctggtgggccccggcgccgcccaggccgctattaaggaagatccttggaactgctacatgtgcggccacaagggcacatacggcctgctgagacggagagaggactggcctagcagactgcagatgttcttcgccaataaccacgaccaggagttcgacccccctaaggtgtaccctcccgtccccgccgagaagagaaagcccatccgggtcctgagcctgttcgatggcatcgccaccggtctgctggtgctgaaggacctgggcatccaggtggataggtacattgcctccgaggtgtgcgaggactccatcaccgtgggaatggtgcgtcatcagggcaagatcatgtacgtgggcgacgtgcggagcgtgacacagaagcatatccaggagtggggccctttcgacctggtgatcggcggcagcccttgcaatgacctgagcatcgtgaacccagcccggaagggcctgtacgagggaaccggcagactgttcttcgagttttacagactgctgcacgacgcccggcctaaggaaggcgacgaccggcccttcttttggctgttcgagaatgtggtggccatgggagtcagcgacaagcgggatattagccggttcctggagagcaaccccgtgatgatcgatgccaaggaagtgagcgccgcccaccgggccagatacttctggggcaatctgcctggcatgaacagacccctggccagcaccgtgaacgacaagctggagctgcaggagtgcctggagcacggccggatcgccaagttcagcaaggtgagaaccatcaccacccgaagcaacagcatcaaacaaggcaaggaccagcactttcctgtgttcatgaacgagaaggaggacatcctgtggtgtaccgagatggagagagtgttcgggttcccagtccactacacagatgtcagcaacatgtctagactggccagacagagactgctgggaagaagctggtccgtccctgtgatcagacacctgttcgcccctctgaaggagtacttcgcctgcgtgagcagcggcaacagcaacgccaacagccggggccccagcttctctagcggcctggtgccactgtccctgagagggagccacatgggccccatggagatctacaaaaccgtgagcgcctggaagcggcagcctgtgcgcgtgctgagcctgtttcggaatatcgataaagtcctgaaaagcctgggattcctggagagcggctctggctccggcggtggcaccctgaagtacgtggaggatgtgacaaacgtggtcagacgggatgtggagaagtggggccccttcgatctggtgtacggcagcacccaacccctgggcagctcttgtgaccggtgccctggctggtacatgtttcagttccaccggatcctgcagtacgccctgccgagacaggagtcccagcggccattcttttggattttcatggacaacttgctgctgaccgaggatgaccaggaaactaccactcggttcctgcagaccgaagccgtgaccctgcaggacgtgagaggccgggactaccagaacgccatgcgggtgtggtccaacatccctggactgaaaagcaagcacgcacctctgacccctaaagaagaggagtacctgcaggcccaggtgcggagcagaagcaagctggacgcccctaaggtggatctgctggtgaagaattgcctcctgcccctgagagagtacttcaagtatttcagccagaatagtctgcccctgggaggcagcggcggcggcgccctggtgacatttgaggacgtcgccgtgcggttcacccaggaggaatgggctctgctggatccttctcagaaaatcctgtaccgggacgtgatgagagagacataccggaatctgacctccgtgggcatcaactgggaatgttgggaccttgaagcctgcttcagaagcctgggaagaaacctgagagtgcaggtggtgaagagaaagtgcgagctgaccaacagcggcccctgcgccgagggcggcccaagcagcggcgcccctcctcccagcggcggcagcccagccggctccccaacctctaccgaggagggcacctctgagtccgccacccccgagagcggccctggcacctccaccgagcccagcgagggcagcgcacccggcagccctgccggcagccccacctccacagaggagggaaccagcaccgagcccagcgaaggcagcgccccaggcaccagcaccgagcctagtgagcaggagattaaacggatcaacaagatcagaagaagacttgtgaaagacagcaacaccaagaaggccggcaagacaggccccatgaaaaccctgctggttagagtgatgacacccgatctgagagagcggctggaaaacctgagaaagaagcctgaaaatatcccccagcccatcagcaatacatctagagccaacctgaataagctgctgaccgattacaccgaaatgaagaaggcgatcctgcatgtgtactgggaagagttccagaaggaccctgtgggcctgatgagccgggtggcccagcctgccagcaagaagatcgatcagaacaagctgaaacctgagatggacgagaagggcaacctgaccaccgccggctttgcctgctctcagtgtggccagcccctgttcgtgtacaagctggagcaggtgtctgagaagggcaaggcttacaccaactacttcggacggtgcaatgtggccgagcacgaaaagctgatcctgctggcccagctgaagcccgagaaggatagcgacgaagccgtgacatatagcctgggaaagtttgggcagagggccctggatttctacagcattcatgtgaccaaggagtccacccaccccgtgaagcccctggcccagatcgccggaaacagatacgcctccggacctgtgggaaaggccctgagcgacgcatgtatgggcacaatcgcctccttcctgtctaagtaccaggacatcatcatcgaacaccagaaggtggtgaagggcaaccagaagagactggagagcctgcgggagctggccggcaaggaaaacctggaataccctagcgtgaccctgccacctcagcctcacaccaaggagggcgttgatgcctacaacgaagtgatcgcccgggtgcgaatgtgggtgaacctgaacctgtggcagaagctgaagctaagcagagatgatgccaagcctctgctgagactgaagggattcccttcctttcctctggtcgagagacaggccaacgaagtggactggtgggacatggtgtgtaacgtgaagaagctgatcaacgagaaaaaggaggatggcaaggtgttttggcagaatctggctggctacaagagacaggaagccctgagaccatacctgagcagcgaggaagatcggaagaagggaaagaaattcgctcggtaccagctgggcgacctgctgctgcacctggaaaagaagcacggcgaggactggggaaaggtgtacgacgaggcctgggagcggattgacaagaaagtggaaggcctgagcaagcacatcaagctggaagaggaacggagaagcgaggacgcccagagcaaggccgccctgaccgactggctgcgggctaaggccagcttcgtgatcgagggcctgaaggaggccgacaaggacgagttctgcagatgcgagctgaagctgcagaagtggtacggggacctgcggggaaagcccttcgccatcgaagccgagaacagcatcctggacatcagcggcttcagcaagcagtacaactgtgccttcatctggcagaaggacggcgtgaagaagctgaacctgtacctgatcatcaactacttcaagggcggcaagctgcggttcaagaagatcaaacctgaagccttcgaagccaacagattctacaccgtgatcaacaaaaagagcggcgagatcgtgcccatggaggtgaacttcaacttcgacgaccccaacctgatcatcctgcctctggcctttggcaagagacagggcagagaattcatctggaacgacctgctgtccctggaaaccggcagcctgaagctggccaacggaagagtgatcgagaagacactgtacaacagaagaacccggcaggatgagcctgccctgttcgtggccctgaccttcgagcggcgggaggtcctggactcctccaatatcaaaccaatgaacctgatcggcgtggcaagaggcgaaaacatccccgccgtgatcgccctgaccgaccccgagggctgcccactgagccggtttaaggatagcctgggaaacccaacccacatcctgagaatcggcgagagctataaggagaagcagcggaccatccaggccaagaaggaggtggagcagcggagagccggcggctacagccggaagtacgccagcaaagccaagaatctggcagacgatatggtgagaaacaccgctagagatctgctgtactacgccgtgacccaggatgccatgctgatcttcgccaacctgagccggggcttcggccggcagggcaagcggaccttcatggccgagagacagtacacacggatggaggactggctgaccgccaagctggcctacgagggcctgagcaagacctacctgtccaagacactggcccagtacacctccaagacatgcagcaactgtgggtttaccatcaccagcgccgactacgacagggtgctggagaagctgaagaagacagcaacaggctggatgaccacaattaacggcaaggagctgaaggtggagggccagattacctactacaacagatacaagagacagaacgtagtcaaggacctgtccgtcgagctggatagactgagcgaagaatctgtgaacaacgacatctcctcctggacaaagggcagaagcggagaagctctgagcctcctgaagaaaagattctcccatagacccgtgcaggagaagttcgtgtgcctgaactgcggcttcgagacacacgcagccgagcaagccgccctgaacatcgccagatcctggctgttcctgcggagccaggagtacaagaaataccagacaaacaagacaaccggcaacaccgataagagagccttcgtcgagacctggcagtccttttaccggaagaagcttaaggaggtgtggaaacctgccgtgcggtctggcggatctggcggaggctccatggccgccgccgccctgaggctgcccgcccagggcaccgtgaccttcgaggacgtggccgtgaagttcagccaggaggagtggagcctgctgagcgaggcccagaggtgcctgtaccacgacgtgatgctggagaacctggccctgatcagcagcctgggctgctggtacggcgccaacgacgagacccccagcaagcagaccctgagcatccagcagcagagccccctgaggagccactggggcggcccaagcagcggcgcccctcctcccagcggcggcagcccagccggctccccaacctctaccgaggagggcacctctgagtccgccacccccgagagcggccctggcacctccaccgagcccagcgagggcagcgcacccggcagccctgccggcagccccacctccacagaggagggaaccagcaccgagcccagcgaaggcagcgccccaggcaccagcaccgagcctagtgagcaggagattaaacggatcaacaagatcagaagaagacttgtgaaagacagcaacaccaagaaggccggcaagacaggccccatgaaaaccctgctggttagagtgatgacacccgatctgagagagcggctggaaaacctgagaaagaagcctgaaaatatcccccagcccatcagcaatacatctagagccaacctgaataagctgctgaccgattacaccgaaatgaagaaggcgatcctgcatgtgtactgggaagagttccagaaggaccctgtgggcctgatgagccgggtggcccagcctgccagcaagaagatcgatcagaacaagctgaaacctgagatggacgagaagggcaacctgaccaccgccggctttgcctgctctcagtgtggccagcccctgttcgtgtacaagctggagcaggtgtctgagaagggcaaggcttacaccaactacttcggacggtgcaatgtggccgagcacgaaaagctgatcctgctggcccagctgaagcccgagaaggatagcgacgaagccgtgacatatagcctgggaaagtttgggcagagggccctggatttctacagcattcatgtgaccaaggagtccacccaccccgtgaagcccctggcccagatcgccggaaacagatacgcctccggacctgtgggaaaggccctgagcgacgcatgtatgggcacaatcgcctccttcctgtctaagtaccaggacatcatcatcgaacaccagaaggtggtgaagggcaaccagaagagactggagagcctgcgggagctggccggcaaggaaaacctggaataccctagcgtgaccctgccacctcagcctcacaccaaggagggcgttgatgcctacaacgaagtgatcgcccgggtgcgaatgtgggtgaacctgaacctgtggcagaagctgaagctaagcagagatgatgccaagcctctgctgagactgaagggattcccttcctttcctctggtcgagagacaggccaacgaagtggactggtgggacatggtgtgtaacgtgaagaagctgatcaacgagaaaaaggaggatggcaaggtgttttggcagaatctggctggctacaagagacaggaagccctgagaccatacctgagcagcgaggaagatcggaagaagggaaagaaattcgctcggtaccagctgggcgacctgctgctgcacctggaaaagaagcacggcgaggactggggaaaggtgtacgacgaggcctgggagcggattgacaagaaagtggaaggcctgagcaagcacatcaagctggaagaggaacggagaagcgaggacgcccagagcaaggccgccctgaccgactggctgcgggctaaggccagcttcgtgatcgagggcctgaaggaggccgacaaggacgagttctgcagatgcgagctgaagctgcagaagtggtacggggacctgcggggaaagcccttcgccatcgaagccgagaacagcatcctggacatcagcggcttcagcaagcagtacaactgtgccttcatctggcagaaggacggcgtgaagaagctgaacctgtacctgatcatcaactacttcaagggcggcaagctgcggttcaagaagatcaaacctgaagccttcgaagccaacagattctacaccgtgatcaacaaaaagagcggcgagatcgtgcccatggaggtgaacttcaacttcgacgaccccaacctgatcatcctgcctctggcctttggcaagagacagggcagagaattcatctggaacgacctgctgtccctggaaaccggcagcctgaagctggccaacggaagagtgatcgagaagacactgtacaacagaagaacccggcaggatgagcctgccctgttcgtggccctgaccttcgagcggcgggaggtcctggactcctccaatatcaaaccaatgaacctgatcggcgtggcaagaggcgaaaacatccccgccgtgatcgccctgaccgaccccgagggctgcccactgagccggtttaaggatagcctgggaaacccaacccacatcctgagaatcggcgagagctataaggagaagcagcggaccatccaggccaagaaggaggtggagcagcggagagccggcggctacagccggaagtacgccagcaaagccaagaatctggcagacgatatggtgagaaacaccgctagagatctgctgtactacgccgtgacccaggatgccatgctgatcttcgccaacctgagccggggcttcggccggcagggcaagcggaccttcatggccgagagacagtacacacggatggaggactggctgaccgccaagctggcctacgagggcctgagcaagacctacctgtccaagacactggcccagtacacctccaagacatgcagcaactgtgggtttaccatcaccagcgccgactacgacagggtgctggagaagctgaagaagacagcaacaggctggatgaccacaattaacggcaaggagctgaaggtggagggccagattacctactacaacagatacaagagacagaacgtagtcaaggacctgtccgtcgagctggatagactgagcgaagaatctgtgaacaacgacatctcctcctggacaaagggcagaagcggagaagctctgagcctcctgaagaaaagattctcccatagacccgtgcaggagaagttcgtgtgcctgaactgcggcttcgagacacacgcagccgagcaagccgccctgaacatcgccagatcctggctgttcctgcggagccaggagtacaagaaataccagacaaacaagacaaccggcaacaccgataagagagccttcgtcgagacctggcagtccttttaccggaagaagcttaaggaggtgtggaaacctgccgtgcggtctggcggatctggcggaggctcctatggccgccgccgccctgaggctgcccgcccagggcaccgtgaccttcgaggacgtggccgtgaagttcagccaggaggagtggagcctgctgagcgaggcccagaggtgcctgtaccacgacgtgatgctggagaacctggccctgatcagcagcctgggctgctggtacggcgccaacgacgagacccccagcaagcagaccctgagcatccagcagcagagccccctgaggagccactggggatctggctccggcagcggccccaagaaaaagagaaaagtctaagctgccttctgcggggcttgccttctggccatgcccttcttctctcccttgcacctgtacctcttggtctttgaataaagcctgagtaggaaggctagcaaaaaaaaaaaaaaaaaaaaaaaaaaaaaaaaaaaaaaaaaaaaaaaaaaaaaaaaaaaaaaaaaaaaaaaaaaaaaaaa

SEQ ID NO: 16232 - RNA, 9485 nt, synthetic construct
  source 1..9485: mol_type = other RNA
aggaaataagagagaaaagaagagtaagaagaaatataagagccaccatggcccctaagaagaagcgtaaagtgagccggatggaacgcctcgtctacgaggtgcggcagaagtgcagaaacatcgaggacatctgcatctcctgcggatctctgaacgtgaccctggagcacccactgttcatcggcggcatgtgccagaactgtaaaaactgttttctggagtgtgcctatcaatacgacgatgacggctaccagagctactgcaccatctgttgcggcggaagagaggtgctgatgtgtggaaataacaactgctgccggtgcttctgcgtggaatgcgtggacctgctggtgggccccggcgccgcccaggccgctattaaggaagatccttggaactgctacatgtgcggccacaagggcacatacggcctgctgagacggagagaggactggcctagcagactgcagatgttcttcgccaataaccacgaccaggagttcgacccccctaaggtgtaccctcccgtccccgccgagaagagaaagcccatccgggtcctgagcctgttcgatggcatcgccaccggtctgctggtgctgaaggacctgggcatccaggtggataggtacattgcctccgaggtgtgcgaggactccatcaccgtgggaatggtgcgtcatcagggcaagatcatgtacgtgggcgacgtgcggagcgtgacacagaagcatatccaggagtggggccctttcgacctggtgatcggcggcagcccttgcaatgacctgagcatcgtgaacccagcccggaagggcctgtacgagggaaccggcagactgttcttcgagttttacagactgctgcacgacgcccggcctaaggaaggcgacgaccggcccttcttttggctgttcgagaatgtggtggccatgggagtcagcgacaagcgggatattagccggttcctggagagcaaccccgtgatgatcgatgccaaggaagtgagcgccgcccaccgggccagatacttctggggcaatctgcctggcatgaacagacccctggccagcaccgtgaacgacaagctggagctgcaggagtgcctggagcacggccggatcgccaagttcagcaaggtgagaaccatcaccacccgaagcaacagcatcaaacaaggcaaggaccagcactttcctgtgttcatgaacgagaaggaggacatcctgtggtgtaccgagatggagagagtgttcgggttcccagtccactacacagatgtcagcaacatgtctagactggccagacagagactgctgggaagaagctggtccgtccctgtgatcagacacctgttcgcccctctgaaggagtacttcgcctgcgtgagcagcggcaacagcaacgccaacagccggggccccagcttctctagcggcctggtgccactgtccctgagagggagccacatgggccccatggagatctacaaaaccgtgagcgcctggaagcggcagcctgtgcgcgtgctgagcctgtttcggaatatcgataaagtcctgaaaagcctgggattcctggagagcggctctggctccggcggtggcaccctgaagtacgtggaggatgtgacaaacgtggtcagacgggatgtggagaagtggggccccttcgatctggtgtacggcagcacccaacccctgggcagctcttgtgaccggtgccctggctggtacatgtttcagttccaccggatcctgcagtacgccctgccgagacaggagtcccagcggccattcttttggattttcatggacaacttgctgctgaccgaggatgaccaggaaactaccactcggttcctgcagaccgaagccgtgaccctgcaggacgtgagaggccgggactaccagaacgccatgcgggtgtggtccaacatccctggactgaaaagcaagcacgcacctctgacccctaaagaagaggagtacctgcaggcccaggtgcggagcagaagcaagctggacgcccctaaggtggatctgctggtgaagaattgcctcctgcccctgagagagtacttcaagtatttcagccagaatagtctgcccctgggaggcagcggcggcggcgccctggtgacatttgaggacgtcgccgtgcggttcacccaggaggaatgggctctgctggatccttctcagaaaatcctgtaccgggacgtgatgagagagacataccggaatctgacctccgtgggcatcaactgggaatgttgggaccttgaagcctgcttcagaagcctgggaagaaacctgagagtgcaggtggtgaagagaaagtgcgagctgaccaacagcggcccctgcgccgagggcggcccaagcagcggcgcccctcctcccagcggcggcagcccagccggctccccaacctctaccgaggagggcacctctgagtccgccacccccgagagcggccctggcacctccaccgagcccagcgagggcagcgcacccggcagccctgccggcagccccacctccacagaggagggaaccagcaccgagcccagcgaaggcagcgccccaggcaccagcaccgagcctagtgagcaggagattaaacggatcaacaagatcagaagaagacttgtgaaagacagcaacaccaagaaggccggcaagacaggccccatgaaaaccctgctggttagagtgatgacacccgatctgagagagcggctggaaaacctgagaaagaagcctgaaaatatcccccagcccatcagcaatacatctagagccaacctgaataagctgctgaccgattacaccgaaatgaagaaggcgatcctgcatgtgtactgggaagagttccagaaggaccctgtgggcctgatgagccgggtggcccagcctgccagcaagaagatcgatcagaacaagctgaaacctgagatggacgagaagggcaacctgaccaccgccggctttgcctgctctcagtgtggccagcccctgttcgtgtacaagctggagcaggtgtctgagaagggcaaggcttacaccaactacttcggacggtgcaatgtggccgagcacgaaaagctgatcctgctggcccagctgaagcccgagaaggatagcgacgaagccgtgacatatagcctgggaaagtttgggcagagggccctggatttctacagcattcatgtgaccaaggagtccacccaccccgtgaagcccctggcccagatcgccggaaacagatacgcctccggacctgtgggaaaggccctgagcgacgcatgtatgggcacaatcgcctccttcctgtctaagtaccaggacatcatcatcgaacaccagaaggtggtgaagggcaaccagaagagactggagagcctgcgggagctggccggcaaggaaaacctggaataccctagcgtgaccctgccacctcagcctcacaccaaggagggcgttgatgcctacaacgaagtgatcgcccgggtgcgaatgtgggtgaacctgaacctgtggcagaagctgaagctaagcagagatgatgccaagcctctgctgagactgaagggattcccttcctttcctctggtcgagagacaggccaacgaagtggactggtgggacatggtgtgtaacgtgaagaagctgatcaacgagaaaaaggaggatggcaaggtgttttggcagaatctggctggctacaagagacaggaagccctgagaccatacctgagcagcgaggaagatcggaagaagggaaagaaattcgctcggtaccagctgggcgacctgctgctgcacctggaaaagaagcacggcgaggactggggaaaggtgtacgacgaggcctgggagcggattgacaagaaagtggaaggcctgagcaagcacatcaagctggaagaggaacggagaagcgaggacgcccagagcaaggccgccctgaccgactggctgcgggctaaggccagcttcgtgatcgagggcctgaaggaggccgacaaggacgagttctgcagatgcgagctgaagctgcagaagtggtacggggacctgcggggaaagcccttcgccatcgaagccgagaacagcatcctggacatcagcggcttcagcaagcagtacaactgtgccttcatctggcagaaggacggcgtgaagaagctgaacctgtacctgatcatcaactacttcaagggcggcaagctgcggttcaagaagatcaaacctgaagccttcgaagccaacagattctacaccgtgatcaacaaaaagagcggcgagatcgtgcccatggaggtgaacttcaacttcgacgaccccaacctgatcatcctgcctctggcctttggcaagagacagggcagagaattcatctggaacgacctgctgtccctggaaaccggcagcctgaagctggccaacggaagagtgatcgagaagacactgtacaacagaagaacccggcaggatgagcctgccctgttcgtggccctgaccttcgagcggcgggaggtcctggactcctccaatatcaaaccaatgaacctgatcggcgtggcaagaggcgaaaacatccccgccgtgatcgccctgaccgaccccgagggctgcccactgagccggtttaaggatagcctgggaaacccaacccacatcctgagaatcggcgagagctataaggagaagcagcggaccatccaggccaagaaggaggtggagcagcggagagccggcggctacagccggaagtacgccagcaaagccaagaatctggcagacgatatggtgagaaacaccgctagagatctgctgtactacgccgtgacccaggatgccatgctgatcttcgccaacctgagccggggcttcggccggcagggcaagcggaccttcatggccgagagacagtacacacggatggaggactggctgaccgccaagctggcctacgagggcctgagcaagacctacctgtccaagacactggcccagtacacctccaagacatgcagcaactgtgggtttaccatcaccagcgccgactacgacagggtgctggagaagctgaagaagacagcaacaggctggatgaccacaattaacggcaaggagctgaaggtggagggccagattacctactacaacagatacaagagacagaacgtagtcaaggacctgtccgtcgagctggatagactgagcgaagaatctgtgaacaacgacatctcctcctggacaaagggcagaagcggagaagctctgagcctcctgaagaaaagattctcccatagacccgtgcaggagaagttcgtgtgcctgaactgcggcttcgagacacacgcagccgagcaagccgccctgaacatcgccagatcctggctgttcctgcggagccaggagtacaagaaataccagacaaacaagacaaccggcaacaccgataagagagccttcgtcgagacctggcagtccttttaccggaagaagcttaaggaggtgtggaaacctgccgtgcggtctggcggatctggcggaggctccgagcccggcgccgtgagcttcgccgacgtggccgtgtacttctgcagggaggagtggggctgcctgaggcccgcccagagggccctgtacagggacgtgatgagggagacctacggccacctgagcgccctgggcatcggcggcaacaagcccgccctgatcagctgggtggaggaggaggccgagctgtgggaccccgccgcccaggaccccgaggtggccaagtgccagaccgaggccgacggcggcccaagcagcggcgcccctcctcccagcggcggcagcccagccggctccccaacctctaccgaggagggcacctctgagtccgccacccccgagagcggccctggcacctccaccgagcccagcgagggcagcgcacccggcagccctgccggcagccccacctccacagaggagggaaccagcaccgagcccagcgaaggcagcgccccaggcaccagcaccgagcctagtgagcaggagattaaacggatcaacaagatcagaagaagacttgtgaaagacagcaacaccaagaaggccggcaagacaggccccatgaaaaccctgctggttagagtgatgacacccgatctgagagagcggctggaaaacctgagaaagaagcctgaaaatatcccccagcccatcagcaatacatctagagccaacctgaataagctgctgaccgattacaccgaaatgaagaaggcgatcctgcatgtgtactgggaagagttccagaaggaccctgtgggcctgatgagccgggtggcccagcctgccagcaagaagatcgatcagaacaagctgaaacctgagatggacgagaagggcaacctgaccaccgccggctttgcctgctctcagtgtggccagcccctgttcgtgtacaagctggagcaggtgtctgagaagggcaaggcttacaccaactacttcggacggtgcaatgtggccgagcacgaaaagctgatcctgctggcccagctgaagcccgagaaggatagcgacgaagccgtgacatatagcctgggaaagtttgggcagagggccctggatttctacagcattcatgtgaccaaggagtccacccaccccgtgaagcccctggcccagatcgccggaaacagatacgcctccggacctgtgggaaaggccctgagcgacgcatgtatgggcacaatcgcctccttcctgtctaagtaccaggacatcatcatcgaacaccagaaggtggtgaagggcaaccagaagagactggagagcctgcgggagctggccggcaaggaaaacctggaataccctagcgtgaccctgccacctcagcctcacaccaaggagggcgttgatgcctacaacgaagtgatcgcccgggtgcgaatgtgggtgaacctgaacctgtggcagaagctgaagctaagcagagatgatgccaagcctctgctgagactgaagggattcccttcctttcctctggtcgagagacaggccaacgaagtggactggtgggacatggtgtgtaacgtgaagaagctgatcaacgagaaaaaggaggatggcaaggtgttttggcagaatctggctggctacaagagacaggaagccctgagaccatacctgagcagcgaggaagatcggaagaagggaaagaaattcgctcggtaccagctgggcgacctgctgctgcacctggaaaagaagcacggcgaggactggggaaaggtgtacgacgaggcctgggagcggattgacaagaaagtggaaggcctgagcaagcacatcaagctggaagaggaacggagaagcgaggacgcccagagcaaggccgccctgaccgactggctgcgggctaaggccagcttcgtgatcgagggcctgaaggaggccgacaaggacgagttctgcagatgcgagctgaagctgcagaagtggtacggggacctgcggggaaagcccttcgccatcgaagccgagaacagcatcctggacatcagcggcttcagcaagcagtacaactgtgccttcatctggcagaaggacggcgtgaagaagctgaacctgtacctgatcatcaactacttcaagggcggcaagctgcggttcaagaagatcaaacctgaagccttcgaagccaacagattctacaccgtgatcaacaaaaagagcggcgagatcgtgcccatggaggtgaacttcaacttcgacgaccccaacctgatcatcctgcctctggcctttggcaagagacagggcagagaattcatctggaacgacctgctgtccctggaaaccggcagcctgaagctggccaacggaagagtgatcgagaagacactgtacaacagaagaacccggcaggatgagcctgccctgttcgtggccctgaccttcgagcggcgggaggtcctggactcctccaatatcaaaccaatgaacctgatcggcgtggcaagaggcgaaaacatccccgccgtgatcgccctgaccgaccccgagggctgcccactgagccggtttaaggatagcctgggaaacccaacccacatcctgagaatcggcgagagctataaggagaagcagcggaccatccaggccaagaaggaggtggagcagcggagagccggcggctacagccggaagtacgccagcaaagccaagaatctggcagacgatatggtgagaaacaccgctagagatctgctgtactacgccgtgacccaggatgccatgctgatcttcgccaacctgagccggggcttcggccggcagggcaagcggaccttcatggccgagagacagtacacacggatggaggactggctgaccgccaagctggcctacgagggcctgagcaagacctacctgtccaagacactggcccagtacacctccaagacatgcagcaactgtgggtttaccatcaccagcgccgactacgacagggtgctggagaagctgaagaagacagcaacaggctggatgaccacaattaacggcaaggagctgaaggtggagggccagattacctactacaacagatacaagagacagaacgtagtcaaggacctgtccgtcgagctggatagactgagcgaagaatctgtgaacaacgacatctcctcctggacaaagggcagaagcggagaagctctgagcctcctgaagaaaagattctcccatagacccgtgcaggagaagttcgtgtgcctgaactgcggcttcgagacacacgcagccgagcaagccgccctgaacatcgccagatcctggctgttcctgcggagccaggagtacaagaaataccagacaaacaagacaaccggcaacaccgataagagagccttcgtcgagacctggcagtccttttaccggaagaagcttaaggaggtgtggaaacctgccgtgcggtctggcggatctggcggaggctcctgagcccggcgccgtgagcttcgccgacgtggccgtgtacttctgcagggaggagtggggctgcctgaggcccgcccagagggccctgtacagggacgtgatgagggagacctacggccacctgagcgccctgggcatcggcggcaacaagcccgccctgatcagctgggtggaggaggaggccgagctgtgggaccccgccgcccaggaccccgaggtggccaagtgccagaccgaggccgacggatctggctccggcagcggccccaagaaaaagagaaaagtctaagctgccttctgcggggcttgccttctggccatgcccttcttctctcccttgcacctgtacctcttggtctttgaataaagcctgagtaggaaggctagcaaaaaaaaaaaaaaaaaaaaaaaaaaaaaaaaaaaaaaaaaaaaaaaaaaaaaaaaaaaaaaaaaaaaaaaaaaaaaaaa

SEQ ID NO: 16233 - RNA, 9485 nt, synthetic construct
  source 1..9485: mol_type = other RNA
aggaaataagagagaaaagaagagtaagaagaaatataagagccaccatggcccctaagaagaagcgtaaagtgagccggatggaacgcctcgtctacgaggtgcggcagaagtgcagaaacatcgaggacatctgcatctcctgcggatctctgaacgtgaccctggagcacccactgttcatcggcggcatgtgccagaactgtaaaaactgttttctggagtgtgcctatcaatacgacgatgacggctaccagagctactgcaccatctgttgcggcggaagagaggtgctgatgtgtggaaataacaactgctgccggtgcttctgcgtggaatgcgtggacctgctggtgggccccggcgccgcccaggccgctattaaggaagatccttggaactgctacatgtgcggccacaagggcacatacggcctgctgagacggagagaggactggcctagcagactgcagatgttcttcgccaataaccacgaccaggagttcgacccccctaaggtgtaccctcccgtccccgccgagaagagaaagcccatccgggtcctgagcctgttcgatggcatcgccaccggtctgctggtgctgaaggacctgggcatccaggtggataggtacattgcctccgaggtgtgcgaggactccatcaccgtgggaatggtgcgtcatcagggcaagatcatgtacgtgggcgacgtgcggagcgtgacacagaagcatatccaggagtggggccctttcgacctggtgatcggcggcagcccttgcaatgacctgagcatcgtgaacccagcccggaagggcctgtacgagggaaccggcagactgttcttcgagttttacagactgctgcacgacgcccggcctaaggaaggcgacgaccggcccttcttttggctgttcgagaatgtggtggccatgggagtcagcgacaagcgggatattagccggttcctggagagcaaccccgtgatgatcgatgccaaggaagtgagcgccgcccaccgggccagatacttctggggcaatctgcctggcatgaacagacccctggccagcaccgtgaacgacaagctggagctgcaggagtgcctggagcacggccggatcgccaagttcagcaaggtgagaaccatcaccacccgaagcaacagcatcaaacaaggcaaggaccagcactttcctgtgttcatgaacgagaaggaggacatcctgtggtgtaccgagatggagagagtgttcgggttcccagtccactacacagatgtcagcaacatgtctagactggccagacagagactgctgggaagaagctggtccgtccctgtgatcagacacctgttcgcccctctgaaggagtacttcgcctgcgtgagcagcggcaacagcaacgccaacagccggggccccagcttctctagcggcctggtgccactgtccctgagagggagccacatgggccccatggagatctacaaaaccgtgagcgcctggaagcggcagcctgtgcgcgtgctgagcctgtttcggaatatcgataaagtcctgaaaagcctgggattcctggagagcggctctggctccggcggtggcaccctgaagtacgtggaggatgtgacaaacgtggtcagacgggatgtggagaagtggggccccttcgatctggtgtacggcagcacccaacccctgggcagctcttgtgaccggtgccctggctggtacatgtttcagttccaccggatcctgcagtacgccctgccgagacaggagtcccagcggccattcttttggattttcatggacaacttgctgctgaccgaggatgaccaggaaactaccactcggttcctgcagaccgaagccgtgaccctgcaggacgtgagaggccgggactaccagaacgccatgcgggtgtggtccaacatccctggactgaaaagcaagcacgcacctctgacccctaaagaagaggagtacctgcaggcccaggtgcggagcagaagcaagctggacgcccctaaggtggatctgctggtgaagaattgcctcctgcccctgagagagtacttcaagtatttcagccagaatagtctgcccctgggaggcagcggcggcggcgccctggtgacatttgaggacgtcgccgtgcggttcacccaggaggaatgggctctgctggatccttctcagaaaatcctgtaccgggacgtgatgagagagacataccggaatctgacctccgtgggcatcaactgggaatgttgggaccttgaagcctgcttcagaagcctgggaagaaacctgagagtgcaggtggtgaagagaaagtgcgagctgaccaacagcggcccctgcgccgagggcggcccaagcagcggcgcccctcctcccagcggcggcagcccagccggctccccaacctctaccgaggagggcacctctgagtccgccacccccgagagcggccctggcacctccaccgagcccagcgagggcagcgcacccggcagccctgccggcagccccacctccacagaggagggaaccagcaccgagcccagcgaaggcagcgccccaggcaccagcaccgagcctagtgagcaggagattaaacggatcaacaagatcagaagaagacttgtgaaagacagcaacaccaagaaggccggcaagacaggccccatgaaaaccctgctggttagagtgatgacacccgatctgagagagcggctggaaaacctgagaaagaagcctgaaaatatcccccagcccatcagcaatacatctagagccaacctgaataagctgctgaccgattacaccgaaatgaagaaggcgatcctgcatgtgtactgggaagagttccagaaggaccctgtgggcctgatgagccgggtggcccagcctgccagcaagaagatcgatcagaacaagctgaaacctgagatggacgagaagggcaacctgaccaccgccggctttgcctgctctcagtgtggccagcccctgttcgtgtacaagctggagcaggtgtctgagaagggcaaggcttacaccaactacttcggacggtgcaatgtggccgagcacgaaaagctgatcctgctggcccagctgaagcccgagaaggatagcgacgaagccgtgacatatagcctgggaaagtttgggcagagggccctggatttctacagcattcatgtgaccaaggagtccacccaccccgtgaagcccctggcccagatcgccggaaacagatacgcctccggacctgtgggaaaggccctgagcgacgcatgtatgggcacaatcgcctccttcctgtctaagtaccaggacatcatcatcgaacaccagaaggtggtgaagggcaaccagaagagactggagagcctgcgggagctggccggcaaggaaaacctggaataccctagcgtgaccctgccacctcagcctcacaccaaggagggcgttgatgcctacaacgaagtgatcgcccgggtgcgaatgtgggtgaacctgaacctgtggcagaagctgaagctaagcagagatgatgccaagcctctgctgagactgaagggattcccttcctttcctctggtcgagagacaggccaacgaagtggactggtgggacatggtgtgtaacgtgaagaagctgatcaacgagaaaaaggaggatggcaaggtgttttggcagaatctggctggctacaagagacaggaagccctgagaccatacctgagcagcgaggaagatcggaagaagggaaagaaattcgctcggtaccagctgggcgacctgctgctgcacctggaaaagaagcacggcgaggactggggaaaggtgtacgacgaggcctgggagcggattgacaagaaagtggaaggcctgagcaagcacatcaagctggaagaggaacggagaagcgaggacgcccagagcaaggccgccctgaccgactggctgcgggctaaggccagcttcgtgatcgagggcctgaaggaggccgacaaggacgagttctgcagatgcgagctgaagctgcagaagtggtacggggacctgcggggaaagcccttcgccatcgaagccgagaacagcatcctggacatcagcggcttcagcaagcagtacaactgtgccttcatctggcagaaggacggcgtgaagaagctgaacctgtacctgatcatcaactacttcaagggcggcaagctgcggttcaagaagatcaaacctgaagccttcgaagccaacagattctacaccgtgatcaacaaaaagagcggcgagatcgtgcccatggaggtgaacttcaacttcgacgaccccaacctgatcatcctgcctctggcctttggcaagagacagggcagagaattcatctggaacgacctgctgtccctggaaaccggcagcctgaagctggccaacggaagagtgatcgagaagacactgtacaacagaagaacccggcaggatgagcctgccctgttcgtggccctgaccttcgagcggcgggaggtcctggactcctccaatatcaaaccaatgaacctgatcggcgtggcaagaggcgaaaacatccccgccgtgatcgccctgaccgaccccgagggctgcccactgagccggtttaaggatagcctgggaaacccaacccacatcctgagaatcggcgagagctataaggagaagcagcggaccatccaggccaagaaggaggtggagcagcggagagccggcggctacagccggaagtacgccagcaaagccaagaatctggcagacgatatggtgagaaacaccgctagagatctgctgtactacgccgtgacccaggatgccatgctgatcttcgccaacctgagccggggcttcggccggcagggcaagcggaccttcatggccgagagacagtacacacggatggaggactggctgaccgccaagctggcctacgagggcctgagcaagacctacctgtccaagacactggcccagtacacctccaagacatgcagcaactgtgggtttaccatcaccagcgccgactacgacagggtgctggagaagctgaagaagacagcaacaggctggatgaccacaattaacggcaaggagctgaaggtggagggccagattacctactacaacagatacaagagacagaacgtagtcaaggacctgtccgtcgagctggatagactgagcgaagaatctgtgaacaacgacatctcctcctggacaaagggcagaagcggagaagctctgagcctcctgaagaaaagattctcccatagacccgtgcaggagaagttcgtgtgcctgaactgcggcttcgagacacacgcagccgagcaagccgccctgaacatcgccagatcctggctgttcctgcggagccaggagtacaagaaataccagacaaacaagacaaccggcaacaccgataagagagccttcgtcgagacctggcagtccttttaccggaagaagcttaaggaggtgtggaaacctgccgtgcggtctggcggatctggcggaggctccagctacggcagcctgagcttcgaggacgtgaccgtgggcttcagccaggaggagtggcagcacctggaccccgcccagaggaccctgtacagggacgtgatgctggagaactacagccacctggtggccgtgggctgctgcgtgcccaagcccgacgtgatcttcaggctggagcagggccagcagccctggctgatcgaggaggagagcctggaccagagctgccccgaggtgtgcagggtgggcggcccaagcagcggcgcccctcctcccagcggcggcagcccagccggctccccaacctctaccgaggagggcacctctgagtccgccacccccgagagcggccctggcacctccaccgagcccagcgagggcagcgcacccggcagccctgccggcagccccacctccacagaggagggaaccagcaccgagcccagcgaaggcagcgccccaggcaccagcaccgagcctagtgagcaggagattaaacggatcaacaagatcagaagaagacttgtgaaagacagcaacaccaagaaggccggcaagacaggccccatgaaaaccctgctggttagagtgatgacacccgatctgagagagcggctggaaaacctgagaaagaagcctgaaaatatcccccagcccatcagcaatacatctagagccaacctgaataagctgctgaccgattacaccgaaatgaagaaggcgatcctgcatgtgtactgggaagagttccagaaggaccctgtgggcctgatgagccgggtggcccagcctgccagcaagaagatcgatcagaacaagctgaaacctgagatggacgagaagggcaacctgaccaccgccggctttgcctgctctcagtgtggccagcccctgttcgtgtacaagctggagcaggtgtctgagaagggcaaggcttacaccaactacttcggacggtgcaatgtggccgagcacgaaaagctgatcctgctggcccagctgaagcccgagaaggatagcgacgaagccgtgacatatagcctgggaaagtttgggcagagggccctggatttctacagcattcatgtgaccaaggagtccacccaccccgtgaagcccctggcccagatcgccggaaacagatacgcctccggacctgtgggaaaggccctgagcgacgcatgtatgggcacaatcgcctccttcctgtctaagtaccaggacatcatcatcgaacaccagaaggtggtgaagggcaaccagaagagactggagagcctgcgggagctggccggcaaggaaaacctggaataccctagcgtgaccctgccacctcagcctcacaccaaggagggcgttgatgcctacaacgaagtgatcgcccgggtgcgaatgtgggtgaacctgaacctgtggcagaagctgaagctaagcagagatgatgccaagcctctgctgagactgaagggattcccttcctttcctctggtcgagagacaggccaacgaagtggactggtgggacatggtgtgtaacgtgaagaagctgatcaacgagaaaaaggaggatggcaaggtgttttggcagaatctggctggctacaagagacaggaagccctgagaccatacctgagcagcgaggaagatcggaagaagggaaagaaattcgctcggtaccagctgggcgacctgctgctgcacctggaaaagaagcacggcgaggactggggaaaggtgtacgacgaggcctgggagcggattgacaagaaagtggaaggcctgagcaagcacatcaagctggaagaggaacggagaagcgaggacgcccagagcaaggccgccctgaccgactggctgcgggctaaggccagcttcgtgatcgagggcctgaaggaggccgacaaggacgagttctgcagatgcgagctgaagctgcagaagtggtacggggacctgcggggaaagcccttcgccatcgaagccgagaacagcatcctggacatcagcggcttcagcaagcagtacaactgtgccttcatctggcagaaggacggcgtgaagaagctgaacctgtacctgatcatcaactacttcaagggcggcaagctgcggttcaagaagatcaaacctgaagccttcgaagccaacagattctacaccgtgatcaacaaaaagagcggcgagatcgtgcccatggaggtgaacttcaacttcgacgaccccaacctgatcatcctgcctctggcctttggcaagagacagggcagagaattcatctggaacgacctgctgtccctggaaaccggcagcctgaagctggccaacggaagagtgatcgagaagacactgtacaacagaagaacccggcaggatgagcctgccctgttcgtggccctgaccttcgagcggcgggaggtcctggactcctccaatatcaaaccaatgaacctgatcggcgtggcaagaggcgaaaacatccccgccgtgatcgccctgaccgaccccgagggctgcccactgagccggtttaaggatagcctgggaaacccaacccacatcctgagaatcggcgagagctataaggagaagcagcggaccatccaggccaagaaggaggtggagcagcggagagccggcggctacagccggaagtacgccagcaaagccaagaatctggcagacgatatggtgagaaacaccgctagagatctgctgtactacgccgtgacccaggatgccatgctgatcttcgccaacctgagccggggcttcggccggcagggcaagcggaccttcatggccgagagacagtacacacggatggaggactggctgaccgccaagctggcctacgagggcctgagcaagacctacctgtccaagacactggcccagtacacctccaagacatgcagcaactgtgggtttaccatcaccagcgccgactacgacagggtgctggagaagctgaagaagacagcaacaggctggatgaccacaattaacggcaaggagctgaaggtggagggccagattacctactacaacagatacaagagacagaacgtagtcaaggacctgtccgtcgagctggatagactgagcgaagaatctgtgaacaacgacatctcctcctggacaaagggcagaagcggagaagctctgagcctcctgaagaaaagattctcccatagacccgtgcaggagaagttcgtgtgcctgaactgcggcttcgagacacacgcagccgagcaagccgccctgaacatcgccagatcctggctgttcctgcggagccaggagtacaagaaataccagacaaacaagacaaccggcaacaccgataagagagccttcgtcgagacctggcagtccttttaccggaagaagcttaaggaggtgtggaaacctgccgtgcggtctggcggatctggcggaggctcctagctacggcagcctgagcttcgaggacgtgaccgtgggcttcagccaggaggagtggcagcacctggaccccgcccagaggaccctgtacagggacgtgatgctggagaactacagccacctggtggccgtgggctgctgcgtgcccaagcccgacgtgatcttcaggctggagcagggccagcagccctggctgatcgaggaggagagcctggaccagagctgccccgaggtgtgcagggtgggatctggctccggcagcggccccaagaaaaagagaaaagtctaagctgccttctgcggggcttgccttctggccatgcccttcttctctcccttgcacctgtacctcttggtctttgaataaagcctgagtaggaaggctagcaaaaaaaaaaaaaaaaaaaaaaaaaaaaaaaaaaaaaaaaaaaaaaaaaaaaaaaaaaaaaaaaaaaaaaaaaaaaaaaa

SEQ ID NO: 16234 - RNA, 9485 nt, synthetic construct
  source 1..9485: mol_type = other RNA
aggaaataagagagaaaagaagagtaagaagaaatataagagccaccatggcccctaagaagaagcgtaaagtgagccggatggaacgcctcgtctacgaggtgcggcagaagtgcagaaacatcgaggacatctgcatctcctgcggatctctgaacgtgaccctggagcacccactgttcatcggcggcatgtgccagaactgtaaaaactgttttctggagtgtgcctatcaatacgacgatgacggctaccagagctactgcaccatctgttgcggcggaagagaggtgctgatgtgtggaaataacaactgctgccggtgcttctgcgtggaatgcgtggacctgctggtgggccccggcgccgcccaggccgctattaaggaagatccttggaactgctacatgtgcggccacaagggcacatacggcctgctgagacggagagaggactggcctagcagactgcagatgttcttcgccaataaccacgaccaggagttcgacccccctaaggtgtaccctcccgtccccgccgagaagagaaagcccatccgggtcctgagcctgttcgatggcatcgccaccggtctgctggtgctgaaggacctgggcatccaggtggataggtacattgcctccgaggtgtgcgaggactccatcaccgtgggaatggtgcgtcatcagggcaagatcatgtacgtgggcgacgtgcggagcgtgacacagaagcatatccaggagtggggccctttcgacctggtgatcggcggcagcccttgcaatgacctgagcatcgtgaacccagcccggaagggcctgtacgagggaaccggcagactgttcttcgagttttacagactgctgcacgacgcccggcctaaggaaggcgacgaccggcccttcttttggctgttcgagaatgtggtggccatgggagtcagcgacaagcgggatattagccggttcctggagagcaaccccgtgatgatcgatgccaaggaagtgagcgccgcccaccgggccagatacttctggggcaatctgcctggcatgaacagacccctggccagcaccgtgaacgacaagctggagctgcaggagtgcctggagcacggccggatcgccaagttcagcaaggtgagaaccatcaccacccgaagcaacagcatcaaacaaggcaaggaccagcactttcctgtgttcatgaacgagaaggaggacatcctgtggtgtaccgagatggagagagtgttcgggttcccagtccactacacagatgtcagcaacatgtctagactggccagacagagactgctgggaagaagctggtccgtccctgtgatcagacacctgttcgcccctctgaaggagtacttcgcctgcgtgagcagcggcaacagcaacgccaacagccggggccccagcttctctagcggcctggtgccactgtccctgagagggagccacatgggccccatggagatctacaaaaccgtgagcgcctggaagcggcagcctgtgcgcgtgctgagcctgtttcggaatatcgataaagtcctgaaaagcctgggattcctggagagcggctctggctccggcggtggcaccctgaagtacgtggaggatgtgacaaacgtggtcagacgggatgtggagaagtggggccccttcgatctggtgtacggcagcacccaacccctgggcagctcttgtgaccggtgccctggctggtacatgtttcagttccaccggatcctgcagtacgccctgccgagacaggagtcccagcggccattcttttggattttcatggacaacttgctgctgaccgaggatgaccaggaaactaccactcggttcctgcagaccgaagccgtgaccctgcaggacgtgagaggccgggactaccagaacgccatgcgggtgtggtccaacatccctggactgaaaagcaagcacgcacctctgacccctaaagaagaggagtacctgcaggcccaggtgcggagcagaagcaagctggacgcccctaaggtggatctgctggtgaagaattgcctcctgcccctgagagagtacttcaagtatttcagccagaatagtctgcccctgggaggcagcggcggcggcgccctggtgacatttgaggacgtcgccgtgcggttcacccaggaggaatgggctctgctggatccttctcagaaaatcctgtaccgggacgtgatgagagagacataccggaatctgacctccgtgggcatcaactgggaatgttgggaccttgaagcctgcttcagaagcctgggaagaaacctgagagtgcaggtggtgaagagaaagtgcgagctgaccaacagcggcccctgcgccgagggcggcccaagcagcggcgcccctcctcccagcggcggcagcccagccggctccccaacctctaccgaggagggcacctctgagtccgccacccccgagagcggccctggcacctccaccgagcccagcgagggcagcgcacccggcagccctgccggcagccccacctccacagaggagggaaccagcaccgagcccagcgaaggcagcgccccaggcaccagcaccgagcctagtgagcaggagattaaacggatcaacaagatcagaagaagacttgtgaaagacagcaacaccaagaaggccggcaagacaggccccatgaaaaccctgctggttagagtgatgacacccgatctgagagagcggctggaaaacctgagaaagaagcctgaaaatatcccccagcccatcagcaatacatctagagccaacctgaataagctgctgaccgattacaccgaaatgaagaaggcgatcctgcatgtgtactgggaagagttccagaaggaccctgtgggcctgatgagccgggtggcccagcctgccagcaagaagatcgatcagaacaagctgaaacctgagatggacgagaagggcaacctgaccaccgccggctttgcctgctctcagtgtggccagcccctgttcgtgtacaagctggagcaggtgtctgagaagggcaaggcttacaccaactacttcggacggtgcaatgtggccgagcacgaaaagctgatcctgctggcccagctgaagcccgagaaggatagcgacgaagccgtgacatatagcctgggaaagtttgggcagagggccctggatttctacagcattcatgtgaccaaggagtccacccaccccgtgaagcccctggcccagatcgccggaaacagatacgcctccggacctgtgggaaaggccctgagcgacgcatgtatgggcacaatcgcctccttcctgtctaagtaccaggacatcatcatcgaacaccagaaggtggtgaagggcaaccagaagagactggagagcctgcgggagctggccggcaaggaaaacctggaataccctagcgtgaccctgccacctcagcctcacaccaaggagggcgttgatgcctacaacgaagtgatcgcccgggtgcgaatgtgggtgaacctgaacctgtggcagaagctgaagctaagcagagatgatgccaagcctctgctgagactgaagggattcccttcctttcctctggtcgagagacaggccaacgaagtggactggtgggacatggtgtgtaacgtgaagaagctgatcaacgagaaaaaggaggatggcaaggtgttttggcagaatctggctggctacaagagacaggaagccctgagaccatacctgagcagcgaggaagatcggaagaagggaaagaaattcgctcggtaccagctgggcgacctgctgctgcacctggaaaagaagcacggcgaggactggggaaaggtgtacgacgaggcctgggagcggattgacaagaaagtggaaggcctgagcaagcacatcaagctggaagaggaacggagaagcgaggacgcccagagcaaggccgccctgaccgactggctgcgggctaaggccagcttcgtgatcgagggcctgaaggaggccgacaaggacgagttctgcagatgcgagctgaagctgcagaagtggtacggggacctgcggggaaagcccttcgccatcgaagccgagaacagcatcctggacatcagcggcttcagcaagcagtacaactgtgccttcatctggcagaaggacggcgtgaagaagctgaacctgtacctgatcatcaactacttcaagggcggcaagctgcggttcaagaagatcaaacctgaagccttcgaagccaacagattctacaccgtgatcaacaaaaagagcggcgagatcgtgcccatggaggtgaacttcaacttcgacgaccccaacctgatcatcctgcctctggcctttggcaagagacagggcagagaattcatctggaacgacctgctgtccctggaaaccggcagcctgaagctggccaacggaagagtgatcgagaagacactgtacaacagaagaacccggcaggatgagcctgccctgttcgtggccctgaccttcgagcggcgggaggtcctggactcctccaatatcaaaccaatgaacctgatcggcgtggcaagaggcgaaaacatccccgccgtgatcgccctgaccgaccccgagggctgcccactgagccggtttaaggatagcctgggaaacccaacccacatcctgagaatcggcgagagctataaggagaagcagcggaccatccaggccaagaaggaggtggagcagcggagagccggcggctacagccggaagtacgccagcaaagccaagaatctggcagacgatatggtgagaaacaccgctagagatctgctgtactacgccgtgacccaggatgccatgctgatcttcgccaacctgagccggggcttcggccggcagggcaagcggaccttcatggccgagagacagtacacacggatggaggactggctgaccgccaagctggcctacgagggcctgagcaagacctacctgtccaagacactggcccagtacacctccaagacatgcagcaactgtgggtttaccatcaccagcgccgactacgacagggtgctggagaagctgaagaagacagcaacaggctggatgaccacaattaacggcaaggagctgaaggtggagggccagattacctactacaacagatacaagagacagaacgtagtcaaggacctgtccgtcgagctggatagactgagcgaagaatctgtgaacaacgacatctcctcctggacaaagggcagaagcggagaagctctgagcctcctgaagaaaagattctcccatagacccgtgcaggagaagttcgtgtgcctgaactgcggcttcgagacacacgcagccgagcaagccgccctgaacatcgccagatcctggctgttcctgcggagccaggagtacaagaaataccagacaaacaagacaaccggcaacaccgataagagagccttcgtcgagacctggcagtccttttaccggaagaagcttaaggaggtgtggaaacctgccgtgcggtctggcggatctggcggaggctccagcctggagcccgacagcttcggcgacgtggccgtgctgttcagccaggaggagtgggccaggctggcccccgcccagagggagctgtacagggacgtgatgctggagacctacagccacctggtgagcctgggcctggccgtgagcaagcccgacgtgatcagcttcctggagcagggcaaggagccctggctgggcgagaaggccgccgccggcggcctgggccccgagctggagagcaggggcggcccaagcagcggcgcccctcctcccagcggcggcagcccagccggctccccaacctctaccgaggagggcacctctgagtccgccacccccgagagcggccctggcacctccaccgagcccagcgagggcagcgcacccggcagccctgccggcagccccacctccacagaggagggaaccagcaccgagcccagcgaaggcagcgccccaggcaccagcaccgagcctagtgagcaggagattaaacggatcaacaagatcagaagaagacttgtgaaagacagcaacaccaagaaggccggcaagacaggccccatgaaaaccctgctggttagagtgatgacacccgatctgagagagcggctggaaaacctgagaaagaagcctgaaaatatcccccagcccatcagcaatacatctagagccaacctgaataagctgctgaccgattacaccgaaatgaagaaggcgatcctgcatgtgtactgggaagagttccagaaggaccctgtgggcctgatgagccgggtggcccagcctgccagcaagaagatcgatcagaacaagctgaaacctgagatggacgagaagggcaacctgaccaccgccggctttgcctgctctcagtgtggccagcccctgttcgtgtacaagctggagcaggtgtctgagaagggcaaggcttacaccaactacttcggacggtgcaatgtggccgagcacgaaaagctgatcctgctggcccagctgaagcccgagaaggatagcgacgaagccgtgacatatagcctgggaaagtttgggcagagggccctggatttctacagcattcatgtgaccaaggagtccacccaccccgtgaagcccctggcccagatcgccggaaacagatacgcctccggacctgtgggaaaggccctgagcgacgcatgtatgggcacaatcgcctccttcctgtctaagtaccaggacatcatcatcgaacaccagaaggtggtgaagggcaaccagaagagactggagagcctgcgggagctggccggcaaggaaaacctggaataccctagcgtgaccctgccacctcagcctcacaccaaggagggcgttgatgcctacaacgaagtgatcgcccgggtgcgaatgtgggtgaacctgaacctgtggcagaagctgaagctaagcagagatgatgccaagcctctgctgagactgaagggattcccttcctttcctctggtcgagagacaggccaacgaagtggactggtgggacatggtgtgtaacgtgaagaagctgatcaacgagaaaaaggaggatggcaaggtgttttggcagaatctggctggctacaagagacaggaagccctgagaccatacctgagcagcgaggaagatcggaagaagggaaagaaattcgctcggtaccagctgggcgacctgctgctgcacctggaaaagaagcacggcgaggactggggaaaggtgtacgacgaggcctgggagcggattgacaagaaagtggaaggcctgagcaagcacatcaagctggaagaggaacggagaagcgaggacgcccagagcaaggccgccctgaccgactggctgcgggctaaggccagcttcgtgatcgagggcctgaaggaggccgacaaggacgagttctgcagatgcgagctgaagctgcagaagtggtacggggacctgcggggaaagcccttcgccatcgaagccgagaacagcatcctggacatcagcggcttcagcaagcagtacaactgtgccttcatctggcagaaggacggcgtgaagaagctgaacctgtacctgatcatcaactacttcaagggcggcaagctgcggttcaagaagatcaaacctgaagccttcgaagccaacagattctacaccgtgatcaacaaaaagagcggcgagatcgtgcccatggaggtgaacttcaacttcgacgaccccaacctgatcatcctgcctctggcctttggcaagagacagggcagagaattcatctggaacgacctgctgtccctggaaaccggcagcctgaagctggccaacggaagagtgatcgagaagacactgtacaacagaagaacccggcaggatgagcctgccctgttcgtggccctgaccttcgagcggcgggaggtcctggactcctccaatatcaaaccaatgaacctgatcggcgtggcaagaggcgaaaacatccccgccgtgatcgccctgaccgaccccgagggctgcccactgagccggtttaaggatagcctgggaaacccaacccacatcctgagaatcggcgagagctataaggagaagcagcggaccatccaggccaagaaggaggtggagcagcggagagccggcggctacagccggaagtacgccagcaaagccaagaatctggcagacgatatggtgagaaacaccgctagagatctgctgtactacgccgtgacccaggatgccatgctgatcttcgccaacctgagccggggcttcggccggcagggcaagcggaccttcatggccgagagacagtacacacggatggaggactggctgaccgccaagctggcctacgagggcctgagcaagacctacctgtccaagacactggcccagtacacctccaagacatgcagcaactgtgggtttaccatcaccagcgccgactacgacagggtgctggagaagctgaagaagacagcaacaggctggatgaccacaattaacggcaaggagctgaaggtggagggccagattacctactacaacagatacaagagacagaacgtagtcaaggacctgtccgtcgagctggatagactgagcgaagaatctgtgaacaacgacatctcctcctggacaaagggcagaagcggagaagctctgagcctcctgaagaaaagattctcccatagacccgtgcaggagaagttcgtgtgcctgaactgcggcttcgagacacacgcagccgagcaagccgccctgaacatcgccagatcctggctgttcctgcggagccaggagtacaagaaataccagacaaacaagacaaccggcaacaccgataagagagccttcgtcgagacctggcagtccttttaccggaagaagcttaaggaggtgtggaaacctgccgtgcggtctggcggatctggcggaggctcctagcctggagcccgacagcttcggcgacgtggccgtgctgttcagccaggaggagtgggccaggctggcccccgcccagagggagctgtacagggacgtgatgctggagacctacagccacctggtgagcctgggcctggccgtgagcaagcccgacgtgatcagcttcctggagcagggcaaggagccctggctgggcgagaaggccgccgccggcggcctgggccccgagctggagagcaggggatctggctccggcagcggccccaagaaaaagagaaaagtctaagctgccttctgcggggcttgccttctggccatgcccttcttctctcccttgcacctgtacctcttggtctttgaataaagcctgagtaggaaggctagcaaaaaaaaaaaaaaaaaaaaaaaaaaaaaaaaaaaaaaaaaaaaaaaaaaaaaaaaaaaaaaaaaaaaaaaaaaaaaaaa

SEQ ID NO: 16235 - RNA, 9485 nt, synthetic construct
  source 1..9485: mol_type = other RNA
aggaaataagagagaaaagaagagtaagaagaaatataagagccaccatggcccctaagaagaagcgtaaagtgagccggatggaacgcctcgtctacgaggtgcggcagaagtgcagaaacatcgaggacatctgcatctcctgcggatctctgaacgtgaccctggagcacccactgttcatcggcggcatgtgccagaactgtaaaaactgttttctggagtgtgcctatcaatacgacgatgacggctaccagagctactgcaccatctgttgcggcggaagagaggtgctgatgtgtggaaataacaactgctgccggtgcttctgcgtggaatgcgtggacctgctggtgggccccggcgccgcccaggccgctattaaggaagatccttggaactgctacatgtgcggccacaagggcacatacggcctgctgagacggagagaggactggcctagcagactgcagatgttcttcgccaataaccacgaccaggagttcgacccccctaaggtgtaccctcccgtccccgccgagaagagaaagcccatccgggtcctgagcctgttcgatggcatcgccaccggtctgctggtgctgaaggacctgggcatccaggtggataggtacattgcctccgaggtgtgcgaggactccatcaccgtgggaatggtgcgtcatcagggcaagatcatgtacgtgggcgacgtgcggagcgtgacacagaagcatatccaggagtggggccctttcgacctggtgatcggcggcagcccttgcaatgacctgagcatcgtgaacccagcccggaagggcctgtacgagggaaccggcagactgttcttcgagttttacagactgctgcacgacgcccggcctaaggaaggcgacgaccggcccttcttttggctgttcgagaatgtggtggccatgggagtcagcgacaagcgggatattagccggttcctggagagcaaccccgtgatgatcgatgccaaggaagtgagcgccgcccaccgggccagatacttctggggcaatctgcctggcatgaacagacccctggccagcaccgtgaacgacaagctggagctgcaggagtgcctggagcacggccggatcgccaagttcagcaaggtgagaaccatcaccacccgaagcaacagcatcaaacaaggcaaggaccagcactttcctgtgttcatgaacgagaaggaggacatcctgtggtgtaccgagatggagagagtgttcgggttcccagtccactacacagatgtcagcaacatgtctagactggccagacagagactgctgggaagaagctggtccgtccctgtgatcagacacctgttcgcccctctgaaggagtacttcgcctgcgtgagcagcggcaacagcaacgccaacagccggggccccagcttctctagcggcctggtgccactgtccctgagagggagccacatgggccccatggagatctacaaaaccgtgagcgcctggaagcggcagcctgtgcgcgtgctgagcctgtttcggaatatcgataaagtcctgaaaagcctgggattcctggagagcggctctggctccggcggtggcaccctgaagtacgtggaggatgtgacaaacgtggtcagacgggatgtggagaagtggggccccttcgatctggtgtacggcagcacccaacccctgggcagctcttgtgaccggtgccctggctggtacatgtttcagttccaccggatcctgcagtacgccctgccgagacaggagtcccagcggccattcttttggattttcatggacaacttgctgctgaccgaggatgaccaggaaactaccactcggttcctgcagaccgaagccgtgaccctgcaggacgtgagaggccgggactaccagaacgccatgcgggtgtggtccaacatccctggactgaaaagcaagcacgcacctctgacccctaaagaagaggagtacctgcaggcccaggtgcggagcagaagcaagctggacgcccctaaggtggatctgctggtgaagaattgcctcctgcccctgagagagtacttcaagtatttcagccagaatagtctgcccctgggaggcagcggcggcggcgccctggtgacatttgaggacgtcgccgtgcggttcacccaggaggaatgggctctgctggatccttctcagaaaatcctgtaccgggacgtgatgagagagacataccggaatctgacctccgtgggcatcaactgggaatgttgggaccttgaagcctgcttcagaagcctgggaagaaacctgagagtgcaggtggtgaagagaaagtgcgagctgaccaacagcggcccctgcgccgagggcggcccaagcagcggcgcccctcctcccagcggcggcagcccagccggctccccaacctctaccgaggagggcacctctgagtccgccacccccgagagcggccctggcacctccaccgagcccagcgagggcagcgcacccggcagccctgccggcagccccacctccacagaggagggaaccagcaccgagcccagcgaaggcagcgccccaggcaccagcaccgagcctagtgagcaggagattaaacggatcaacaagatcagaagaagacttgtgaaagacagcaacaccaagaaggccggcaagacaggccccatgaaaaccctgctggttagagtgatgacacccgatctgagagagcggctggaaaacctgagaaagaagcctgaaaatatcccccagcccatcagcaatacatctagagccaacctgaataagctgctgaccgattacaccgaaatgaagaaggcgatcctgcatgtgtactgggaagagttccagaaggaccctgtgggcctgatgagccgggtggcccagcctgccagcaagaagatcgatcagaacaagctgaaacctgagatggacgagaagggcaacctgaccaccgccggctttgcctgctctcagtgtggccagcccctgttcgtgtacaagctggagcaggtgtctgagaagggcaaggcttacaccaactacttcggacggtgcaatgtggccgagcacgaaaagctgatcctgctggcccagctgaagcccgagaaggatagcgacgaagccgtgacatatagcctgggaaagtttgggcagagggccctggatttctacagcattcatgtgaccaaggagtccacccaccccgtgaagcccctggcccagatcgccggaaacagatacgcctccggacctgtgggaaaggccctgagcgacgcatgtatgggcacaatcgcctccttcctgtctaagtaccaggacatcatcatcgaacaccagaaggtggtgaagggcaaccagaagagactggagagcctgcgggagctggccggcaaggaaaacctggaataccctagcgtgaccctgccacctcagcctcacaccaaggagggcgttgatgcctacaacgaagtgatcgcccgggtgcgaatgtgggtgaacctgaacctgtggcagaagctgaagctaagcagagatgatgccaagcctctgctgagactgaagggattcccttcctttcctctggtcgagagacaggccaacgaagtggactggtgggacatggtgtgtaacgtgaagaagctgatcaacgagaaaaaggaggatggcaaggtgttttggcagaatctggctggctacaagagacaggaagccctgagaccatacctgagcagcgaggaagatcggaagaagggaaagaaattcgctcggtaccagctgggcgacctgctgctgcacctggaaaagaagcacggcgaggactggggaaaggtgtacgacgaggcctgggagcggattgacaagaaagtggaaggcctgagcaagcacatcaagctggaagaggaacggagaagcgaggacgcccagagcaaggccgccctgaccgactggctgcgggctaaggccagcttcgtgatcgagggcctgaaggaggccgacaaggacgagttctgcagatgcgagctgaagctgcagaagtggtacggggacctgcggggaaagcccttcgccatcgaagccgagaacagcatcctggacatcagcggcttcagcaagcagtacaactgtgccttcatctggcagaaggacggcgtgaagaagctgaacctgtacctgatcatcaactacttcaagggcggcaagctgcggttcaagaagatcaaacctgaagccttcgaagccaacagattctacaccgtgatcaacaaaaagagcggcgagatcgtgcccatggaggtgaacttcaacttcgacgaccccaacctgatcatcctgcctctggcctttggcaagagacagggcagagaattcatctggaacgacctgctgtccctggaaaccggcagcctgaagctggccaacggaagagtgatcgagaagacactgtacaacagaagaacccggcaggatgagcctgccctgttcgtggccctgaccttcgagcggcgggaggtcctggactcctccaatatcaaaccaatgaacctgatcggcgtggcaagaggcgaaaacatccccgccgtgatcgccctgaccgaccccgagggctgcccactgagccggtttaaggatagcctgggaaacccaacccacatcctgagaatcggcgagagctataaggagaagcagcggaccatccaggccaagaaggaggtggagcagcggagagccggcggctacagccggaagtacgccagcaaagccaagaatctggcagacgatatggtgagaaacaccgctagagatctgctgtactacgccgtgacccaggatgccatgctgatcttcgccaacctgagccggggcttcggccggcagggcaagcggaccttcatggccgagagacagtacacacggatggaggactggctgaccgccaagctggcctacgagggcctgagcaagacctacctgtccaagacactggcccagtacacctccaagacatgcagcaactgtgggtttaccatcaccagcgccgactacgacagggtgctggagaagctgaagaagacagcaacaggctggatgaccacaattaacggcaaggagctgaaggtggagggccagattacctactacaacagatacaagagacagaacgtagtcaaggacctgtccgtcgagctggatagactgagcgaagaatctgtgaacaacgacatctcctcctggacaaagggcagaagcggagaagctctgagcctcctgaagaaaagattctcccatagacccgtgcaggagaagttcgtgtgcctgaactgcggcttcgagacacacgcagccgagcaagccgccctgaacatcgccagatcctggctgttcctgcggagccaggagtacaagaaataccagacaaacaagacaaccggcaacaccgataagagagccttcgtcgagacctggcagtccttttaccggaagaagcttaaggaggtgtggaaacctgccgtgcggtctggcggatctggcggaggctccgcccacgacctggtggtgttcagggacgtgagcgtggacttcagccaggaggagtgggagtgcctgaacagctaccagaggaacctgtacagggacgtgatcctggagaactacagcaacctggtgagcctggccggctgcagcatcagcaagcccgacgtgatcaccctgctggagcagggcaaggagccctggatggtggtgaggaacgagaagaggaggtggaacctggacctggagagcggcggcccaagcagcggcgcccctcctcccagcggcggcagcccagccggctccccaacctctaccgaggagggcacctctgagtccgccacccccgagagcggccctggcacctccaccgagcccagcgagggcagcgcacccggcagccctgccggcagccccacctccacagaggagggaaccagcaccgagcccagcgaaggcagcgccccaggcaccagcaccgagcctagtgagcaggagattaaacggatcaacaagatcagaagaagacttgtgaaagacagcaacaccaagaaggccggcaagacaggccccatgaaaaccctgctggttagagtgatgacacccgatctgagagagcggctggaaaacctgagaaagaagcctgaaaatatcccccagcccatcagcaatacatctagagccaacctgaataagctgctgaccgattacaccgaaatgaagaaggcgatcctgcatgtgtactgggaagagttccagaaggaccctgtgggcctgatgagccgggtggcccagcctgccagcaagaagatcgatcagaacaagctgaaacctgagatggacgagaagggcaacctgaccaccgccggctttgcctgctctcagtgtggccagcccctgttcgtgtacaagctggagcaggtgtctgagaagggcaaggcttacaccaactacttcggacggtgcaatgtggccgagcacgaaaagctgatcctgctggcccagctgaagcccgagaaggatagcgacgaagccgtgacatatagcctgggaaagtttgggcagagggccctggatttctacagcattcatgtgaccaaggagtccacccaccccgtgaagcccctggcccagatcgccggaaacagatacgcctccggacctgtgggaaaggccctgagcgacgcatgtatgggcacaatcgcctccttcctgtctaagtaccaggacatcatcatcgaacaccagaaggtggtgaagggcaaccagaagagactggagagcctgcgggagctggccggcaaggaaaacctggaataccctagcgtgaccctgccacctcagcctcacaccaaggagggcgttgatgcctacaacgaagtgatcgcccgggtgcgaatgtgggtgaacctgaacctgtggcagaagctgaagctaagcagagatgatgccaagcctctgctgagactgaagggattcccttcctttcctctggtcgagagacaggccaacgaagtggactggtgggacatggtgtgtaacgtgaagaagctgatcaacgagaaaaaggaggatggcaaggtgttttggcagaatctggctggctacaagagacaggaagccctgagaccatacctgagcagcgaggaagatcggaagaagggaaagaaattcgctcggtaccagctgggcgacctgctgctgcacctggaaaagaagcacggcgaggactggggaaaggtgtacgacgaggcctgggagcggattgacaagaaagtggaaggcctgagcaagcacatcaagctggaagaggaacggagaagcgaggacgcccagagcaaggccgccctgaccgactggctgcgggctaaggccagcttcgtgatcgagggcctgaaggaggccgacaaggacgagttctgcagatgcgagctgaagctgcagaagtggtacggggacctgcggggaaagcccttcgccatcgaagccgagaacagcatcctggacatcagcggcttcagcaagcagtacaactgtgccttcatctggcagaaggacggcgtgaagaagctgaacctgtacctgatcatcaactacttcaagggcggcaagctgcggttcaagaagatcaaacctgaagccttcgaagccaacagattctacaccgtgatcaacaaaaagagcggcgagatcgtgcccatggaggtgaacttcaacttcgacgaccccaacctgatcatcctgcctctggcctttggcaagagacagggcagagaattcatctggaacgacctgctgtccctggaaaccggcagcctgaagctggccaacggaagagtgatcgagaagacactgtacaacagaagaacccggcaggatgagcctgccctgttcgtggccctgaccttcgagcggcgggaggtcctggactcctccaatatcaaaccaatgaacctgatcggcgtggcaagaggcgaaaacatccccgccgtgatcgccctgaccgaccccgagggctgcccactgagccggtttaaggatagcctgggaaacccaacccacatcctgagaatcggcgagagctataaggagaagcagcggaccatccaggccaagaaggaggtggagcagcggagagccggcggctacagccggaagtacgccagcaaagccaagaatctggcagacgatatggtgagaaacaccgctagagatctgctgtactacgccgtgacccaggatgccatgctgatcttcgccaacctgagccggggcttcggccggcagggcaagcggaccttcatggccgagagacagtacacacggatggaggactggctgaccgccaagctggcctacgagggcctgagcaagacctacctgtccaagacactggcccagtacacctccaagacatgcagcaactgtgggtttaccatcaccagcgccgactacgacagggtgctggagaagctgaagaagacagcaacaggctggatgaccacaattaacggcaaggagctgaaggtggagggccagattacctactacaacagatacaagagacagaacgtagtcaaggacctgtccgtcgagctggatagactgagcgaagaatctgtgaacaacgacatctcctcctggacaaagggcagaagcggagaagctctgagcctcctgaagaaaagattctcccatagacccgtgcaggagaagttcgtgtgcctgaactgcggcttcgagacacacgcagccgagcaagccgccctgaacatcgccagatcctggctgttcctgcggagccaggagtacaagaaataccagacaaacaagacaaccggcaacaccgataagagagccttcgtcgagacctggcagtccttttaccggaagaagcttaaggaggtgtggaaacctgccgtgcggtctggcggatctggcggaggctcctgcccacgacctggtggtgttcagggacgtgagcgtggacttcagccaggaggagtgggagtgcctgaacagctaccagaggaacctgtacagggacgtgatcctggagaactacagcaacctggtgagcctggccggctgcagcatcagcaagcccgacgtgatcaccctgctggagcagggcaaggagccctggatggtggtgaggaacgagaagaggaggtggaacctggacctggagagcggatctggctccggcagcggccccaagaaaaagagaaaagtctaagctgccttctgcggggcttgccttctggccatgcccttcttctctcccttgcacctgtacctcttggtctttgaataaagcctgagtaggaaggctagcaaaaaaaaaaaaaaaaaaaaaaaaaaaaaaaaaaaaaaaaaaaaaaaaaaaaaaaaaaaaaaaaaaaaaaaaaaaaaaaa

SEQ ID NO: 16236 - RNA, 9485 nt, synthetic construct
  source 1..9485: mol_type = other RNA
aggaaataagagagaaaagaagagtaagaagaaatataagagccaccatggcccctaagaagaagcgtaaagtgagccggatggaacgcctcgtctacgaggtgcggcagaagtgcagaaacatcgaggacatctgcatctcctgcggatctctgaacgtgaccctggagcacccactgttcatcggcggcatgtgccagaactgtaaaaactgttttctggagtgtgcctatcaatacgacgatgacggctaccagagctactgcaccatctgttgcggcggaagagaggtgctgatgtgtggaaataacaactgctgccggtgcttctgcgtggaatgcgtggacctgctggtgggccccggcgccgcccaggccgctattaaggaagatccttggaactgctacatgtgcggccacaagggcacatacggcctgctgagacggagagaggactggcctagcagactgcagatgttcttcgccaataaccacgaccaggagttcgacccccctaaggtgtaccctcccgtccccgccgagaagagaaagcccatccgggtcctgagcctgttcgatggcatcgccaccggtctgctggtgctgaaggacctgggcatccaggtggataggtacattgcctccgaggtgtgcgaggactccatcaccgtgggaatggtgcgtcatcagggcaagatcatgtacgtgggcgacgtgcggagcgtgacacagaagcatatccaggagtggggccctttcgacctggtgatcggcggcagcccttgcaatgacctgagcatcgtgaacccagcccggaagggcctgtacgagggaaccggcagactgttcttcgagttttacagactgctgcacgacgcccggcctaaggaaggcgacgaccggcccttcttttggctgttcgagaatgtggtggccatgggagtcagcgacaagcgggatattagccggttcctggagagcaaccccgtgatgatcgatgccaaggaagtgagcgccgcccaccgggccagatacttctggggcaatctgcctggcatgaacagacccctggccagcaccgtgaacgacaagctggagctgcaggagtgcctggagcacggccggatcgccaagttcagcaaggtgagaaccatcaccacccgaagcaacagcatcaaacaaggcaaggaccagcactttcctgtgttcatgaacgagaaggaggacatcctgtggtgtaccgagatggagagagtgttcgggttcccagtccactacacagatgtcagcaacatgtctagactggccagacagagactgctgggaagaagctggtccgtccctgtgatcagacacctgttcgcccctctgaaggagtacttcgcctgcgtgagcagcggcaacagcaacgccaacagccggggccccagcttctctagcggcctggtgccactgtccctgagagggagccacatgggccccatggagatctacaaaaccgtgagcgcctggaagcggcagcctgtgcgcgtgctgagcctgtttcggaatatcgataaagtcctgaaaagcctgggattcctggagagcggctctggctccggcggtggcaccctgaagtacgtggaggatgtgacaaacgtggtcagacgggatgtggagaagtggggccccttcgatctggtgtacggcagcacccaacccctgggcagctcttgtgaccggtgccctggctggtacatgtttcagttccaccggatcctgcagtacgccctgccgagacaggagtcccagcggccattcttttggattttcatggacaacttgctgctgaccgaggatgaccaggaaactaccactcggttcctgcagaccgaagccgtgaccctgcaggacgtgagaggccgggactaccagaacgccatgcgggtgtggtccaacatccctggactgaaaagcaagcacgcacctctgacccctaaagaagaggagtacctgcaggcccaggtgcggagcagaagcaagctggacgcccctaaggtggatctgctggtgaagaattgcctcctgcccctgagagagtacttcaagtatttcagccagaatagtctgcccctgggaggcagcggcggcggcgccctggtgacatttgaggacgtcgccgtgcggttcacccaggaggaatgggctctgctggatccttctcagaaaatcctgtaccgggacgtgatgagagagacataccggaatctgacctccgtgggcatcaactgggaatgttgggaccttgaagcctgcttcagaagcctgggaagaaacctgagagtgcaggtggtgaagagaaagtgcgagctgaccaacagcggcccctgcgccgagggcggcccaagcagcggcgcccctcctcccagcggcggcagcccagccggctccccaacctctaccgaggagggcacctctgagtccgccacccccgagagcggccctggcacctccaccgagcccagcgagggcagcgcacccggcagccctgccggcagccccacctccacagaggagggaaccagcaccgagcccagcgaaggcagcgccccaggcaccagcaccgagcctagtgagcaggagattaaacggatcaacaagatcagaagaagacttgtgaaagacagcaacaccaagaaggccggcaagacaggccccatgaaaaccctgctggttagagtgatgacacccgatctgagagagcggctggaaaacctgagaaagaagcctgaaaatatcccccagcccatcagcaatacatctagagccaacctgaataagctgctgaccgattacaccgaaatgaagaaggcgatcctgcatgtgtactgggaagagttccagaaggaccctgtgggcctgatgagccgggtggcccagcctgccagcaagaagatcgatcagaacaagctgaaacctgagatggacgagaagggcaacctgaccaccgccggctttgcctgctctcagtgtggccagcccctgttcgtgtacaagctggagcaggtgtctgagaagggcaaggcttacaccaactacttcggacggtgcaatgtggccgagcacgaaaagctgatcctgctggcccagctgaagcccgagaaggatagcgacgaagccgtgacatatagcctgggaaagtttgggcagagggccctggatttctacagcattcatgtgaccaaggagtccacccaccccgtgaagcccctggcccagatcgccggaaacagatacgcctccggacctgtgggaaaggccctgagcgacgcatgtatgggcacaatcgcctccttcctgtctaagtaccaggacatcatcatcgaacaccagaaggtggtgaagggcaaccagaagagactggagagcctgcgggagctggccggcaaggaaaacctggaataccctagcgtgaccctgccacctcagcctcacaccaaggagggcgttgatgcctacaacgaagtgatcgcccgggtgcgaatgtgggtgaacctgaacctgtggcagaagctgaagctaagcagagatgatgccaagcctctgctgagactgaagggattcccttcctttcctctggtcgagagacaggccaacgaagtggactggtgggacatggtgtgtaacgtgaagaagctgatcaacgagaaaaaggaggatggcaaggtgttttggcagaatctggctggctacaagagacaggaagccctgagaccatacctgagcagcgaggaagatcggaagaagggaaagaaattcgctcggtaccagctgggcgacctgctgctgcacctggaaaagaagcacggcgaggactggggaaaggtgtacgacgaggcctgggagcggattgacaagaaagtggaaggcctgagcaagcacatcaagctggaagaggaacggagaagcgaggacgcccagagcaaggccgccctgaccgactggctgcgggctaaggccagcttcgtgatcgagggcctgaaggaggccgacaaggacgagttctgcagatgcgagctgaagctgcagaagtggtacggggacctgcggggaaagcccttcgccatcgaagccgagaacagcatcctggacatcagcggcttcagcaagcagtacaactgtgccttcatctggcagaaggacggcgtgaagaagctgaacctgtacctgatcatcaactacttcaagggcggcaagctgcggttcaagaagatcaaacctgaagccttcgaagccaacagattctacaccgtgatcaacaaaaagagcggcgagatcgtgcccatggaggtgaacttcaacttcgacgaccccaacctgatcatcctgcctctggcctttggcaagagacagggcagagaattcatctggaacgacctgctgtccctggaaaccggcagcctgaagctggccaacggaagagtgatcgagaagacactgtacaacagaagaacccggcaggatgagcctgccctgttcgtggccctgaccttcgagcggcgggaggtcctggactcctccaatatcaaaccaatgaacctgatcggcgtggcaagaggcgaaaacatccccgccgtgatcgccctgaccgaccccgagggctgcccactgagccggtttaaggatagcctgggaaacccaacccacatcctgagaatcggcgagagctataaggagaagcagcggaccatccaggccaagaaggaggtggagcagcggagagccggcggctacagccggaagtacgccagcaaagccaagaatctggcagacgatatggtgagaaacaccgctagagatctgctgtactacgccgtgacccaggatgccatgctgatcttcgccaacctgagccggggcttcggccggcagggcaagcggaccttcatggccgagagacagtacacacggatggaggactggctgaccgccaagctggcctacgagggcctgagcaagacctacctgtccaagacactggcccagtacacctccaagacatgcagcaactgtgggtttaccatcaccagcgccgactacgacagggtgctggagaagctgaagaagacagcaacaggctggatgaccacaattaacggcaaggagctgaaggtggagggccagattacctactacaacagatacaagagacagaacgtagtcaaggacctgtccgtcgagctggatagactgagcgaagaatctgtgaacaacgacatctcctcctggacaaagggcagaagcggagaagctctgagcctcctgaagaaaagattctcccatagacccgtgcaggagaagttcgtgtgcctgaactgcggcttcgagacacacgcagccgagcaagccgccctgaacatcgccagatcctggctgttcctgcggagccaggagtacaagaaataccagacaaacaagacaaccggcaacaccgataagagagccttcgtcgagacctggcagtccttttaccggaagaagcttaaggaggtgtggaaacctgccgtgcggtctggcggatctggcggaggctccagcgtgatgttcagcgacgtgagcatcgacttcagcctggaggagtgggagttcctgaacctggagcagagggacctgtacagggacgtgatgctggagaactacagcaacctggtgagcctgggctgcttcatcagcaagcccgacgtgatcagcctgctggagcagggcaaggagccctggaaggtggtgaggcagggcaggaggcagtaccccgacctggagaccaactacgagatcaagggcggcccaagcagcggcgcccctcctcccagcggcggcagcccagccggctccccaacctctaccgaggagggcacctctgagtccgccacccccgagagcggccctggcacctccaccgagcccagcgagggcagcgcacccggcagccctgccggcagccccacctccacagaggagggaaccagcaccgagcccagcgaaggcagcgccccaggcaccagcaccgagcctagtgagcaggagattaaacggatcaacaagatcagaagaagacttgtgaaagacagcaacaccaagaaggccggcaagacaggccccatgaaaaccctgctggttagagtgatgacacccgatctgagagagcggctggaaaacctgagaaagaagcctgaaaatatcccccagcccatcagcaatacatctagagccaacctgaataagctgctgaccgattacaccgaaatgaagaaggcgatcctgcatgtgtactgggaagagttccagaaggaccctgtgggcctgatgagccgggtggcccagcctgccagcaagaagatcgatcagaacaagctgaaacctgagatggacgagaagggcaacctgaccaccgccggctttgcctgctctcagtgtggccagcccctgttcgtgtacaagctggagcaggtgtctgagaagggcaaggcttacaccaactacttcggacggtgcaatgtggccgagcacgaaaagctgatcctgctggcccagctgaagcccgagaaggatagcgacgaagccgtgacatatagcctgggaaagtttgggcagagggccctggatttctacagcattcatgtgaccaaggagtccacccaccccgtgaagcccctggcccagatcgccggaaacagatacgcctccggacctgtgggaaaggccctgagcgacgcatgtatgggcacaatcgcctccttcctgtctaagtaccaggacatcatcatcgaacaccagaaggtggtgaagggcaaccagaagagactggagagcctgcgggagctggccggcaaggaaaacctggaataccctagcgtgaccctgccacctcagcctcacaccaaggagggcgttgatgcctacaacgaagtgatcgcccgggtgcgaatgtgggtgaacctgaacctgtggcagaagctgaagctaagcagagatgatgccaagcctctgctgagactgaagggattcccttcctttcctctggtcgagagacaggccaacgaagtggactggtgggacatggtgtgtaacgtgaagaagctgatcaacgagaaaaaggaggatggcaaggtgttttggcagaatctggctggctacaagagacaggaagccctgagaccatacctgagcagcgaggaagatcggaagaagggaaagaaattcgctcggtaccagctgggcgacctgctgctgcacctggaaaagaagcacggcgaggactggggaaaggtgtacgacgaggcctgggagcggattgacaagaaagtggaaggcctgagcaagcacatcaagctggaagaggaacggagaagcgaggacgcccagagcaaggccgccctgaccgactggctgcgggctaaggccagcttcgtgatcgagggcctgaaggaggccgacaaggacgagttctgcagatgcgagctgaagctgcagaagtggtacggggacctgcggggaaagcccttcgccatcgaagccgagaacagcatcctggacatcagcggcttcagcaagcagtacaactgtgccttcatctggcagaaggacggcgtgaagaagctgaacctgtacctgatcatcaactacttcaagggcggcaagctgcggttcaagaagatcaaacctgaagccttcgaagccaacagattctacaccgtgatcaacaaaaagagcggcgagatcgtgcccatggaggtgaacttcaacttcgacgaccccaacctgatcatcctgcctctggcctttggcaagagacagggcagagaattcatctggaacgacctgctgtccctggaaaccggcagcctgaagctggccaacggaagagtgatcgagaagacactgtacaacagaagaacccggcaggatgagcctgccctgttcgtggccctgaccttcgagcggcgggaggtcctggactcctccaatatcaaaccaatgaacctgatcggcgtggcaagaggcgaaaacatccccgccgtgatcgccctgaccgaccccgagggctgcccactgagccggtttaaggatagcctgggaaacccaacccacatcctgagaatcggcgagagctataaggagaagcagcggaccatccaggccaagaaggaggtggagcagcggagagccggcggctacagccggaagtacgccagcaaagccaagaatctggcagacgatatggtgagaaacaccgctagagatctgctgtactacgccgtgacccaggatgccatgctgatcttcgccaacctgagccggggcttcggccggcagggcaagcggaccttcatggccgagagacagtacacacggatggaggactggctgaccgccaagctggcctacgagggcctgagcaagacctacctgtccaagacactggcccagtacacctccaagacatgcagcaactgtgggtttaccatcaccagcgccgactacgacagggtgctggagaagctgaagaagacagcaacaggctggatgaccacaattaacggcaaggagctgaaggtggagggccagattacctactacaacagatacaagagacagaacgtagtcaaggacctgtccgtcgagctggatagactgagcgaagaatctgtgaacaacgacatctcctcctggacaaagggcagaagcggagaagctctgagcctcctgaagaaaagattctcccatagacccgtgcaggagaagttcgtgtgcctgaactgcggcttcgagacacacgcagccgagcaagccgccctgaacatcgccagatcctggctgttcctgcggagccaggagtacaagaaataccagacaaacaagacaaccggcaacaccgataagagagccttcgtcgagacctggcagtccttttaccggaagaagcttaaggaggtgtggaaacctgccgtgcggtctggcggatctggcggaggctcctagcgtgatgttcagcgacgtgagcatcgacttcagcctggaggagtgggagttcctgaacctggagcagagggacctgtacagggacgtgatgctggagaactacagcaacctggtgagcctgggctgcttcatcagcaagcccgacgtgatcagcctgctggagcagggcaaggagccctggaaggtggtgaggcagggcaggaggcagtaccccgacctggagaccaactacgagatcaagggatctggctccggcagcggccccaagaaaaagagaaaagtctaagctgccttctgcggggcttgccttctggccatgcccttcttctctcccttgcacctgtacctcttggtctttgaataaagcctgagtaggaaggctagcaaaaaaaaaaaaaaaaaaaaaaaaaaaaaaaaaaaaaaaaaaaaaaaaaaaaaaaaaaaaaaaaaaaaaaaaaaaaaaaa

SEQ ID NO: 16237 - RNA, 9485 nt, synthetic construct
  source 1..9485: mol_type = other RNA
aggaaataagagagaaaagaagagtaagaagaaatataagagccaccatggcccctaagaagaagcgtaaagtgagccggatggaacgcctcgtctacgaggtgcggcagaagtgcagaaacatcgaggacatctgcatctcctgcggatctctgaacgtgaccctggagcacccactgttcatcggcggcatgtgccagaactgtaaaaactgttttctggagtgtgcctatcaatacgacgatgacggctaccagagctactgcaccatctgttgcggcggaagagaggtgctgatgtgtggaaataacaactgctgccggtgcttctgcgtggaatgcgtggacctgctggtgggccccggcgccgcccaggccgctattaaggaagatccttggaactgctacatgtgcggccacaagggcacatacggcctgctgagacggagagaggactggcctagcagactgcagatgttcttcgccaataaccacgaccaggagttcgacccccctaaggtgtaccctcccgtccccgccgagaagagaaagcccatccgggtcctgagcctgttcgatggcatcgccaccggtctgctggtgctgaaggacctgggcatccaggtggataggtacattgcctccgaggtgtgcgaggactccatcaccgtgggaatggtgcgtcatcagggcaagatcatgtacgtgggcgacgtgcggagcgtgacacagaagcatatccaggagtggggccctttcgacctggtgatcggcggcagcccttgcaatgacctgagcatcgtgaacccagcccggaagggcctgtacgagggaaccggcagactgttcttcgagttttacagactgctgcacgacgcccggcctaaggaaggcgacgaccggcccttcttttggctgttcgagaatgtggtggccatgggagtcagcgacaagcgggatattagccggttcctggagagcaaccccgtgatgatcgatgccaaggaagtgagcgccgcccaccgggccagatacttctggggcaatctgcctggcatgaacagacccctggccagcaccgtgaacgacaagctggagctgcaggagtgcctggagcacggccggatcgccaagttcagcaaggtgagaaccatcaccacccgaagcaacagcatcaaacaaggcaaggaccagcactttcctgtgttcatgaacgagaaggaggacatcctgtggtgtaccgagatggagagagtgttcgggttcccagtccactacacagatgtcagcaacatgtctagactggccagacagagactgctgggaagaagctggtccgtccctgtgatcagacacctgttcgcccctctgaaggagtacttcgcctgcgtgagcagcggcaacagcaacgccaacagccggggccccagcttctctagcggcctggtgccactgtccctgagagggagccacatgggccccatggagatctacaaaaccgtgagcgcctggaagcggcagcctgtgcgcgtgctgagcctgtttcggaatatcgataaagtcctgaaaagcctgggattcctggagagcggctctggctccggcggtggcaccctgaagtacgtggaggatgtgacaaacgtggtcagacgggatgtggagaagtggggccccttcgatctggtgtacggcagcacccaacccctgggcagctcttgtgaccggtgccctggctggtacatgtttcagttccaccggatcctgcagtacgccctgccgagacaggagtcccagcggccattcttttggattttcatggacaacttgctgctgaccgaggatgaccaggaaactaccactcggttcctgcagaccgaagccgtgaccctgcaggacgtgagaggccgggactaccagaacgccatgcgggtgtggtccaacatccctggactgaaaagcaagcacgcacctctgacccctaaagaagaggagtacctgcaggcccaggtgcggagcagaagcaagctggacgcccctaaggtggatctgctggtgaagaattgcctcctgcccctgagagagtacttcaagtatttcagccagaatagtctgcccctgggaggcagcggcggcggcgccctggtgacatttgaggacgtcgccgtgcggttcacccaggaggaatgggctctgctggatccttctcagaaaatcctgtaccgggacgtgatgagagagacataccggaatctgacctccgtgggcatcaactgggaatgttgggaccttgaagcctgcttcagaagcctgggaagaaacctgagagtgcaggtggtgaagagaaagtgcgagctgaccaacagcggcccctgcgccgagggcggcccaagcagcggcgcccctcctcccagcggcggcagcccagccggctccccaacctctaccgaggagggcacctctgagtccgccacccccgagagcggccctggcacctccaccgagcccagcgagggcagcgcacccggcagccctgccggcagccccacctccacagaggagggaaccagcaccgagcccagcgaaggcagcgccccaggcaccagcaccgagcctagtgagcaggagattaaacggatcaacaagatcagaagaagacttgtgaaagacagcaacaccaagaaggccggcaagacaggccccatgaaaaccctgctggttagagtgatgacacccgatctgagagagcggctggaaaacctgagaaagaagcctgaaaatatcccccagcccatcagcaatacatctagagccaacctgaataagctgctgaccgattacaccgaaatgaagaaggcgatcctgcatgtgtactgggaagagttccagaaggaccctgtgggcctgatgagccgggtggcccagcctgccagcaagaagatcgatcagaacaagctgaaacctgagatggacgagaagggcaacctgaccaccgccggctttgcctgctctcagtgtggccagcccctgttcgtgtacaagctggagcaggtgtctgagaagggcaaggcttacaccaactacttcggacggtgcaatgtggccgagcacgaaaagctgatcctgctggcccagctgaagcccgagaaggatagcgacgaagccgtgacatatagcctgggaaagtttgggcagagggccctggatttctacagcattcatgtgaccaaggagtccacccaccccgtgaagcccctggcccagatcgccggaaacagatacgcctccggacctgtgggaaaggccctgagcgacgcatgtatgggcacaatcgcctccttcctgtctaagtaccaggacatcatcatcgaacaccagaaggtggtgaagggcaaccagaagagactggagagcctgcgggagctggccggcaaggaaaacctggaataccctagcgtgaccctgccacctcagcctcacaccaaggagggcgttgatgcctacaacgaagtgatcgcccgggtgcgaatgtgggtgaacctgaacctgtggcagaagctgaagctaagcagagatgatgccaagcctctgctgagactgaagggattcccttcctttcctctggtcgagagacaggccaacgaagtggactggtgggacatggtgtgtaacgtgaagaagctgatcaacgagaaaaaggaggatggcaaggtgttttggcagaatctggctggctacaagagacaggaagccctgagaccatacctgagcagcgaggaagatcggaagaagggaaagaaattcgctcggtaccagctgggcgacctgctgctgcacctggaaaagaagcacggcgaggactggggaaaggtgtacgacgaggcctgggagcggattgacaagaaagtggaaggcctgagcaagcacatcaagctggaagaggaacggagaagcgaggacgcccagagcaaggccgccctgaccgactggctgcgggctaaggccagcttcgtgatcgagggcctgaaggaggccgacaaggacgagttctgcagatgcgagctgaagctgcagaagtggtacggggacctgcggggaaagcccttcgccatcgaagccgagaacagcatcctggacatcagcggcttcagcaagcagtacaactgtgccttcatctggcagaaggacggcgtgaagaagctgaacctgtacctgatcatcaactacttcaagggcggcaagctgcggttcaagaagatcaaacctgaagccttcgaagccaacagattctacaccgtgatcaacaaaaagagcggcgagatcgtgcccatggaggtgaacttcaacttcgacgaccccaacctgatcatcctgcctctggcctttggcaagagacagggcagagaattcatctggaacgacctgctgtccctggaaaccggcagcctgaagctggccaacggaagagtgatcgagaagacactgtacaacagaagaacccggcaggatgagcctgccctgttcgtggccctgaccttcgagcggcgggaggtcctggactcctccaatatcaaaccaatgaacctgatcggcgtggcaagaggcgaaaacatccccgccgtgatcgccctgaccgaccccgagggctgcccactgagccggtttaaggatagcctgggaaacccaacccacatcctgagaatcggcgagagctataaggagaagcagcggaccatccaggccaagaaggaggtggagcagcggagagccggcggctacagccggaagtacgccagcaaagccaagaatctggcagacgatatggtgagaaacaccgctagagatctgctgtactacgccgtgacccaggatgccatgctgatcttcgccaacctgagccggggcttcggccggcagggcaagcggaccttcatggccgagagacagtacacacggatggaggactggctgaccgccaagctggcctacgagggcctgagcaagacctacctgtccaagacactggcccagtacacctccaagacatgcagcaactgtgggtttaccatcaccagcgccgactacgacagggtgctggagaagctgaagaagacagcaacaggctggatgaccacaattaacggcaaggagctgaaggtggagggccagattacctactacaacagatacaagagacagaacgtagtcaaggacctgtccgtcgagctggatagactgagcgaagaatctgtgaacaacgacatctcctcctggacaaagggcagaagcggagaagctctgagcctcctgaagaaaagattctcccatagacccgtgcaggagaagttcgtgtgcctgaactgcggcttcgagacacacgcagccgagcaagccgccctgaacatcgccagatcctggctgttcctgcggagccaggagtacaagaaataccagacaaacaagacaaccggcaacaccgataagagagccttcgtcgagacctggcagtccttttaccggaagaagcttaaggaggtgtggaaacctgccgtgcggtctggcggatctggcggaggctccgccgtgacccagctgaccttcgaggacgtggccgtggacttcacccccgaggagtggaggtgcctgacccccgcccagagggccctgtacagggacgtgatgctggacacctacaggaacctggtgagcgtgggcgtgagcccccccagcatgagcgtgatcctgcccctggagttccaggaggagccctgggtggcccagagccacgtgaccaccctgggcggcctgaacggctgggagggcggcggcccaagcagcggcgcccctcctcccagcggcggcagcccagccggctccccaacctctaccgaggagggcacctctgagtccgccacccccgagagcggccctggcacctccaccgagcccagcgagggcagcgcacccggcagccctgccggcagccccacctccacagaggagggaaccagcaccgagcccagcgaaggcagcgccccaggcaccagcaccgagcctagtgagcaggagattaaacggatcaacaagatcagaagaagacttgtgaaagacagcaacaccaagaaggccggcaagacaggccccatgaaaaccctgctggttagagtgatgacacccgatctgagagagcggctggaaaacctgagaaagaagcctgaaaatatcccccagcccatcagcaatacatctagagccaacctgaataagctgctgaccgattacaccgaaatgaagaaggcgatcctgcatgtgtactgggaagagttccagaaggaccctgtgggcctgatgagccgggtggcccagcctgccagcaagaagatcgatcagaacaagctgaaacctgagatggacgagaagggcaacctgaccaccgccggctttgcctgctctcagtgtggccagcccctgttcgtgtacaagctggagcaggtgtctgagaagggcaaggcttacaccaactacttcggacggtgcaatgtggccgagcacgaaaagctgatcctgctggcccagctgaagcccgagaaggatagcgacgaagccgtgacatatagcctgggaaagtttgggcagagggccctggatttctacagcattcatgtgaccaaggagtccacccaccccgtgaagcccctggcccagatcgccggaaacagatacgcctccggacctgtgggaaaggccctgagcgacgcatgtatgggcacaatcgcctccttcctgtctaagtaccaggacatcatcatcgaacaccagaaggtggtgaagggcaaccagaagagactggagagcctgcgggagctggccggcaaggaaaacctggaataccctagcgtgaccctgccacctcagcctcacaccaaggagggcgttgatgcctacaacgaagtgatcgcccgggtgcgaatgtgggtgaacctgaacctgtggcagaagctgaagctaagcagagatgatgccaagcctctgctgagactgaagggattcccttcctttcctctggtcgagagacaggccaacgaagtggactggtgggacatggtgtgtaacgtgaagaagctgatcaacgagaaaaaggaggatggcaaggtgttttggcagaatctggctggctacaagagacaggaagccctgagaccatacctgagcagcgaggaagatcggaagaagggaaagaaattcgctcggtaccagctgggcgacctgctgctgcacctggaaaagaagcacggcgaggactggggaaaggtgtacgacgaggcctgggagcggattgacaagaaagtggaaggcctgagcaagcacatcaagctggaagaggaacggagaagcgaggacgcccagagcaaggccgccctgaccgactggctgcgggctaaggccagcttcgtgatcgagggcctgaaggaggccgacaaggacgagttctgcagatgcgagctgaagctgcagaagtggtacggggacctgcggggaaagcccttcgccatcgaagccgagaacagcatcctggacatcagcggcttcagcaagcagtacaactgtgccttcatctggcagaaggacggcgtgaagaagctgaacctgtacctgatcatcaactacttcaagggcggcaagctgcggttcaagaagatcaaacctgaagccttcgaagccaacagattctacaccgtgatcaacaaaaagagcggcgagatcgtgcccatggaggtgaacttcaacttcgacgaccccaacctgatcatcctgcctctggcctttggcaagagacagggcagagaattcatctggaacgacctgctgtccctggaaaccggcagcctgaagctggccaacggaagagtgatcgagaagacactgtacaacagaagaacccggcaggatgagcctgccctgttcgtggccctgaccttcgagcggcgggaggtcctggactcctccaatatcaaaccaatgaacctgatcggcgtggcaagaggcgaaaacatccccgccgtgatcgccctgaccgaccccgagggctgcccactgagccggtttaaggatagcctgggaaacccaacccacatcctgagaatcggcgagagctataaggagaagcagcggaccatccaggccaagaaggaggtggagcagcggagagccggcggctacagccggaagtacgccagcaaagccaagaatctggcagacgatatggtgagaaacaccgctagagatctgctgtactacgccgtgacccaggatgccatgctgatcttcgccaacctgagccggggcttcggccggcagggcaagcggaccttcatggccgagagacagtacacacggatggaggactggctgaccgccaagctggcctacgagggcctgagcaagacctacctgtccaagacactggcccagtacacctccaagacatgcagcaactgtgggtttaccatcaccagcgccgactacgacagggtgctggagaagctgaagaagacagcaacaggctggatgaccacaattaacggcaaggagctgaaggtggagggccagattacctactacaacagatacaagagacagaacgtagtcaaggacctgtccgtcgagctggatagactgagcgaagaatctgtgaacaacgacatctcctcctggacaaagggcagaagcggagaagctctgagcctcctgaagaaaagattctcccatagacccgtgcaggagaagttcgtgtgcctgaactgcggcttcgagacacacgcagccgagcaagccgccctgaacatcgccagatcctggctgttcctgcggagccaggagtacaagaaataccagacaaacaagacaaccggcaacaccgataagagagccttcgtcgagacctggcagtccttttaccggaagaagcttaaggaggtgtggaaacctgccgtgcggtctggcggatctggcggaggctcctgccgtgacccagctgaccttcgaggacgtggccgtggacttcacccccgaggagtggaggtgcctgacccccgcccagagggccctgtacagggacgtgatgctggacacctacaggaacctggtgagcgtgggcgtgagcccccccagcatgagcgtgatcctgcccctggagttccaggaggagccctgggtggcccagagccacgtgaccaccctgggcggcctgaacggctgggagggcggatctggctccggcagcggccccaagaaaaagagaaaagtctaagctgccttctgcggggcttgccttctggccatgcccttcttctctcccttgcacctgtacctcttggtctttgaataaagcctgagtaggaaggctagcaaaaaaaaaaaaaaaaaaaaaaaaaaaaaaaaaaaaaaaaaaaaaaaaaaaaaaaaaaaaaaaaaaaaaaaaaaaaaaaa

SEQ ID NO: 16238 - RNA, 9485 nt, synthetic construct
  source 1..9485: mol_type = other RNA
aggaaataagagagaaaagaagagtaagaagaaatataagagccaccatggcccctaagaagaagcgtaaagtgagccggatggaacgcctcgtctacgaggtgcggcagaagtgcagaaacatcgaggacatctgcatctcctgcggatctctgaacgtgaccctggagcacccactgttcatcggcggcatgtgccagaactgtaaaaactgttttctggagtgtgcctatcaatacgacgatgacggctaccagagctactgcaccatctgttgcggcggaagagaggtgctgatgtgtggaaataacaactgctgccggtgcttctgcgtggaatgcgtggacctgctggtgggccccggcgccgcccaggccgctattaaggaagatccttggaactgctacatgtgcggccacaagggcacatacggcctgctgagacggagagaggactggcctagcagactgcagatgttcttcgccaataaccacgaccaggagttcgacccccctaaggtgtaccctcccgtccccgccgagaagagaaagcccatccgggtcctgagcctgttcgatggcatcgccaccggtctgctggtgctgaaggacctgggcatccaggtggataggtacattgcctccgaggtgtgcgaggactccatcaccgtgggaatggtgcgtcatcagggcaagatcatgtacgtgggcgacgtgcggagcgtgacacagaagcatatccaggagtggggccctttcgacctggtgatcggcggcagcccttgcaatgacctgagcatcgtgaacccagcccggaagggcctgtacgagggaaccggcagactgttcttcgagttttacagactgctgcacgacgcccggcctaaggaaggcgacgaccggcccttcttttggctgttcgagaatgtggtggccatgggagtcagcgacaagcgggatattagccggttcctggagagcaaccccgtgatgatcgatgccaaggaagtgagcgccgcccaccgggccagatacttctggggcaatctgcctggcatgaacagacccctggccagcaccgtgaacgacaagctggagctgcaggagtgcctggagcacggccggatcgccaagttcagcaaggtgagaaccatcaccacccgaagcaacagcatcaaacaaggcaaggaccagcactttcctgtgttcatgaacgagaaggaggacatcctgtggtgtaccgagatggagagagtgttcgggttcccagtccactacacagatgtcagcaacatgtctagactggccagacagagactgctgggaagaagctggtccgtccctgtgatcagacacctgttcgcccctctgaaggagtacttcgcctgcgtgagcagcggcaacagcaacgccaacagccggggccccagcttctctagcggcctggtgccactgtccctgagagggagccacatgggccccatggagatctacaaaaccgtgagcgcctggaagcggcagcctgtgcgcgtgctgagcctgtttcggaatatcgataaagtcctgaaaagcctgggattcctggagagcggctctggctccggcggtggcaccctgaagtacgtggaggatgtgacaaacgtggtcagacgggatgtggagaagtggggccccttcgatctggtgtacggcagcacccaacccctgggcagctcttgtgaccggtgccctggctggtacatgtttcagttccaccggatcctgcagtacgccctgccgagacaggagtcccagcggccattcttttggattttcatggacaacttgctgctgaccgaggatgaccaggaaactaccactcggttcctgcagaccgaagccgtgaccctgcaggacgtgagaggccgggactaccagaacgccatgcgggtgtggtccaacatccctggactgaaaagcaagcacgcacctctgacccctaaagaagaggagtacctgcaggcccaggtgcggagcagaagcaagctggacgcccctaaggtggatctgctggtgaagaattgcctcctgcccctgagagagtacttcaagtatttcagccagaatagtctgcccctgggaggcagcggcggcggcgccctggtgacatttgaggacgtcgccgtgcggttcacccaggaggaatgggctctgctggatccttctcagaaaatcctgtaccgggacgtgatgagagagacataccggaatctgacctccgtgggcatcaactgggaatgttgggaccttgaagcctgcttcagaagcctgggaagaaacctgagagtgcaggtggtgaagagaaagtgcgagctgaccaacagcggcccctgcgccgagggcggcccaagcagcggcgcccctcctcccagcggcggcagcccagccggctccccaacctctaccgaggagggcacctctgagtccgccacccccgagagcggccctggcacctccaccgagcccagcgagggcagcgcacccggcagccctgccggcagccccacctccacagaggagggaaccagcaccgagcccagcgaaggcagcgccccaggcaccagcaccgagcctagtgagcaggagattaaacggatcaacaagatcagaagaagacttgtgaaagacagcaacaccaagaaggccggcaagacaggccccatgaaaaccctgctggttagagtgatgacacccgatctgagagagcggctggaaaacctgagaaagaagcctgaaaatatcccccagcccatcagcaatacatctagagccaacctgaataagctgctgaccgattacaccgaaatgaagaaggcgatcctgcatgtgtactgggaagagttccagaaggaccctgtgggcctgatgagccgggtggcccagcctgccagcaagaagatcgatcagaacaagctgaaacctgagatggacgagaagggcaacctgaccaccgccggctttgcctgctctcagtgtggccagcccctgttcgtgtacaagctggagcaggtgtctgagaagggcaaggcttacaccaactacttcggacggtgcaatgtggccgagcacgaaaagctgatcctgctggcccagctgaagcccgagaaggatagcgacgaagccgtgacatatagcctgggaaagtttgggcagagggccctggatttctacagcattcatgtgaccaaggagtccacccaccccgtgaagcccctggcccagatcgccggaaacagatacgcctccggacctgtgggaaaggccctgagcgacgcatgtatgggcacaatcgcctccttcctgtctaagtaccaggacatcatcatcgaacaccagaaggtggtgaagggcaaccagaagagactggagagcctgcgggagctggccggcaaggaaaacctggaataccctagcgtgaccctgccacctcagcctcacaccaaggagggcgttgatgcctacaacgaagtgatcgcccgggtgcgaatgtgggtgaacctgaacctgtggcagaagctgaagctaagcagagatgatgccaagcctctgctgagactgaagggattcccttcctttcctctggtcgagagacaggccaacgaagtggactggtgggacatggtgtgtaacgtgaagaagctgatcaacgagaaaaaggaggatggcaaggtgttttggcagaatctggctggctacaagagacaggaagccctgagaccatacctgagcagcgaggaagatcggaagaagggaaagaaattcgctcggtaccagctgggcgacctgctgctgcacctggaaaagaagcacggcgaggactggggaaaggtgtacgacgaggcctgggagcggattgacaagaaagtggaaggcctgagcaagcacatcaagctggaagaggaacggagaagcgaggacgcccagagcaaggccgccctgaccgactggctgcgggctaaggccagcttcgtgatcgagggcctgaaggaggccgacaaggacgagttctgcagatgcgagctgaagctgcagaagtggtacggggacctgcggggaaagcccttcgccatcgaagccgagaacagcatcctggacatcagcggcttcagcaagcagtacaactgtgccttcatctggcagaaggacggcgtgaagaagctgaacctgtacctgatcatcaactacttcaagggcggcaagctgcggttcaagaagatcaaacctgaagccttcgaagccaacagattctacaccgtgatcaacaaaaagagcggcgagatcgtgcccatggaggtgaacttcaacttcgacgaccccaacctgatcatcctgcctctggcctttggcaagagacagggcagagaattcatctggaacgacctgctgtccctggaaaccggcagcctgaagctggccaacggaagagtgatcgagaagacactgtacaacagaagaacccggcaggatgagcctgccctgttcgtggccctgaccttcgagcggcgggaggtcctggactcctccaatatcaaaccaatgaacctgatcggcgtggcaagaggcgaaaacatccccgccgtgatcgccctgaccgaccccgagggctgcccactgagccggtttaaggatagcctgggaaacccaacccacatcctgagaatcggcgagagctataaggagaagcagcggaccatccaggccaagaaggaggtggagcagcggagagccggcggctacagccggaagtacgccagcaaagccaagaatctggcagacgatatggtgagaaacaccgctagagatctgctgtactacgccgtgacccaggatgccatgctgatcttcgccaacctgagccggggcttcggccggcagggcaagcggaccttcatggccgagagacagtacacacggatggaggactggctgaccgccaagctggcctacgagggcctgagcaagacctacctgtccaagacactggcccagtacacctccaagacatgcagcaactgtgggtttaccatcaccagcgccgactacgacagggtgctggagaagctgaagaagacagcaacaggctggatgaccacaattaacggcaaggagctgaaggtggagggccagattacctactacaacagatacaagagacagaacgtagtcaaggacctgtccgtcgagctggatagactgagcgaagaatctgtgaacaacgacatctcctcctggacaaagggcagaagcggagaagctctgagcctcctgaagaaaagattctcccatagacccgtgcaggagaagttcgtgtgcctgaactgcggcttcgagacacacgcagccgagcaagccgccctgaacatcgccagatcctggctgttcctgcggagccaggagtacaagaaataccagacaaacaagacaaccggcaacaccgataagagagccttcgtcgagacctggcagtccttttaccggaagaagcttaaggaggtgtggaaacctgccgtgcggtctggcggatctggcggaggctcccaccaggaggtggtgaccttcgaggacgtggccgtgtacttcaccaggaccgagtgggccggcctgagccccgcccagagggccctgtacaggagcgtgatgctggagatctacaggagcctgaccagcctgggctaccccgtgcccaagcccgccctgatcagcctgctggagaggggcgacctgcccgtgggcctggagacccaggacaacccccccgcccagggcaccagggacatctacggcggcccaagcagcggcgcccctcctcccagcggcggcagcccagccggctccccaacctctaccgaggagggcacctctgagtccgccacccccgagagcggccctggcacctccaccgagcccagcgagggcagcgcacccggcagccctgccggcagccccacctccacagaggagggaaccagcaccgagcccagcgaaggcagcgccccaggcaccagcaccgagcctagtgagcaggagattaaacggatcaacaagatcagaagaagacttgtgaaagacagcaacaccaagaaggccggcaagacaggccccatgaaaaccctgctggttagagtgatgacacccgatctgagagagcggctggaaaacctgagaaagaagcctgaaaatatcccccagcccatcagcaatacatctagagccaacctgaataagctgctgaccgattacaccgaaatgaagaaggcgatcctgcatgtgtactgggaagagttccagaaggaccctgtgggcctgatgagccgggtggcccagcctgccagcaagaagatcgatcagaacaagctgaaacctgagatggacgagaagggcaacctgaccaccgccggctttgcctgctctcagtgtggccagcccctgttcgtgtacaagctggagcaggtgtctgagaagggcaaggcttacaccaactacttcggacggtgcaatgtggccgagcacgaaaagctgatcctgctggcccagctgaagcccgagaaggatagcgacgaagccgtgacatatagcctgggaaagtttgggcagagggccctggatttctacagcattcatgtgaccaaggagtccacccaccccgtgaagcccctggcccagatcgccggaaacagatacgcctccggacctgtgggaaaggccctgagcgacgcatgtatgggcacaatcgcctccttcctgtctaagtaccaggacatcatcatcgaacaccagaaggtggtgaagggcaaccagaagagactggagagcctgcgggagctggccggcaaggaaaacctggaataccctagcgtgaccctgccacctcagcctcacaccaaggagggcgttgatgcctacaacgaagtgatcgcccgggtgcgaatgtgggtgaacctgaacctgtggcagaagctgaagctaagcagagatgatgccaagcctctgctgagactgaagggattcccttcctttcctctggtcgagagacaggccaacgaagtggactggtgggacatggtgtgtaacgtgaagaagctgatcaacgagaaaaaggaggatggcaaggtgttttggcagaatctggctggctacaagagacaggaagccctgagaccatacctgagcagcgaggaagatcggaagaagggaaagaaattcgctcggtaccagctgggcgacctgctgctgcacctggaaaagaagcacggcgaggactggggaaaggtgtacgacgaggcctgggagcggattgacaagaaagtggaaggcctgagcaagcacatcaagctggaagaggaacggagaagcgaggacgcccagagcaaggccgccctgaccgactggctgcgggctaaggccagcttcgtgatcgagggcctgaaggaggccgacaaggacgagttctgcagatgcgagctgaagctgcagaagtggtacggggacctgcggggaaagcccttcgccatcgaagccgagaacagcatcctggacatcagcggcttcagcaagcagtacaactgtgccttcatctggcagaaggacggcgtgaagaagctgaacctgtacctgatcatcaactacttcaagggcggcaagctgcggttcaagaagatcaaacctgaagccttcgaagccaacagattctacaccgtgatcaacaaaaagagcggcgagatcgtgcccatggaggtgaacttcaacttcgacgaccccaacctgatcatcctgcctctggcctttggcaagagacagggcagagaattcatctggaacgacctgctgtccctggaaaccggcagcctgaagctggccaacggaagagtgatcgagaagacactgtacaacagaagaacccggcaggatgagcctgccctgttcgtggccctgaccttcgagcggcgggaggtcctggactcctccaatatcaaaccaatgaacctgatcggcgtggcaagaggcgaaaacatccccgccgtgatcgccctgaccgaccccgagggctgcccactgagccggtttaaggatagcctgggaaacccaacccacatcctgagaatcggcgagagctataaggagaagcagcggaccatccaggccaagaaggaggtggagcagcggagagccggcggctacagccggaagtacgccagcaaagccaagaatctggcagacgatatggtgagaaacaccgctagagatctgctgtactacgccgtgacccaggatgccatgctgatcttcgccaacctgagccggggcttcggccggcagggcaagcggaccttcatggccgagagacagtacacacggatggaggactggctgaccgccaagctggcctacgagggcctgagcaagacctacctgtccaagacactggcccagtacacctccaagacatgcagcaactgtgggtttaccatcaccagcgccgactacgacagggtgctggagaagctgaagaagacagcaacaggctggatgaccacaattaacggcaaggagctgaaggtggagggccagattacctactacaacagatacaagagacagaacgtagtcaaggacctgtccgtcgagctggatagactgagcgaagaatctgtgaacaacgacatctcctcctggacaaagggcagaagcggagaagctctgagcctcctgaagaaaagattctcccatagacccgtgcaggagaagttcgtgtgcctgaactgcggcttcgagacacacgcagccgagcaagccgccctgaacatcgccagatcctggctgttcctgcggagccaggagtacaagaaataccagacaaacaagacaaccggcaacaccgataagagagccttcgtcgagacctggcagtccttttaccggaagaagcttaaggaggtgtggaaacctgccgtgcggtctggcggatctggcggaggctcctcaccaggaggtggtgaccttcgaggacgtggccgtgtacttcaccaggaccgagtgggccggcctgagccccgcccagagggccctgtacaggagcgtgatgctggagatctacaggagcctgaccagcctgggctaccccgtgcccaagcccgccctgatcagcctgctggagaggggcgacctgcccgtgggcctggagacccaggacaacccccccgcccagggcaccagggacatctacggatctggctccggcagcggccccaagaaaaagagaaaagtctaagctgccttctgcggggcttgccttctggccatgcccttcttctctcccttgcacctgtacctcttggtctttgaataaagcctgagtaggaaggctagcaaaaaaaaaaaaaaaaaaaaaaaaaaaaaaaaaaaaaaaaaaaaaaaaaaaaaaaaaaaaaaaaaaaaaaaaaaaaaaaa

SEQ ID NO: 16239 - RNA, 9485 nt, synthetic construct
  source 1..9485: mol_type = other RNA
aggaaataagagagaaaagaagagtaagaagaaatataagagccaccatggcccctaagaagaagcgtaaagtgagccggatggaacgcctcgtctacgaggtgcggcagaagtgcagaaacatcgaggacatctgcatctcctgcggatctctgaacgtgaccctggagcacccactgttcatcggcggcatgtgccagaactgtaaaaactgttttctggagtgtgcctatcaatacgacgatgacggctaccagagctactgcaccatctgttgcggcggaagagaggtgctgatgtgtggaaataacaactgctgccggtgcttctgcgtggaatgcgtggacctgctggtgggccccggcgccgcccaggccgctattaaggaagatccttggaactgctacatgtgcggccacaagggcacatacggcctgctgagacggagagaggactggcctagcagactgcagatgttcttcgccaataaccacgaccaggagttcgacccccctaaggtgtaccctcccgtccccgccgagaagagaaagcccatccgggtcctgagcctgttcgatggcatcgccaccggtctgctggtgctgaaggacctgggcatccaggtggataggtacattgcctccgaggtgtgcgaggactccatcaccgtgggaatggtgcgtcatcagggcaagatcatgtacgtgggcgacgtgcggagcgtgacacagaagcatatccaggagtggggccctttcgacctggtgatcggcggcagcccttgcaatgacctgagcatcgtgaacccagcccggaagggcctgtacgagggaaccggcagactgttcttcgagttttacagactgctgcacgacgcccggcctaaggaaggcgacgaccggcccttcttttggctgttcgagaatgtggtggccatgggagtcagcgacaagcgggatattagccggttcctggagagcaaccccgtgatgatcgatgccaaggaagtgagcgccgcccaccgggccagatacttctggggcaatctgcctggcatgaacagacccctggccagcaccgtgaacgacaagctggagctgcaggagtgcctggagcacggccggatcgccaagttcagcaaggtgagaaccatcaccacccgaagcaacagcatcaaacaaggcaaggaccagcactttcctgtgttcatgaacgagaaggaggacatcctgtggtgtaccgagatggagagagtgttcgggttcccagtccactacacagatgtcagcaacatgtctagactggccagacagagactgctgggaagaagctggtccgtccctgtgatcagacacctgttcgcccctctgaaggagtacttcgcctgcgtgagcagcggcaacagcaacgccaacagccggggccccagcttctctagcggcctggtgccactgtccctgagagggagccacatgggccccatggagatctacaaaaccgtgagcgcctggaagcggcagcctgtgcgcgtgctgagcctgtttcggaatatcgataaagtcctgaaaagcctgggattcctggagagcggctctggctccggcggtggcaccctgaagtacgtggaggatgtgacaaacgtggtcagacgggatgtggagaagtggggccccttcgatctggtgtacggcagcacccaacccctgggcagctcttgtgaccggtgccctggctggtacatgtttcagttccaccggatcctgcagtacgccctgccgagacaggagtcccagcggccattcttttggattttcatggacaacttgctgctgaccgaggatgaccaggaaactaccactcggttcctgcagaccgaagccgtgaccctgcaggacgtgagaggccgggactaccagaacgccatgcgggtgtggtccaacatccctggactgaaaagcaagcacgcacctctgacccctaaagaagaggagtacctgcaggcccaggtgcggagcagaagcaagctggacgcccctaaggtggatctgctggtgaagaattgcctcctgcccctgagagagtacttcaagtatttcagccagaatagtctgcccctgggaggcagcggcggcggcgccctggtgacatttgaggacgtcgccgtgcggttcacccaggaggaatgggctctgctggatccttctcagaaaatcctgtaccgggacgtgatgagagagacataccggaatctgacctccgtgggcatcaactgggaatgttgggaccttgaagcctgcttcagaagcctgggaagaaacctgagagtgcaggtggtgaagagaaagtgcgagctgaccaacagcggcccctgcgccgagggcggcccaagcagcggcgcccctcctcccagcggcggcagcccagccggctccccaacctctaccgaggagggcacctctgagtccgccacccccgagagcggccctggcacctccaccgagcccagcgagggcagcgcacccggcagccctgccggcagccccacctccacagaggagggaaccagcaccgagcccagcgaaggcagcgccccaggcaccagcaccgagcctagtgagcaggagattaaacggatcaacaagatcagaagaagacttgtgaaagacagcaacaccaagaaggccggcaagacaggccccatgaaaaccctgctggttagagtgatgacacccgatctgagagagcggctggaaaacctgagaaagaagcctgaaaatatcccccagcccatcagcaatacatctagagccaacctgaataagctgctgaccgattacaccgaaatgaagaaggcgatcctgcatgtgtactgggaagagttccagaaggaccctgtgggcctgatgagccgggtggcccagcctgccagcaagaagatcgatcagaacaagctgaaacctgagatggacgagaagggcaacctgaccaccgccggctttgcctgctctcagtgtggccagcccctgttcgtgtacaagctggagcaggtgtctgagaagggcaaggcttacaccaactacttcggacggtgcaatgtggccgagcacgaaaagctgatcctgctggcccagctgaagcccgagaaggatagcgacgaagccgtgacatatagcctgggaaagtttgggcagagggccctggatttctacagcattcatgtgaccaaggagtccacccaccccgtgaagcccctggcccagatcgccggaaacagatacgcctccggacctgtgggaaaggccctgagcgacgcatgtatgggcacaatcgcctccttcctgtctaagtaccaggacatcatcatcgaacaccagaaggtggtgaagggcaaccagaagagactggagagcctgcgggagctggccggcaaggaaaacctggaataccctagcgtgaccctgccacctcagcctcacaccaaggagggcgttgatgcctacaacgaagtgatcgcccgggtgcgaatgtgggtgaacctgaacctgtggcagaagctgaagctaagcagagatgatgccaagcctctgctgagactgaagggattcccttcctttcctctggtcgagagacaggccaacgaagtggactggtgggacatggtgtgtaacgtgaagaagctgatcaacgagaaaaaggaggatggcaaggtgttttggcagaatctggctggctacaagagacaggaagccctgagaccatacctgagcagcgaggaagatcggaagaagggaaagaaattcgctcggtaccagctgggcgacctgctgctgcacctggaaaagaagcacggcgaggactggggaaaggtgtacgacgaggcctgggagcggattgacaagaaagtggaaggcctgagcaagcacatcaagctggaagaggaacggagaagcgaggacgcccagagcaaggccgccctgaccgactggctgcgggctaaggccagcttcgtgatcgagggcctgaaggaggccgacaaggacgagttctgcagatgcgagctgaagctgcagaagtggtacggggacctgcggggaaagcccttcgccatcgaagccgagaacagcatcctggacatcagcggcttcagcaagcagtacaactgtgccttcatctggcagaaggacggcgtgaagaagctgaacctgtacctgatcatcaactacttcaagggcggcaagctgcggttcaagaagatcaaacctgaagccttcgaagccaacagattctacaccgtgatcaacaaaaagagcggcgagatcgtgcccatggaggtgaacttcaacttcgacgaccccaacctgatcatcctgcctctggcctttggcaagagacagggcagagaattcatctggaacgacctgctgtccctggaaaccggcagcctgaagctggccaacggaagagtgatcgagaagacactgtacaacagaagaacccggcaggatgagcctgccctgttcgtggccctgaccttcgagcggcgggaggtcctggactcctccaatatcaaaccaatgaacctgatcggcgtggcaagaggcgaaaacatccccgccgtgatcgccctgaccgaccccgagggctgcccactgagccggtttaaggatagcctgggaaacccaacccacatcctgagaatcggcgagagctataaggagaagcagcggaccatccaggccaagaaggaggtggagcagcggagagccggcggctacagccggaagtacgccagcaaagccaagaatctggcagacgatatggtgagaaacaccgctagagatctgctgtactacgccgtgacccaggatgccatgctgatcttcgccaacctgagccggggcttcggccggcagggcaagcggaccttcatggccgagagacagtacacacggatggaggactggctgaccgccaagctggcctacgagggcctgagcaagacctacctgtccaagacactggcccagtacacctccaagacatgcagcaactgtgggtttaccatcaccagcgccgactacgacagggtgctggagaagctgaagaagacagcaacaggctggatgaccacaattaacggcaaggagctgaaggtggagggccagattacctactacaacagatacaagagacagaacgtagtcaaggacctgtccgtcgagctggatagactgagcgaagaatctgtgaacaacgacatctcctcctggacaaagggcagaagcggagaagctctgagcctcctgaagaaaagattctcccatagacccgtgcaggagaagttcgtgtgcctgaactgcggcttcgagacacacgcagccgagcaagccgccctgaacatcgccagatcctggctgttcctgcggagccaggagtacaagaaataccagacaaacaagacaaccggcaacaccgataagagagccttcgtcgagacctggcagtccttttaccggaagaagcttaaggaggtgtggaaacctgccgtgcggtctggcggatctggcggaggctccgcccaggagagcgtgatgttcagcgacgtgagcgtggacttcagccaggaggagtgggagtgcctgaacgacgaccagagggacctgtacagggacgtgatgctggagaactacagcaacctggtgagcatgggccacagcgtgagcaagcccaacgtgatcagctacctggagcagggcaaggagccctggctggtggacagggagctgaccaggggccagtggcccgtgctggagagcaggggcggcccaagcagcggcgcccctcctcccagcggcggcagcccagccggctccccaacctctaccgaggagggcacctctgagtccgccacccccgagagcggccctggcacctccaccgagcccagcgagggcagcgcacccggcagccctgccggcagccccacctccacagaggagggaaccagcaccgagcccagcgaaggcagcgccccaggcaccagcaccgagcctagtgagcaggagattaaacggatcaacaagatcagaagaagacttgtgaaagacagcaacaccaagaaggccggcaagacaggccccatgaaaaccctgctggttagagtgatgacacccgatctgagagagcggctggaaaacctgagaaagaagcctgaaaatatcccccagcccatcagcaatacatctagagccaacctgaataagctgctgaccgattacaccgaaatgaagaaggcgatcctgcatgtgtactgggaagagttccagaaggaccctgtgggcctgatgagccgggtggcccagcctgccagcaagaagatcgatcagaacaagctgaaacctgagatggacgagaagggcaacctgaccaccgccggctttgcctgctctcagtgtggccagcccctgttcgtgtacaagctggagcaggtgtctgagaagggcaaggcttacaccaactacttcggacggtgcaatgtggccgagcacgaaaagctgatcctgctggcccagctgaagcccgagaaggatagcgacgaagccgtgacatatagcctgggaaagtttgggcagagggccctggatttctacagcattcatgtgaccaaggagtccacccaccccgtgaagcccctggcccagatcgccggaaacagatacgcctccggacctgtgggaaaggccctgagcgacgcatgtatgggcacaatcgcctccttcctgtctaagtaccaggacatcatcatcgaacaccagaaggtggtgaagggcaaccagaagagactggagagcctgcgggagctggccggcaaggaaaacctggaataccctagcgtgaccctgccacctcagcctcacaccaaggagggcgttgatgcctacaacgaagtgatcgcccgggtgcgaatgtgggtgaacctgaacctgtggcagaagctgaagctaagcagagatgatgccaagcctctgctgagactgaagggattcccttcctttcctctggtcgagagacaggccaacgaagtggactggtgggacatggtgtgtaacgtgaagaagctgatcaacgagaaaaaggaggatggcaaggtgttttggcagaatctggctggctacaagagacaggaagccctgagaccatacctgagcagcgaggaagatcggaagaagggaaagaaattcgctcggtaccagctgggcgacctgctgctgcacctggaaaagaagcacggcgaggactggggaaaggtgtacgacgaggcctgggagcggattgacaagaaagtggaaggcctgagcaagcacatcaagctggaagaggaacggagaagcgaggacgcccagagcaaggccgccctgaccgactggctgcgggctaaggccagcttcgtgatcgagggcctgaaggaggccgacaaggacgagttctgcagatgcgagctgaagctgcagaagtggtacggggacctgcggggaaagcccttcgccatcgaagccgagaacagcatcctggacatcagcggcttcagcaagcagtacaactgtgccttcatctggcagaaggacggcgtgaagaagctgaacctgtacctgatcatcaactacttcaagggcggcaagctgcggttcaagaagatcaaacctgaagccttcgaagccaacagattctacaccgtgatcaacaaaaagagcggcgagatcgtgcccatggaggtgaacttcaacttcgacgaccccaacctgatcatcctgcctctggcctttggcaagagacagggcagagaattcatctggaacgacctgctgtccctggaaaccggcagcctgaagctggccaacggaagagtgatcgagaagacactgtacaacagaagaacccggcaggatgagcctgccctgttcgtggccctgaccttcgagcggcgggaggtcctggactcctccaatatcaaaccaatgaacctgatcggcgtggcaagaggcgaaaacatccccgccgtgatcgccctgaccgaccccgagggctgcccactgagccggtttaaggatagcctgggaaacccaacccacatcctgagaatcggcgagagctataaggagaagcagcggaccatccaggccaagaaggaggtggagcagcggagagccggcggctacagccggaagtacgccagcaaagccaagaatctggcagacgatatggtgagaaacaccgctagagatctgctgtactacgccgtgacccaggatgccatgctgatcttcgccaacctgagccggggcttcggccggcagggcaagcggaccttcatggccgagagacagtacacacggatggaggactggctgaccgccaagctggcctacgagggcctgagcaagacctacctgtccaagacactggcccagtacacctccaagacatgcagcaactgtgggtttaccatcaccagcgccgactacgacagggtgctggagaagctgaagaagacagcaacaggctggatgaccacaattaacggcaaggagctgaaggtggagggccagattacctactacaacagatacaagagacagaacgtagtcaaggacctgtccgtcgagctggatagactgagcgaagaatctgtgaacaacgacatctcctcctggacaaagggcagaagcggagaagctctgagcctcctgaagaaaagattctcccatagacccgtgcaggagaagttcgtgtgcctgaactgcggcttcgagacacacgcagccgagcaagccgccctgaacatcgccagatcctggctgttcctgcggagccaggagtacaagaaataccagacaaacaagacaaccggcaacaccgataagagagccttcgtcgagacctggcagtccttttaccggaagaagcttaaggaggtgtggaaacctgccgtgcggtctggcggatctggcggaggctcctgcccaggagagcgtgatgttcagcgacgtgagcgtggacttcagccaggaggagtgggagtgcctgaacgacgaccagagggacctgtacagggacgtgatgctggagaactacagcaacctggtgagcatgggccacagcgtgagcaagcccaacgtgatcagctacctggagcagggcaaggagccctggctggtggacagggagctgaccaggggccagtggcccgtgctggagagcaggggatctggctccggcagcggccccaagaaaaagagaaaagtctaagctgccttctgcggggcttgccttctggccatgcccttcttctctcccttgcacctgtacctcttggtctttgaataaagcctgagtaggaaggctagcaaaaaaaaaaaaaaaaaaaaaaaaaaaaaaaaaaaaaaaaaaaaaaaaaaaaaaaaaaaaaaaaaaaaaaaaaaaaaaaa

SEQ ID NO: 16240 - RNA, 9485 nt, synthetic construct
  source 1..9485: mol_type = other RNA
aggaaataagagagaaaagaagagtaagaagaaatataagagccaccatggcccctaagaagaagcgtaaagtgagccggatggaacgcctcgtctacgaggtgcggcagaagtgcagaaacatcgaggacatctgcatctcctgcggatctctgaacgtgaccctggagcacccactgttcatcggcggcatgtgccagaactgtaaaaactgttttctggagtgtgcctatcaatacgacgatgacggctaccagagctactgcaccatctgttgcggcggaagagaggtgctgatgtgtggaaataacaactgctgccggtgcttctgcgtggaatgcgtggacctgctggtgggccccggcgccgcccaggccgctattaaggaagatccttggaactgctacatgtgcggccacaagggcacatacggcctgctgagacggagagaggactggcctagcagactgcagatgttcttcgccaataaccacgaccaggagttcgacccccctaaggtgtaccctcccgtccccgccgagaagagaaagcccatccgggtcctgagcctgttcgatggcatcgccaccggtctgctggtgctgaaggacctgggcatccaggtggataggtacattgcctccgaggtgtgcgaggactccatcaccgtgggaatggtgcgtcatcagggcaagatcatgtacgtgggcgacgtgcggagcgtgacacagaagcatatccaggagtggggccctttcgacctggtgatcggcggcagcccttgcaatgacctgagcatcgtgaacccagcccggaagggcctgtacgagggaaccggcagactgttcttcgagttttacagactgctgcacgacgcccggcctaaggaaggcgacgaccggcccttcttttggctgttcgagaatgtggtggccatgggagtcagcgacaagcgggatattagccggttcctggagagcaaccccgtgatgatcgatgccaaggaagtgagcgccgcccaccgggccagatacttctggggcaatctgcctggcatgaacagacccctggccagcaccgtgaacgacaagctggagctgcaggagtgcctggagcacggccggatcgccaagttcagcaaggtgagaaccatcaccacccgaagcaacagcatcaaacaaggcaaggaccagcactttcctgtgttcatgaacgagaaggaggacatcctgtggtgtaccgagatggagagagtgttcgggttcccagtccactacacagatgtcagcaacatgtctagactggccagacagagactgctgggaagaagctggtccgtccctgtgatcagacacctgttcgcccctctgaaggagtacttcgcctgcgtgagcagcggcaacagcaacgccaacagccggggccccagcttctctagcggcctggtgccactgtccctgagagggagccacatgggccccatggagatctacaaaaccgtgagcgcctggaagcggcagcctgtgcgcgtgctgagcctgtttcggaatatcgataaagtcctgaaaagcctgggattcctggagagcggctctggctccggcggtggcaccctgaagtacgtggaggatgtgacaaacgtggtcagacgggatgtggagaagtggggccccttcgatctggtgtacggcagcacccaacccctgggcagctcttgtgaccggtgccctggctggtacatgtttcagttccaccggatcctgcagtacgccctgccgagacaggagtcccagcggccattcttttggattttcatggacaacttgctgctgaccgaggatgaccaggaaactaccactcggttcctgcagaccgaagccgtgaccctgcaggacgtgagaggccgggactaccagaacgccatgcgggtgtggtccaacatccctggactgaaaagcaagcacgcacctctgacccctaaagaagaggagtacctgcaggcccaggtgcggagcagaagcaagctggacgcccctaaggtggatctgctggtgaagaattgcctcctgcccctgagagagtacttcaagtatttcagccagaatagtctgcccctgggaggcagcggcggcggcgccctggtgacatttgaggacgtcgccgtgcggttcacccaggaggaatgggctctgctggatccttctcagaaaatcctgtaccgggacgtgatgagagagacataccggaatctgacctccgtgggcatcaactgggaatgttgggaccttgaagcctgcttcagaagcctgggaagaaacctgagagtgcaggtggtgaagagaaagtgcgagctgaccaacagcggcccctgcgccgagggcggcccaagcagcggcgcccctcctcccagcggcggcagcccagccggctccccaacctctaccgaggagggcacctctgagtccgccacccccgagagcggccctggcacctccaccgagcccagcgagggcagcgcacccggcagccctgccggcagccccacctccacagaggagggaaccagcaccgagcccagcgaaggcagcgccccaggcaccagcaccgagcctagtgagcaggagattaaacggatcaacaagatcagaagaagacttgtgaaagacagcaacaccaagaaggccggcaagacaggccccatgaaaaccctgctggttagagtgatgacacccgatctgagagagcggctggaaaacctgagaaagaagcctgaaaatatcccccagcccatcagcaatacatctagagccaacctgaataagctgctgaccgattacaccgaaatgaagaaggcgatcctgcatgtgtactgggaagagttccagaaggaccctgtgggcctgatgagccgggtggcccagcctgccagcaagaagatcgatcagaacaagctgaaacctgagatggacgagaagggcaacctgaccaccgccggctttgcctgctctcagtgtggccagcccctgttcgtgtacaagctggagcaggtgtctgagaagggcaaggcttacaccaactacttcggacggtgcaatgtggccgagcacgaaaagctgatcctgctggcccagctgaagcccgagaaggatagcgacgaagccgtgacatatagcctgggaaagtttgggcagagggccctggatttctacagcattcatgtgaccaaggagtccacccaccccgtgaagcccctggcccagatcgccggaaacagatacgcctccggacctgtgggaaaggccctgagcgacgcatgtatgggcacaatcgcctccttcctgtctaagtaccaggacatcatcatcgaacaccagaaggtggtgaagggcaaccagaagagactggagagcctgcgggagctggccggcaaggaaaacctggaataccctagcgtgaccctgccacctcagcctcacaccaaggagggcgttgatgcctacaacgaagtgatcgcccgggtgcgaatgtgggtgaacctgaacctgtggcagaagctgaagctaagcagagatgatgccaagcctctgctgagactgaagggattcccttcctttcctctggtcgagagacaggccaacgaagtggactggtgggacatggtgtgtaacgtgaagaagctgatcaacgagaaaaaggaggatggcaaggtgttttggcagaatctggctggctacaagagacaggaagccctgagaccatacctgagcagcgaggaagatcggaagaagggaaagaaattcgctcggtaccagctgggcgacctgctgctgcacctggaaaagaagcacggcgaggactggggaaaggtgtacgacgaggcctgggagcggattgacaagaaagtggaaggcctgagcaagcacatcaagctggaagaggaacggagaagcgaggacgcccagagcaaggccgccctgaccgactggctgcgggctaaggccagcttcgtgatcgagggcctgaaggaggccgacaaggacgagttctgcagatgcgagctgaagctgcagaagtggtacggggacctgcggggaaagcccttcgccatcgaagccgagaacagcatcctggacatcagcggcttcagcaagcagtacaactgtgccttcatctggcagaaggacggcgtgaagaagctgaacctgtacctgatcatcaactacttcaagggcggcaagctgcggttcaagaagatcaaacctgaagccttcgaagccaacagattctacaccgtgatcaacaaaaagagcggcgagatcgtgcccatggaggtgaacttcaacttcgacgaccccaacctgatcatcctgcctctggcctttggcaagagacagggcagagaattcatctggaacgacctgctgtccctggaaaccggcagcctgaagctggccaacggaagagtgatcgagaagacactgtacaacagaagaacccggcaggatgagcctgccctgttcgtggccctgaccttcgagcggcgggaggtcctggactcctccaatatcaaaccaatgaacctgatcggcgtggcaagaggcgaaaacatccccgccgtgatcgccctgaccgaccccgagggctgcccactgagccggtttaaggatagcctgggaaacccaacccacatcctgagaatcggcgagagctataaggagaagcagcggaccatccaggccaagaaggaggtggagcagcggagagccggcggctacagccggaagtacgccagcaaagccaagaatctggcagacgatatggtgagaaacaccgctagagatctgctgtactacgccgtgacccaggatgccatgctgatcttcgccaacctgagccggggcttcggccggcagggcaagcggaccttcatggccgagagacagtacacacggatggaggactggctgaccgccaagctggcctacgagggcctgagcaagacctacctgtccaagacactggcccagtacacctccaagacatgcagcaactgtgggtttaccatcaccagcgccgactacgacagggtgctggagaagctgaagaagacagcaacaggctggatgaccacaattaacggcaaggagctgaaggtggagggccagattacctactacaacagatacaagagacagaacgtagtcaaggacctgtccgtcgagctggatagactgagcgaagaatctgtgaacaacgacatctcctcctggacaaagggcagaagcggagaagctctgagcctcctgaagaaaagattctcccatagacccgtgcaggagaagttcgtgtgcctgaactgcggcttcgagacacacgcagccgagcaagccgccctgaacatcgccagatcctggctgttcctgcggagccaggagtacaagaaataccagacaaacaagacaaccggcaacaccgataagagagccttcgtcgagacctggcagtccttttaccggaagaagcttaaggaggtgtggaaacctgccgtgcggtctggcggatctggcggaggctccatggtgagcttcgaggacgtggccgtgcccctgagccaggaggagtggaactgcctgatccccgcccagaggggcctgtacagggacgtgatgctggagacctacggcaacctggtgagcctgggcctgcaggccagcaagcccgacgtgatcagcaggctggagcagggcgacgagccctggaccccccacatcctgaggacccagggcagctggagctggaggcacaagagggagggctacggcggcccaagcagcggcgcccctcctcccagcggcggcagcccagccggctccccaacctctaccgaggagggcacctctgagtccgccacccccgagagcggccctggcacctccaccgagcccagcgagggcagcgcacccggcagccctgccggcagccccacctccacagaggagggaaccagcaccgagcccagcgaaggcagcgccccaggcaccagcaccgagcctagtgagcaggagattaaacggatcaacaagatcagaagaagacttgtgaaagacagcaacaccaagaaggccggcaagacaggccccatgaaaaccctgctggttagagtgatgacacccgatctgagagagcggctggaaaacctgagaaagaagcctgaaaatatcccccagcccatcagcaatacatctagagccaacctgaataagctgctgaccgattacaccgaaatgaagaaggcgatcctgcatgtgtactgggaagagttccagaaggaccctgtgggcctgatgagccgggtggcccagcctgccagcaagaagatcgatcagaacaagctgaaacctgagatggacgagaagggcaacctgaccaccgccggctttgcctgctctcagtgtggccagcccctgttcgtgtacaagctggagcaggtgtctgagaagggcaaggcttacaccaactacttcggacggtgcaatgtggccgagcacgaaaagctgatcctgctggcccagctgaagcccgagaaggatagcgacgaagccgtgacatatagcctgggaaagtttgggcagagggccctggatttctacagcattcatgtgaccaaggagtccacccaccccgtgaagcccctggcccagatcgccggaaacagatacgcctccggacctgtgggaaaggccctgagcgacgcatgtatgggcacaatcgcctccttcctgtctaagtaccaggacatcatcatcgaacaccagaaggtggtgaagggcaaccagaagagactggagagcctgcgggagctggccggcaaggaaaacctggaataccctagcgtgaccctgccacctcagcctcacaccaaggagggcgttgatgcctacaacgaagtgatcgcccgggtgcgaatgtgggtgaacctgaacctgtggcagaagctgaagctaagcagagatgatgccaagcctctgctgagactgaagggattcccttcctttcctctggtcgagagacaggccaacgaagtggactggtgggacatggtgtgtaacgtgaagaagctgatcaacgagaaaaaggaggatggcaaggtgttttggcagaatctggctggctacaagagacaggaagccctgagaccatacctgagcagcgaggaagatcggaagaagggaaagaaattcgctcggtaccagctgggcgacctgctgctgcacctggaaaagaagcacggcgaggactggggaaaggtgtacgacgaggcctgggagcggattgacaagaaagtggaaggcctgagcaagcacatcaagctggaagaggaacggagaagcgaggacgcccagagcaaggccgccctgaccgactggctgcgggctaaggccagcttcgtgatcgagggcctgaaggaggccgacaaggacgagttctgcagatgcgagctgaagctgcagaagtggtacggggacctgcggggaaagcccttcgccatcgaagccgagaacagcatcctggacatcagcggcttcagcaagcagtacaactgtgccttcatctggcagaaggacggcgtgaagaagctgaacctgtacctgatcatcaactacttcaagggcggcaagctgcggttcaagaagatcaaacctgaagccttcgaagccaacagattctacaccgtgatcaacaaaaagagcggcgagatcgtgcccatggaggtgaacttcaacttcgacgaccccaacctgatcatcctgcctctggcctttggcaagagacagggcagagaattcatctggaacgacctgctgtccctggaaaccggcagcctgaagctggccaacggaagagtgatcgagaagacactgtacaacagaagaacccggcaggatgagcctgccctgttcgtggccctgaccttcgagcggcgggaggtcctggactcctccaatatcaaaccaatgaacctgatcggcgtggcaagaggcgaaaacatccccgccgtgatcgccctgaccgaccccgagggctgcccactgagccggtttaaggatagcctgggaaacccaacccacatcctgagaatcggcgagagctataaggagaagcagcggaccatccaggccaagaaggaggtggagcagcggagagccggcggctacagccggaagtacgccagcaaagccaagaatctggcagacgatatggtgagaaacaccgctagagatctgctgtactacgccgtgacccaggatgccatgctgatcttcgccaacctgagccggggcttcggccggcagggcaagcggaccttcatggccgagagacagtacacacggatggaggactggctgaccgccaagctggcctacgagggcctgagcaagacctacctgtccaagacactggcccagtacacctccaagacatgcagcaactgtgggtttaccatcaccagcgccgactacgacagggtgctggagaagctgaagaagacagcaacaggctggatgaccacaattaacggcaaggagctgaaggtggagggccagattacctactacaacagatacaagagacagaacgtagtcaaggacctgtccgtcgagctggatagactgagcgaagaatctgtgaacaacgacatctcctcctggacaaagggcagaagcggagaagctctgagcctcctgaagaaaagattctcccatagacccgtgcaggagaagttcgtgtgcctgaactgcggcttcgagacacacgcagccgagcaagccgccctgaacatcgccagatcctggctgttcctgcggagccaggagtacaagaaataccagacaaacaagacaaccggcaacaccgataagagagccttcgtcgagacctggcagtccttttaccggaagaagcttaaggaggtgtggaaacctgccgtgcggtctggcggatctggcggaggctcctatggtgagcttcgaggacgtggccgtgcccctgagccaggaggagtggaactgcctgatccccgcccagaggggcctgtacagggacgtgatgctggagacctacggcaacctggtgagcctgggcctgcaggccagcaagcccgacgtgatcagcaggctggagcagggcgacgagccctggaccccccacatcctgaggacccagggcagctggagctggaggcacaagagggagggctacggatctggctccggcagcggccccaagaaaaagagaaaagtctaagctgccttctgcggggcttgccttctggccatgcccttcttctctcccttgcacctgtacctcttggtctttgaataaagcctgagtaggaaggctagcaaaaaaaaaaaaaaaaaaaaaaaaaaaaaaaaaaaaaaaaaaaaaaaaaaaaaaaaaaaaaaaaaaaaaaaaaaaaaaaa

SEQ ID NO: 16241 - RNA, 9485 nt, synthetic construct
  source 1..9485: mol_type = other RNA
aggaaataagagagaaaagaagagtaagaagaaatataagagccaccatggcccctaagaagaagcgtaaagtgagccggatggaacgcctcgtctacgaggtgcggcagaagtgcagaaacatcgaggacatctgcatctcctgcggatctctgaacgtgaccctggagcacccactgttcatcggcggcatgtgccagaactgtaaaaactgttttctggagtgtgcctatcaatacgacgatgacggctaccagagctactgcaccatctgttgcggcggaagagaggtgctgatgtgtggaaataacaactgctgccggtgcttctgcgtggaatgcgtggacctgctggtgggccccggcgccgcccaggccgctattaaggaagatccttggaactgctacatgtgcggccacaagggcacatacggcctgctgagacggagagaggactggcctagcagactgcagatgttcttcgccaataaccacgaccaggagttcgacccccctaaggtgtaccctcccgtccccgccgagaagagaaagcccatccgggtcctgagcctgttcgatggcatcgccaccggtctgctggtgctgaaggacctgggcatccaggtggataggtacattgcctccgaggtgtgcgaggactccatcaccgtgggaatggtgcgtcatcagggcaagatcatgtacgtgggcgacgtgcggagcgtgacacagaagcatatccaggagtggggccctttcgacctggtgatcggcggcagcccttgcaatgacctgagcatcgtgaacccagcccggaagggcctgtacgagggaaccggcagactgttcttcgagttttacagactgctgcacgacgcccggcctaaggaaggcgacgaccggcccttcttttggctgttcgagaatgtggtggccatgggagtcagcgacaagcgggatattagccggttcctggagagcaaccccgtgatgatcgatgccaaggaagtgagcgccgcccaccgggccagatacttctggggcaatctgcctggcatgaacagacccctggccagcaccgtgaacgacaagctggagctgcaggagtgcctggagcacggccggatcgccaagttcagcaaggtgagaaccatcaccacccgaagcaacagcatcaaacaaggcaaggaccagcactttcctgtgttcatgaacgagaaggaggacatcctgtggtgtaccgagatggagagagtgttcgggttcccagtccactacacagatgtcagcaacatgtctagactggccagacagagactgctgggaagaagctggtccgtccctgtgatcagacacctgttcgcccctctgaaggagtacttcgcctgcgtgagcagcggcaacagcaacgccaacagccggggccccagcttctctagcggcctggtgccactgtccctgagagggagccacatgggccccatggagatctacaaaaccgtgagcgcctggaagcggcagcctgtgcgcgtgctgagcctgtttcggaatatcgataaagtcctgaaaagcctgggattcctggagagcggctctggctccggcggtggcaccctgaagtacgtggaggatgtgacaaacgtggtcagacgggatgtggagaagtggggccccttcgatctggtgtacggcagcacccaacccctgggcagctcttgtgaccggtgccctggctggtacatgtttcagttccaccggatcctgcagtacgccctgccgagacaggagtcccagcggccattcttttggattttcatggacaacttgctgctgaccgaggatgaccaggaaactaccactcggttcctgcagaccgaagccgtgaccctgcaggacgtgagaggccgggactaccagaacgccatgcgggtgtggtccaacatccctggactgaaaagcaagcacgcacctctgacccctaaagaagaggagtacctgcaggcccaggtgcggagcagaagcaagctggacgcccctaaggtggatctgctggtgaagaattgcctcctgcccctgagagagtacttcaagtatttcagccagaatagtctgcccctgggaggcagcggcggcggcgccctggtgacatttgaggacgtcgccgtgcggttcacccaggaggaatgggctctgctggatccttctcagaaaatcctgtaccgggacgtgatgagagagacataccggaatctgacctccgtgggcatcaactgggaatgttgggaccttgaagcctgcttcagaagcctgggaagaaacctgagagtgcaggtggtgaagagaaagtgcgagctgaccaacagcggcccctgcgccgagggcggcccaagcagcggcgcccctcctcccagcggcggcagcccagccggctccccaacctctaccgaggagggcacctctgagtccgccacccccgagagcggccctggcacctccaccgagcccagcgagggcagcgcacccggcagccctgccggcagccccacctccacagaggagggaaccagcaccgagcccagcgaaggcagcgccccaggcaccagcaccgagcctagtgagcaggagattaaacggatcaacaagatcagaagaagacttgtgaaagacagcaacaccaagaaggccggcaagacaggccccatgaaaaccctgctggttagagtgatgacacccgatctgagagagcggctggaaaacctgagaaagaagcctgaaaatatcccccagcccatcagcaatacatctagagccaacctgaataagctgctgaccgattacaccgaaatgaagaaggcgatcctgcatgtgtactgggaagagttccagaaggaccctgtgggcctgatgagccgggtggcccagcctgccagcaagaagatcgatcagaacaagctgaaacctgagatggacgagaagggcaacctgaccaccgccggctttgcctgctctcagtgtggccagcccctgttcgtgtacaagctggagcaggtgtctgagaagggcaaggcttacaccaactacttcggacggtgcaatgtggccgagcacgaaaagctgatcctgctggcccagctgaagcccgagaaggatagcgacgaagccgtgacatatagcctgggaaagtttgggcagagggccctggatttctacagcattcatgtgaccaaggagtccacccaccccgtgaagcccctggcccagatcgccggaaacagatacgcctccggacctgtgggaaaggccctgagcgacgcatgtatgggcacaatcgcctccttcctgtctaagtaccaggacatcatcatcgaacaccagaaggtggtgaagggcaaccagaagagactggagagcctgcgggagctggccggcaaggaaaacctggaataccctagcgtgaccctgccacctcagcctcacaccaaggagggcgttgatgcctacaacgaagtgatcgcccgggtgcgaatgtgggtgaacctgaacctgtggcagaagctgaagctaagcagagatgatgccaagcctctgctgagactgaagggattcccttcctttcctctggtcgagagacaggccaacgaagtggactggtgggacatggtgtgtaacgtgaagaagctgatcaacgagaaaaaggaggatggcaaggtgttttggcagaatctggctggctacaagagacaggaagccctgagaccatacctgagcagcgaggaagatcggaagaagggaaagaaattcgctcggtaccagctgggcgacctgctgctgcacctggaaaagaagcacggcgaggactggggaaaggtgtacgacgaggcctgggagcggattgacaagaaagtggaaggcctgagcaagcacatcaagctggaagaggaacggagaagcgaggacgcccagagcaaggccgccctgaccgactggctgcgggctaaggccagcttcgtgatcgagggcctgaaggaggccgacaaggacgagttctgcagatgcgagctgaagctgcagaagtggtacggggacctgcggggaaagcccttcgccatcgaagccgagaacagcatcctggacatcagcggcttcagcaagcagtacaactgtgccttcatctggcagaaggacggcgtgaagaagctgaacctgtacctgatcatcaactacttcaagggcggcaagctgcggttcaagaagatcaaacctgaagccttcgaagccaacagattctacaccgtgatcaacaaaaagagcggcgagatcgtgcccatggaggtgaacttcaacttcgacgaccccaacctgatcatcctgcctctggcctttggcaagagacagggcagagaattcatctggaacgacctgctgtccctggaaaccggcagcctgaagctggccaacggaagagtgatcgagaagacactgtacaacagaagaacccggcaggatgagcctgccctgttcgtggccctgaccttcgagcggcgggaggtcctggactcctccaatatcaaaccaatgaacctgatcggcgtggcaagaggcgaaaacatccccgccgtgatcgccctgaccgaccccgagggctgcccactgagccggtttaaggatagcctgggaaacccaacccacatcctgagaatcggcgagagctataaggagaagcagcggaccatccaggccaagaaggaggtggagcagcggagagccggcggctacagccggaagtacgccagcaaagccaagaatctggcagacgatatggtgagaaacaccgctagagatctgctgtactacgccgtgacccaggatgccatgctgatcttcgccaacctgagccggggcttcggccggcagggcaagcggaccttcatggccgagagacagtacacacggatggaggactggctgaccgccaagctggcctacgagggcctgagcaagacctacctgtccaagacactggcccagtacacctccaagacatgcagcaactgtgggtttaccatcaccagcgccgactacgacagggtgctggagaagctgaagaagacagcaacaggctggatgaccacaattaacggcaaggagctgaaggtggagggccagattacctactacaacagatacaagagacagaacgtagtcaaggacctgtccgtcgagctggatagactgagcgaagaatctgtgaacaacgacatctcctcctggacaaagggcagaagcggagaagctctgagcctcctgaagaaaagattctcccatagacccgtgcaggagaagttcgtgtgcctgaactgcggcttcgagacacacgcagccgagcaagccgccctgaacatcgccagatcctggctgttcctgcggagccaggagtacaagaaataccagacaaacaagacaaccggcaacaccgataagagagccttcgtcgagacctggcagtccttttaccggaagaagcttaaggaggtgtggaaacctgccgtgcggtctggcggatctggcggaggctccagccagatccccctgaccttccaggacgtggccgtggacttcacctgggaggagtggggcctgctggagcccagccagaaggacatgtactgggacgtgatgctggagatctacgagaacttcatcagcctgggcggcgtgcccctgagcatccccgacgtgatcagccagctggagaggatggaggccccctggatgacccagggcggcgtgctgatcagcaccttcctggacagcagcaccggcggcccaagcagcggcgcccctcctcccagcggcggcagcccagccggctccccaacctctaccgaggagggcacctctgagtccgccacccccgagagcggccctggcacctccaccgagcccagcgagggcagcgcacccggcagccctgccggcagccccacctccacagaggagggaaccagcaccgagcccagcgaaggcagcgccccaggcaccagcaccgagcctagtgagcaggagattaaacggatcaacaagatcagaagaagacttgtgaaagacagcaacaccaagaaggccggcaagacaggccccatgaaaaccctgctggttagagtgatgacacccgatctgagagagcggctggaaaacctgagaaagaagcctgaaaatatcccccagcccatcagcaatacatctagagccaacctgaataagctgctgaccgattacaccgaaatgaagaaggcgatcctgcatgtgtactgggaagagttccagaaggaccctgtgggcctgatgagccgggtggcccagcctgccagcaagaagatcgatcagaacaagctgaaacctgagatggacgagaagggcaacctgaccaccgccggctttgcctgctctcagtgtggccagcccctgttcgtgtacaagctggagcaggtgtctgagaagggcaaggcttacaccaactacttcggacggtgcaatgtggccgagcacgaaaagctgatcctgctggcccagctgaagcccgagaaggatagcgacgaagccgtgacatatagcctgggaaagtttgggcagagggccctggatttctacagcattcatgtgaccaaggagtccacccaccccgtgaagcccctggcccagatcgccggaaacagatacgcctccggacctgtgggaaaggccctgagcgacgcatgtatgggcacaatcgcctccttcctgtctaagtaccaggacatcatcatcgaacaccagaaggtggtgaagggcaaccagaagagactggagagcctgcgggagctggccggcaaggaaaacctggaataccctagcgtgaccctgccacctcagcctcacaccaaggagggcgttgatgcctacaacgaagtgatcgcccgggtgcgaatgtgggtgaacctgaacctgtggcagaagctgaagctaagcagagatgatgccaagcctctgctgagactgaagggattcccttcctttcctctggtcgagagacaggccaacgaagtggactggtgggacatggtgtgtaacgtgaagaagctgatcaacgagaaaaaggaggatggcaaggtgttttggcagaatctggctggctacaagagacaggaagccctgagaccatacctgagcagcgaggaagatcggaagaagggaaagaaattcgctcggtaccagctgggcgacctgctgctgcacctggaaaagaagcacggcgaggactggggaaaggtgtacgacgaggcctgggagcggattgacaagaaagtggaaggcctgagcaagcacatcaagctggaagaggaacggagaagcgaggacgcccagagcaaggccgccctgaccgactggctgcgggctaaggccagcttcgtgatcgagggcctgaaggaggccgacaaggacgagttctgcagatgcgagctgaagctgcagaagtggtacggggacctgcggggaaagcccttcgccatcgaagccgagaacagcatcctggacatcagcggcttcagcaagcagtacaactgtgccttcatctggcagaaggacggcgtgaagaagctgaacctgtacctgatcatcaactacttcaagggcggcaagctgcggttcaagaagatcaaacctgaagccttcgaagccaacagattctacaccgtgatcaacaaaaagagcggcgagatcgtgcccatggaggtgaacttcaacttcgacgaccccaacctgatcatcctgcctctggcctttggcaagagacagggcagagaattcatctggaacgacctgctgtccctggaaaccggcagcctgaagctggccaacggaagagtgatcgagaagacactgtacaacagaagaacccggcaggatgagcctgccctgttcgtggccctgaccttcgagcggcgggaggtcctggactcctccaatatcaaaccaatgaacctgatcggcgtggcaagaggcgaaaacatccccgccgtgatcgccctgaccgaccccgagggctgcccactgagccggtttaaggatagcctgggaaacccaacccacatcctgagaatcggcgagagctataaggagaagcagcggaccatccaggccaagaaggaggtggagcagcggagagccggcggctacagccggaagtacgccagcaaagccaagaatctggcagacgatatggtgagaaacaccgctagagatctgctgtactacgccgtgacccaggatgccatgctgatcttcgccaacctgagccggggcttcggccggcagggcaagcggaccttcatggccgagagacagtacacacggatggaggactggctgaccgccaagctggcctacgagggcctgagcaagacctacctgtccaagacactggcccagtacacctccaagacatgcagcaactgtgggtttaccatcaccagcgccgactacgacagggtgctggagaagctgaagaagacagcaacaggctggatgaccacaattaacggcaaggagctgaaggtggagggccagattacctactacaacagatacaagagacagaacgtagtcaaggacctgtccgtcgagctggatagactgagcgaagaatctgtgaacaacgacatctcctcctggacaaagggcagaagcggagaagctctgagcctcctgaagaaaagattctcccatagacccgtgcaggagaagttcgtgtgcctgaactgcggcttcgagacacacgcagccgagcaagccgccctgaacatcgccagatcctggctgttcctgcggagccaggagtacaagaaataccagacaaacaagacaaccggcaacaccgataagagagccttcgtcgagacctggcagtccttttaccggaagaagcttaaggaggtgtggaaacctgccgtgcggtctggcggatctggcggaggctcctagccagatccccctgaccttccaggacgtggccgtggacttcacctgggaggagtggggcctgctggagcccagccagaaggacatgtactgggacgtgatgctggagatctacgagaacttcatcagcctgggcggcgtgcccctgagcatccccgacgtgatcagccagctggagaggatggaggccccctggatgacccagggcggcgtgctgatcagcaccttcctggacagcagcaccggatctggctccggcagcggccccaagaaaaagagaaaagtctaagctgccttctgcggggcttgccttctggccatgcccttcttctctcccttgcacctgtacctcttggtctttgaataaagcctgagtaggaaggctagcaaaaaaaaaaaaaaaaaaaaaaaaaaaaaaaaaaaaaaaaaaaaaaaaaaaaaaaaaaaaaaaaaaaaaaaaaaaaaaaa

SEQ ID NO: 16242 - RNA, 9485 nt, synthetic construct
  source 1..9485: mol_type = other RNA
aggaaataagagagaaaagaagagtaagaagaaatataagagccaccatggcccctaagaagaagcgtaaagtgagccggatggaacgcctcgtctacgaggtgcggcagaagtgcagaaacatcgaggacatctgcatctcctgcggatctctgaacgtgaccctggagcacccactgttcatcggcggcatgtgccagaactgtaaaaactgttttctggagtgtgcctatcaatacgacgatgacggctaccagagctactgcaccatctgttgcggcggaagagaggtgctgatgtgtggaaataacaactgctgccggtgcttctgcgtggaatgcgtggacctgctggtgggccccggcgccgcccaggccgctattaaggaagatccttggaactgctacatgtgcggccacaagggcacatacggcctgctgagacggagagaggactggcctagcagactgcagatgttcttcgccaataaccacgaccaggagttcgacccccctaaggtgtaccctcccgtccccgccgagaagagaaagcccatccgggtcctgagcctgttcgatggcatcgccaccggtctgctggtgctgaaggacctgggcatccaggtggataggtacattgcctccgaggtgtgcgaggactccatcaccgtgggaatggtgcgtcatcagggcaagatcatgtacgtgggcgacgtgcggagcgtgacacagaagcatatccaggagtggggccctttcgacctggtgatcggcggcagcccttgcaatgacctgagcatcgtgaacccagcccggaagggcctgtacgagggaaccggcagactgttcttcgagttttacagactgctgcacgacgcccggcctaaggaaggcgacgaccggcccttcttttggctgttcgagaatgtggtggccatgggagtcagcgacaagcgggatattagccggttcctggagagcaaccccgtgatgatcgatgccaaggaagtgagcgccgcccaccgggccagatacttctggggcaatctgcctggcatgaacagacccctggccagcaccgtgaacgacaagctggagctgcaggagtgcctggagcacggccggatcgccaagttcagcaaggtgagaaccatcaccacccgaagcaacagcatcaaacaaggcaaggaccagcactttcctgtgttcatgaacgagaaggaggacatcctgtggtgtaccgagatggagagagtgttcgggttcccagtccactacacagatgtcagcaacatgtctagactggccagacagagactgctgggaagaagctggtccgtccctgtgatcagacacctgttcgcccctctgaaggagtacttcgcctgcgtgagcagcggcaacagcaacgccaacagccggggccccagcttctctagcggcctggtgccactgtccctgagagggagccacatgggccccatggagatctacaaaaccgtgagcgcctggaagcggcagcctgtgcgcgtgctgagcctgtttcggaatatcgataaagtcctgaaaagcctgggattcctggagagcggctctggctccggcggtggcaccctgaagtacgtggaggatgtgacaaacgtggtcagacgggatgtggagaagtggggccccttcgatctggtgtacggcagcacccaacccctgggcagctcttgtgaccggtgccctggctggtacatgtttcagttccaccggatcctgcagtacgccctgccgagacaggagtcccagcggccattcttttggattttcatggacaacttgctgctgaccgaggatgaccaggaaactaccactcggttcctgcagaccgaagccgtgaccctgcaggacgtgagaggccgggactaccagaacgccatgcgggtgtggtccaacatccctggactgaaaagcaagcacgcacctctgacccctaaagaagaggagtacctgcaggcccaggtgcggagcagaagcaagctggacgcccctaaggtggatctgctggtgaagaattgcctcctgcccctgagagagtacttcaagtatttcagccagaatagtctgcccctgggaggcagcggcggcggcgccctggtgacatttgaggacgtcgccgtgcggttcacccaggaggaatgggctctgctggatccttctcagaaaatcctgtaccgggacgtgatgagagagacataccggaatctgacctccgtgggcatcaactgggaatgttgggaccttgaagcctgcttcagaagcctgggaagaaacctgagagtgcaggtggtgaagagaaagtgcgagctgaccaacagcggcccctgcgccgagggcggcccaagcagcggcgcccctcctcccagcggcggcagcccagccggctccccaacctctaccgaggagggcacctctgagtccgccacccccgagagcggccctggcacctccaccgagcccagcgagggcagcgcacccggcagccctgccggcagccccacctccacagaggagggaaccagcaccgagcccagcgaaggcagcgccccaggcaccagcaccgagcctagtgagcaggagattaaacggatcaacaagatcagaagaagacttgtgaaagacagcaacaccaagaaggccggcaagacaggccccatgaaaaccctgctggttagagtgatgacacccgatctgagagagcggctggaaaacctgagaaagaagcctgaaaatatcccccagcccatcagcaatacatctagagccaacctgaataagctgctgaccgattacaccgaaatgaagaaggcgatcctgcatgtgtactgggaagagttccagaaggaccctgtgggcctgatgagccgggtggcccagcctgccagcaagaagatcgatcagaacaagctgaaacctgagatggacgagaagggcaacctgaccaccgccggctttgcctgctctcagtgtggccagcccctgttcgtgtacaagctggagcaggtgtctgagaagggcaaggcttacaccaactacttcggacggtgcaatgtggccgagcacgaaaagctgatcctgctggcccagctgaagcccgagaaggatagcgacgaagccgtgacatatagcctgggaaagtttgggcagagggccctggatttctacagcattcatgtgaccaaggagtccacccaccccgtgaagcccctggcccagatcgccggaaacagatacgcctccggacctgtgggaaaggccctgagcgacgcatgtatgggcacaatcgcctccttcctgtctaagtaccaggacatcatcatcgaacaccagaaggtggtgaagggcaaccagaagagactggagagcctgcgggagctggccggcaaggaaaacctggaataccctagcgtgaccctgccacctcagcctcacaccaaggagggcgttgatgcctacaacgaagtgatcgcccgggtgcgaatgtgggtgaacctgaacctgtggcagaagctgaagctaagcagagatgatgccaagcctctgctgagactgaagggattcccttcctttcctctggtcgagagacaggccaacgaagtggactggtgggacatggtgtgtaacgtgaagaagctgatcaacgagaaaaaggaggatggcaaggtgttttggcagaatctggctggctacaagagacaggaagccctgagaccatacctgagcagcgaggaagatcggaagaagggaaagaaattcgctcggtaccagctgggcgacctgctgctgcacctggaaaagaagcacggcgaggactggggaaaggtgtacgacgaggcctgggagcggattgacaagaaagtggaaggcctgagcaagcacatcaagctggaagaggaacggagaagcgaggacgcccagagcaaggccgccctgaccgactggctgcgggctaaggccagcttcgtgatcgagggcctgaaggaggccgacaaggacgagttctgcagatgcgagctgaagctgcagaagtggtacggggacctgcggggaaagcccttcgccatcgaagccgagaacagcatcctggacatcagcggcttcagcaagcagtacaactgtgccttcatctggcagaaggacggcgtgaagaagctgaacctgtacctgatcatcaactacttcaagggcggcaagctgcggttcaagaagatcaaacctgaagccttcgaagccaacagattctacaccgtgatcaacaaaaagagcggcgagatcgtgcccatggaggtgaacttcaacttcgacgaccccaacctgatcatcctgcctctggcctttggcaagagacagggcagagaattcatctggaacgacctgctgtccctggaaaccggcagcctgaagctggccaacggaagagtgatcgagaagacactgtacaacagaagaacccggcaggatgagcctgccctgttcgtggccctgaccttcgagcggcgggaggtcctggactcctccaatatcaaaccaatgaacctgatcggcgtggcaagaggcgaaaacatccccgccgtgatcgccctgaccgaccccgagggctgcccactgagccggtttaaggatagcctgggaaacccaacccacatcctgagaatcggcgagagctataaggagaagcagcggaccatccaggccaagaaggaggtggagcagcggagagccggcggctacagccggaagtacgccagcaaagccaagaatctggcagacgatatggtgagaaacaccgctagagatctgctgtactacgccgtgacccaggatgccatgctgatcttcgccaacctgagccggggcttcggccggcagggcaagcggaccttcatggccgagagacagtacacacggatggaggactggctgaccgccaagctggcctacgagggcctgagcaagacctacctgtccaagacactggcccagtacacctccaagacatgcagcaactgtgggtttaccatcaccagcgccgactacgacagggtgctggagaagctgaagaagacagcaacaggctggatgaccacaattaacggcaaggagctgaaggtggagggccagattacctactacaacagatacaagagacagaacgtagtcaaggacctgtccgtcgagctggatagactgagcgaagaatctgtgaacaacgacatctcctcctggacaaagggcagaagcggagaagctctgagcctcctgaagaaaagattctcccatagacccgtgcaggagaagttcgtgtgcctgaactgcggcttcgagacacacgcagccgagcaagccgccctgaacatcgccagatcctggctgttcctgcggagccaggagtacaagaaataccagacaaacaagacaaccggcaacaccgataagagagccttcgtcgagacctggcagtccttttaccggaagaagcttaaggaggtgtggaaacctgccgtgcggtctggcggatctggcggaggctccgcccaggagagcgtgatgttcagcgacgtgagcatcgacttcagccaggaggagtgggagtgcctgaacgacgaccagagggacctgtacagggacgtgatgctggagaactacagcaacctggtgagcatggccggccacagcatcagcaagcccaacgtgatcagctacctggagcagggcaaggagccctggctggtggacagggagatcaccagcggccagtggcccgtgctggagagcggcggcccaagcagcggcgcccctcctcccagcggcggcagcccagccggctccccaacctctaccgaggagggcacctctgagtccgccacccccgagagcggccctggcacctccaccgagcccagcgagggcagcgcacccggcagccctgccggcagccccacctccacagaggagggaaccagcaccgagcccagcgaaggcagcgccccaggcaccagcaccgagcctagtgagcaggagattaaacggatcaacaagatcagaagaagacttgtgaaagacagcaacaccaagaaggccggcaagacaggccccatgaaaaccctgctggttagagtgatgacacccgatctgagagagcggctggaaaacctgagaaagaagcctgaaaatatcccccagcccatcagcaatacatctagagccaacctgaataagctgctgaccgattacaccgaaatgaagaaggcgatcctgcatgtgtactgggaagagttccagaaggaccctgtgggcctgatgagccgggtggcccagcctgccagcaagaagatcgatcagaacaagctgaaacctgagatggacgagaagggcaacctgaccaccgccggctttgcctgctctcagtgtggccagcccctgttcgtgtacaagctggagcaggtgtctgagaagggcaaggcttacaccaactacttcggacggtgcaatgtggccgagcacgaaaagctgatcctgctggcccagctgaagcccgagaaggatagcgacgaagccgtgacatatagcctgggaaagtttgggcagagggccctggatttctacagcattcatgtgaccaaggagtccacccaccccgtgaagcccctggcccagatcgccggaaacagatacgcctccggacctgtgggaaaggccctgagcgacgcatgtatgggcacaatcgcctccttcctgtctaagtaccaggacatcatcatcgaacaccagaaggtggtgaagggcaaccagaagagactggagagcctgcgggagctggccggcaaggaaaacctggaataccctagcgtgaccctgccacctcagcctcacaccaaggagggcgttgatgcctacaacgaagtgatcgcccgggtgcgaatgtgggtgaacctgaacctgtggcagaagctgaagctaagcagagatgatgccaagcctctgctgagactgaagggattcccttcctttcctctggtcgagagacaggccaacgaagtggactggtgggacatggtgtgtaacgtgaagaagctgatcaacgagaaaaaggaggatggcaaggtgttttggcagaatctggctggctacaagagacaggaagccctgagaccatacctgagcagcgaggaagatcggaagaagggaaagaaattcgctcggtaccagctgggcgacctgctgctgcacctggaaaagaagcacggcgaggactggggaaaggtgtacgacgaggcctgggagcggattgacaagaaagtggaaggcctgagcaagcacatcaagctggaagaggaacggagaagcgaggacgcccagagcaaggccgccctgaccgactggctgcgggctaaggccagcttcgtgatcgagggcctgaaggaggccgacaaggacgagttctgcagatgcgagctgaagctgcagaagtggtacggggacctgcggggaaagcccttcgccatcgaagccgagaacagcatcctggacatcagcggcttcagcaagcagtacaactgtgccttcatctggcagaaggacggcgtgaagaagctgaacctgtacctgatcatcaactacttcaagggcggcaagctgcggttcaagaagatcaaacctgaagccttcgaagccaacagattctacaccgtgatcaacaaaaagagcggcgagatcgtgcccatggaggtgaacttcaacttcgacgaccccaacctgatcatcctgcctctggcctttggcaagagacagggcagagaattcatctggaacgacctgctgtccctggaaaccggcagcctgaagctggccaacggaagagtgatcgagaagacactgtacaacagaagaacccggcaggatgagcctgccctgttcgtggccctgaccttcgagcggcgggaggtcctggactcctccaatatcaaaccaatgaacctgatcggcgtggcaagaggcgaaaacatccccgccgtgatcgccctgaccgaccccgagggctgcccactgagccggtttaaggatagcctgggaaacccaacccacatcctgagaatcggcgagagctataaggagaagcagcggaccatccaggccaagaaggaggtggagcagcggagagccggcggctacagccggaagtacgccagcaaagccaagaatctggcagacgatatggtgagaaacaccgctagagatctgctgtactacgccgtgacccaggatgccatgctgatcttcgccaacctgagccggggcttcggccggcagggcaagcggaccttcatggccgagagacagtacacacggatggaggactggctgaccgccaagctggcctacgagggcctgagcaagacctacctgtccaagacactggcccagtacacctccaagacatgcagcaactgtgggtttaccatcaccagcgccgactacgacagggtgctggagaagctgaagaagacagcaacaggctggatgaccacaattaacggcaaggagctgaaggtggagggccagattacctactacaacagatacaagagacagaacgtagtcaaggacctgtccgtcgagctggatagactgagcgaagaatctgtgaacaacgacatctcctcctggacaaagggcagaagcggagaagctctgagcctcctgaagaaaagattctcccatagacccgtgcaggagaagttcgtgtgcctgaactgcggcttcgagacacacgcagccgagcaagccgccctgaacatcgccagatcctggctgttcctgcggagccaggagtacaagaaataccagacaaacaagacaaccggcaacaccgataagagagccttcgtcgagacctggcagtccttttaccggaagaagcttaaggaggtgtggaaacctgccgtgcggtctggcggatctggcggaggctcctgcccaggagagcgtgatgttcagcgacgtgagcatcgacttcagccaggaggagtgggagtgcctgaacgacgaccagagggacctgtacagggacgtgatgctggagaactacagcaacctggtgagcatggccggccacagcatcagcaagcccaacgtgatcagctacctggagcagggcaaggagccctggctggtggacagggagatcaccagcggccagtggcccgtgctggagagcggatctggctccggcagcggccccaagaaaaagagaaaagtctaagctgccttctgcggggcttgccttctggccatgcccttcttctctcccttgcacctgtacctcttggtctttgaataaagcctgagtaggaaggctagcaaaaaaaaaaaaaaaaaaaaaaaaaaaaaaaaaaaaaaaaaaaaaaaaaaaaaaaaaaaaaaaaaaaaaaaaaaaaaaaa

SEQ ID NO: 16243 - RNA, 9485 nt, synthetic construct
  source 1..9485: mol_type = other RNA
aggaaataagagagaaaagaagagtaagaagaaatataagagccaccatggcccctaagaagaagcgtaaagtgagccggatggaacgcctcgtctacgaggtgcggcagaagtgcagaaacatcgaggacatctgcatctcctgcggatctctgaacgtgaccctggagcacccactgttcatcggcggcatgtgccagaactgtaaaaactgttttctggagtgtgcctatcaatacgacgatgacggctaccagagctactgcaccatctgttgcggcggaagagaggtgctgatgtgtggaaataacaactgctgccggtgcttctgcgtggaatgcgtggacctgctggtgggccccggcgccgcccaggccgctattaaggaagatccttggaactgctacatgtgcggccacaagggcacatacggcctgctgagacggagagaggactggcctagcagactgcagatgttcttcgccaataaccacgaccaggagttcgacccccctaaggtgtaccctcccgtccccgccgagaagagaaagcccatccgggtcctgagcctgttcgatggcatcgccaccggtctgctggtgctgaaggacctgggcatccaggtggataggtacattgcctccgaggtgtgcgaggactccatcaccgtgggaatggtgcgtcatcagggcaagatcatgtacgtgggcgacgtgcggagcgtgacacagaagcatatccaggagtggggccctttcgacctggtgatcggcggcagcccttgcaatgacctgagcatcgtgaacccagcccggaagggcctgtacgagggaaccggcagactgttcttcgagttttacagactgctgcacgacgcccggcctaaggaaggcgacgaccggcccttcttttggctgttcgagaatgtggtggccatgggagtcagcgacaagcgggatattagccggttcctggagagcaaccccgtgatgatcgatgccaaggaagtgagcgccgcccaccgggccagatacttctggggcaatctgcctggcatgaacagacccctggccagcaccgtgaacgacaagctggagctgcaggagtgcctggagcacggccggatcgccaagttcagcaaggtgagaaccatcaccacccgaagcaacagcatcaaacaaggcaaggaccagcactttcctgtgttcatgaacgagaaggaggacatcctgtggtgtaccgagatggagagagtgttcgggttcccagtccactacacagatgtcagcaacatgtctagactggccagacagagactgctgggaagaagctggtccgtccctgtgatcagacacctgttcgcccctctgaaggagtacttcgcctgcgtgagcagcggcaacagcaacgccaacagccggggccccagcttctctagcggcctggtgccactgtccctgagagggagccacatgggccccatggagatctacaaaaccgtgagcgcctggaagcggcagcctgtgcgcgtgctgagcctgtttcggaatatcgataaagtcctgaaaagcctgggattcctggagagcggctctggctccggcggtggcaccctgaagtacgtggaggatgtgacaaacgtggtcagacgggatgtggagaagtggggccccttcgatctggtgtacggcagcacccaacccctgggcagctcttgtgaccggtgccctggctggtacatgtttcagttccaccggatcctgcagtacgccctgccgagacaggagtcccagcggccattcttttggattttcatggacaacttgctgctgaccgaggatgaccaggaaactaccactcggttcctgcagaccgaagccgtgaccctgcaggacgtgagaggccgggactaccagaacgccatgcgggtgtggtccaacatccctggactgaaaagcaagcacgcacctctgacccctaaagaagaggagtacctgcaggcccaggtgcggagcagaagcaagctggacgcccctaaggtggatctgctggtgaagaattgcctcctgcccctgagagagtacttcaagtatttcagccagaatagtctgcccctgggaggcagcggcggcggcgccctggtgacatttgaggacgtcgccgtgcggttcacccaggaggaatgggctctgctggatccttctcagaaaatcctgtaccgggacgtgatgagagagacataccggaatctgacctccgtgggcatcaactgggaatgttgggaccttgaagcctgcttcagaagcctgggaagaaacctgagagtgcaggtggtgaagagaaagtgcgagctgaccaacagcggcccctgcgccgagggcggcccaagcagcggcgcccctcctcccagcggcggcagcccagccggctccccaacctctaccgaggagggcacctctgagtccgccacccccgagagcggccctggcacctccaccgagcccagcgagggcagcgcacccggcagccctgccggcagccccacctccacagaggagggaaccagcaccgagcccagcgaaggcagcgccccaggcaccagcaccgagcctagtgagcaggagattaaacggatcaacaagatcagaagaagacttgtgaaagacagcaacaccaagaaggccggcaagacaggccccatgaaaaccctgctggttagagtgatgacacccgatctgagagagcggctggaaaacctgagaaagaagcctgaaaatatcccccagcccatcagcaatacatctagagccaacctgaataagctgctgaccgattacaccgaaatgaagaaggcgatcctgcatgtgtactgggaagagttccagaaggaccctgtgggcctgatgagccgggtggcccagcctgccagcaagaagatcgatcagaacaagctgaaacctgagatggacgagaagggcaacctgaccaccgccggctttgcctgctctcagtgtggccagcccctgttcgtgtacaagctggagcaggtgtctgagaagggcaaggcttacaccaactacttcggacggtgcaatgtggccgagcacgaaaagctgatcctgctggcccagctgaagcccgagaaggatagcgacgaagccgtgacatatagcctgggaaagtttgggcagagggccctggatttctacagcattcatgtgaccaaggagtccacccaccccgtgaagcccctggcccagatcgccggaaacagatacgcctccggacctgtgggaaaggccctgagcgacgcatgtatgggcacaatcgcctccttcctgtctaagtaccaggacatcatcatcgaacaccagaaggtggtgaagggcaaccagaagagactggagagcctgcgggagctggccggcaaggaaaacctggaataccctagcgtgaccctgccacctcagcctcacaccaaggagggcgttgatgcctacaacgaagtgatcgcccgggtgcgaatgtgggtgaacctgaacctgtggcagaagctgaagctaagcagagatgatgccaagcctctgctgagactgaagggattcccttcctttcctctggtcgagagacaggccaacgaagtggactggtgggacatggtgtgtaacgtgaagaagctgatcaacgagaaaaaggaggatggcaaggtgttttggcagaatctggctggctacaagagacaggaagccctgagaccatacctgagcagcgaggaagatcggaagaagggaaagaaattcgctcggtaccagctgggcgacctgctgctgcacctggaaaagaagcacggcgaggactggggaaaggtgtacgacgaggcctgggagcggattgacaagaaagtggaaggcctgagcaagcacatcaagctggaagaggaacggagaagcgaggacgcccagagcaaggccgccctgaccgactggctgcgggctaaggccagcttcgtgatcgagggcctgaaggaggccgacaaggacgagttctgcagatgcgagctgaagctgcagaagtggtacggggacctgcggggaaagcccttcgccatcgaagccgagaacagcatcctggacatcagcggcttcagcaagcagtacaactgtgccttcatctggcagaaggacggcgtgaagaagctgaacctgtacctgatcatcaactacttcaagggcggcaagctgcggttcaagaagatcaaacctgaagccttcgaagccaacagattctacaccgtgatcaacaaaaagagcggcgagatcgtgcccatggaggtgaacttcaacttcgacgaccccaacctgatcatcctgcctctggcctttggcaagagacagggcagagaattcatctggaacgacctgctgtccctggaaaccggcagcctgaagctggccaacggaagagtgatcgagaagacactgtacaacagaagaacccggcaggatgagcctgccctgttcgtggccctgaccttcgagcggcgggaggtcctggactcctccaatatcaaaccaatgaacctgatcggcgtggcaagaggcgaaaacatccccgccgtgatcgccctgaccgaccccgagggctgcccactgagccggtttaaggatagcctgggaaacccaacccacatcctgagaatcggcgagagctataaggagaagcagcggaccatccaggccaagaaggaggtggagcagcggagagccggcggctacagccggaagtacgccagcaaagccaagaatctggcagacgatatggtgagaaacaccgctagagatctgctgtactacgccgtgacccaggatgccatgctgatcttcgccaacctgagccggggcttcggccggcagggcaagcggaccttcatggccgagagacagtacacacggatggaggactggctgaccgccaagctggcctacgagggcctgagcaagacctacctgtccaagacactggcccagtacacctccaagacatgcagcaactgtgggtttaccatcaccagcgccgactacgacagggtgctggagaagctgaagaagacagcaacaggctggatgaccacaattaacggcaaggagctgaaggtggagggccagattacctactacaacagatacaagagacagaacgtagtcaaggacctgtccgtcgagctggatagactgagcgaagaatctgtgaacaacgacatctcctcctggacaaagggcagaagcggagaagctctgagcctcctgaagaaaagattctcccatagacccgtgcaggagaagttcgtgtgcctgaactgcggcttcgagacacacgcagccgagcaagccgccctgaacatcgccagatcctggctgttcctgcggagccaggagtacaagaaataccagacaaacaagacaaccggcaacaccgataagagagccttcgtcgagacctggcagtccttttaccggaagaagcttaaggaggtgtggaaacctgccgtgcggtctggcggatctggcggaggctccatggccctggtgaccttcagggacgtggccatcgacttcagccagaaggagtgggagtgcctggacaccacccagaggaagctgtacagggacgtgatgctggagaactacaacaacctggtgagcctgggctacagcggcagcaagcccgacgtgatcaccctgctggagcagggcaaggagccctgcgtggccgccagggacgtgaccggcaggcagtgccccggcctgctgagcaggcacggcggcccaagcagcggcgcccctcctcccagcggcggcagcccagccggctccccaacctctaccgaggagggcacctctgagtccgccacccccgagagcggccctggcacctccaccgagcccagcgagggcagcgcacccggcagccctgccggcagccccacctccacagaggagggaaccagcaccgagcccagcgaaggcagcgccccaggcaccagcaccgagcctagtgagcaggagattaaacggatcaacaagatcagaagaagacttgtgaaagacagcaacaccaagaaggccggcaagacaggccccatgaaaaccctgctggttagagtgatgacacccgatctgagagagcggctggaaaacctgagaaagaagcctgaaaatatcccccagcccatcagcaatacatctagagccaacctgaataagctgctgaccgattacaccgaaatgaagaaggcgatcctgcatgtgtactgggaagagttccagaaggaccctgtgggcctgatgagccgggtggcccagcctgccagcaagaagatcgatcagaacaagctgaaacctgagatggacgagaagggcaacctgaccaccgccggctttgcctgctctcagtgtggccagcccctgttcgtgtacaagctggagcaggtgtctgagaagggcaaggcttacaccaactacttcggacggtgcaatgtggccgagcacgaaaagctgatcctgctggcccagctgaagcccgagaaggatagcgacgaagccgtgacatatagcctgggaaagtttgggcagagggccctggatttctacagcattcatgtgaccaaggagtccacccaccccgtgaagcccctggcccagatcgccggaaacagatacgcctccggacctgtgggaaaggccctgagcgacgcatgtatgggcacaatcgcctccttcctgtctaagtaccaggacatcatcatcgaacaccagaaggtggtgaagggcaaccagaagagactggagagcctgcgggagctggccggcaaggaaaacctggaataccctagcgtgaccctgccacctcagcctcacaccaaggagggcgttgatgcctacaacgaagtgatcgcccgggtgcgaatgtgggtgaacctgaacctgtggcagaagctgaagctaagcagagatgatgccaagcctctgctgagactgaagggattcccttcctttcctctggtcgagagacaggccaacgaagtggactggtgggacatggtgtgtaacgtgaagaagctgatcaacgagaaaaaggaggatggcaaggtgttttggcagaatctggctggctacaagagacaggaagccctgagaccatacctgagcagcgaggaagatcggaagaagggaaagaaattcgctcggtaccagctgggcgacctgctgctgcacctggaaaagaagcacggcgaggactggggaaaggtgtacgacgaggcctgggagcggattgacaagaaagtggaaggcctgagcaagcacatcaagctggaagaggaacggagaagcgaggacgcccagagcaaggccgccctgaccgactggctgcgggctaaggccagcttcgtgatcgagggcctgaaggaggccgacaaggacgagttctgcagatgcgagctgaagctgcagaagtggtacggggacctgcggggaaagcccttcgccatcgaagccgagaacagcatcctggacatcagcggcttcagcaagcagtacaactgtgccttcatctggcagaaggacggcgtgaagaagctgaacctgtacctgatcatcaactacttcaagggcggcaagctgcggttcaagaagatcaaacctgaagccttcgaagccaacagattctacaccgtgatcaacaaaaagagcggcgagatcgtgcccatggaggtgaacttcaacttcgacgaccccaacctgatcatcctgcctctggcctttggcaagagacagggcagagaattcatctggaacgacctgctgtccctggaaaccggcagcctgaagctggccaacggaagagtgatcgagaagacactgtacaacagaagaacccggcaggatgagcctgccctgttcgtggccctgaccttcgagcggcgggaggtcctggactcctccaatatcaaaccaatgaacctgatcggcgtggcaagaggcgaaaacatccccgccgtgatcgccctgaccgaccccgagggctgcccactgagccggtttaaggatagcctgggaaacccaacccacatcctgagaatcggcgagagctataaggagaagcagcggaccatccaggccaagaaggaggtggagcagcggagagccggcggctacagccggaagtacgccagcaaagccaagaatctggcagacgatatggtgagaaacaccgctagagatctgctgtactacgccgtgacccaggatgccatgctgatcttcgccaacctgagccggggcttcggccggcagggcaagcggaccttcatggccgagagacagtacacacggatggaggactggctgaccgccaagctggcctacgagggcctgagcaagacctacctgtccaagacactggcccagtacacctccaagacatgcagcaactgtgggtttaccatcaccagcgccgactacgacagggtgctggagaagctgaagaagacagcaacaggctggatgaccacaattaacggcaaggagctgaaggtggagggccagattacctactacaacagatacaagagacagaacgtagtcaaggacctgtccgtcgagctggatagactgagcgaagaatctgtgaacaacgacatctcctcctggacaaagggcagaagcggagaagctctgagcctcctgaagaaaagattctcccatagacccgtgcaggagaagttcgtgtgcctgaactgcggcttcgagacacacgcagccgagcaagccgccctgaacatcgccagatcctggctgttcctgcggagccaggagtacaagaaataccagacaaacaagacaaccggcaacaccgataagagagccttcgtcgagacctggcagtccttttaccggaagaagcttaaggaggtgtggaaacctgccgtgcggtctggcggatctggcggaggctcctatggccctggtgaccttcagggacgtggccatcgacttcagccagaaggagtgggagtgcctggacaccacccagaggaagctgtacagggacgtgatgctggagaactacaacaacctggtgagcctgggctacagcggcagcaagcccgacgtgatcaccctgctggagcagggcaaggagccctgcgtggccgccagggacgtgaccggcaggcagtgccccggcctgctgagcaggcacggatctggctccggcagcggccccaagaaaaagagaaaagtctaagctgccttctgcggggcttgccttctggccatgcccttcttctctcccttgcacctgtacctcttggtctttgaataaagcctgagtaggaaggctagcaaaaaaaaaaaaaaaaaaaaaaaaaaaaaaaaaaaaaaaaaaaaaaaaaaaaaaaaaaaaaaaaaaaaaaaaaaaaaaaa

SEQ ID NO: 16244 - RNA, 9485 nt, synthetic construct
  source 1..9485: mol_type = other RNA
aggaaataagagagaaaagaagagtaagaagaaatataagagccaccatggcccctaagaagaagcgtaaagtgagccggatggaacgcctcgtctacgaggtgcggcagaagtgcagaaacatcgaggacatctgcatctcctgcggatctctgaacgtgaccctggagcacccactgttcatcggcggcatgtgccagaactgtaaaaactgttttctggagtgtgcctatcaatacgacgatgacggctaccagagctactgcaccatctgttgcggcggaagagaggtgctgatgtgtggaaataacaactgctgccggtgcttctgcgtggaatgcgtggacctgctggtgggccccggcgccgcccaggccgctattaaggaagatccttggaactgctacatgtgcggccacaagggcacatacggcctgctgagacggagagaggactggcctagcagactgcagatgttcttcgccaataaccacgaccaggagttcgacccccctaaggtgtaccctcccgtccccgccgagaagagaaagcccatccgggtcctgagcctgttcgatggcatcgccaccggtctgctggtgctgaaggacctgggcatccaggtggataggtacattgcctccgaggtgtgcgaggactccatcaccgtgggaatggtgcgtcatcagggcaagatcatgtacgtgggcgacgtgcggagcgtgacacagaagcatatccaggagtggggccctttcgacctggtgatcggcggcagcccttgcaatgacctgagcatcgtgaacccagcccggaagggcctgtacgagggaaccggcagactgttcttcgagttttacagactgctgcacgacgcccggcctaaggaaggcgacgaccggcccttcttttggctgttcgagaatgtggtggccatgggagtcagcgacaagcgggatattagccggttcctggagagcaaccccgtgatgatcgatgccaaggaagtgagcgccgcccaccgggccagatacttctggggcaatctgcctggcatgaacagacccctggccagcaccgtgaacgacaagctggagctgcaggagtgcctggagcacggccggatcgccaagttcagcaaggtgagaaccatcaccacccgaagcaacagcatcaaacaaggcaaggaccagcactttcctgtgttcatgaacgagaaggaggacatcctgtggtgtaccgagatggagagagtgttcgggttcccagtccactacacagatgtcagcaacatgtctagactggccagacagagactgctgggaagaagctggtccgtccctgtgatcagacacctgttcgcccctctgaaggagtacttcgcctgcgtgagcagcggcaacagcaacgccaacagccggggccccagcttctctagcggcctggtgccactgtccctgagagggagccacatgggccccatggagatctacaaaaccgtgagcgcctggaagcggcagcctgtgcgcgtgctgagcctgtttcggaatatcgataaagtcctgaaaagcctgggattcctggagagcggctctggctccggcggtggcaccctgaagtacgtggaggatgtgacaaacgtggtcagacgggatgtggagaagtggggccccttcgatctggtgtacggcagcacccaacccctgggcagctcttgtgaccggtgccctggctggtacatgtttcagttccaccggatcctgcagtacgccctgccgagacaggagtcccagcggccattcttttggattttcatggacaacttgctgctgaccgaggatgaccaggaaactaccactcggttcctgcagaccgaagccgtgaccctgcaggacgtgagaggccgggactaccagaacgccatgcgggtgtggtccaacatccctggactgaaaagcaagcacgcacctctgacccctaaagaagaggagtacctgcaggcccaggtgcggagcagaagcaagctggacgcccctaaggtggatctgctggtgaagaattgcctcctgcccctgagagagtacttcaagtatttcagccagaatagtctgcccctgggaggcagcggcggcggcgccctggtgacatttgaggacgtcgccgtgcggttcacccaggaggaatgggctctgctggatccttctcagaaaatcctgtaccgggacgtgatgagagagacataccggaatctgacctccgtgggcatcaactgggaatgttgggaccttgaagcctgcttcagaagcctgggaagaaacctgagagtgcaggtggtgaagagaaagtgcgagctgaccaacagcggcccctgcgccgagggcggcccaagcagcggcgcccctcctcccagcggcggcagcccagccggctccccaacctctaccgaggagggcacctctgagtccgccacccccgagagcggccctggcacctccaccgagcccagcgagggcagcgcacccggcagccctgccggcagccccacctccacagaggagggaaccagcaccgagcccagcgaaggcagcgccccaggcaccagcaccgagcctagtgagcaggagattaaacggatcaacaagatcagaagaagacttgtgaaagacagcaacaccaagaaggccggcaagacaggccccatgaaaaccctgctggttagagtgatgacacccgatctgagagagcggctggaaaacctgagaaagaagcctgaaaatatcccccagcccatcagcaatacatctagagccaacctgaataagctgctgaccgattacaccgaaatgaagaaggcgatcctgcatgtgtactgggaagagttccagaaggaccctgtgggcctgatgagccgggtggcccagcctgccagcaagaagatcgatcagaacaagctgaaacctgagatggacgagaagggcaacctgaccaccgccggctttgcctgctctcagtgtggccagcccctgttcgtgtacaagctggagcaggtgtctgagaagggcaaggcttacaccaactacttcggacggtgcaatgtggccgagcacgaaaagctgatcctgctggcccagctgaagcccgagaaggatagcgacgaagccgtgacatatagcctgggaaagtttgggcagagggccctggatttctacagcattcatgtgaccaaggagtccacccaccccgtgaagcccctggcccagatcgccggaaacagatacgcctccggacctgtgggaaaggccctgagcgacgcatgtatgggcacaatcgcctccttcctgtctaagtaccaggacatcatcatcgaacaccagaaggtggtgaagggcaaccagaagagactggagagcctgcgggagctggccggcaaggaaaacctggaataccctagcgtgaccctgccacctcagcctcacaccaaggagggcgttgatgcctacaacgaagtgatcgcccgggtgcgaatgtgggtgaacctgaacctgtggcagaagctgaagctaagcagagatgatgccaagcctctgctgagactgaagggattcccttcctttcctctggtcgagagacaggccaacgaagtggactggtgggacatggtgtgtaacgtgaagaagctgatcaacgagaaaaaggaggatggcaaggtgttttggcagaatctggctggctacaagagacaggaagccctgagaccatacctgagcagcgaggaagatcggaagaagggaaagaaattcgctcggtaccagctgggcgacctgctgctgcacctggaaaagaagcacggcgaggactggggaaaggtgtacgacgaggcctgggagcggattgacaagaaagtggaaggcctgagcaagcacatcaagctggaagaggaacggagaagcgaggacgcccagagcaaggccgccctgaccgactggctgcgggctaaggccagcttcgtgatcgagggcctgaaggaggccgacaaggacgagttctgcagatgcgagctgaagctgcagaagtggtacggggacctgcggggaaagcccttcgccatcgaagccgagaacagcatcctggacatcagcggcttcagcaagcagtacaactgtgccttcatctggcagaaggacggcgtgaagaagctgaacctgtacctgatcatcaactacttcaagggcggcaagctgcggttcaagaagatcaaacctgaagccttcgaagccaacagattctacaccgtgatcaacaaaaagagcggcgagatcgtgcccatggaggtgaacttcaacttcgacgaccccaacctgatcatcctgcctctggcctttggcaagagacagggcagagaattcatctggaacgacctgctgtccctggaaaccggcagcctgaagctggccaacggaagagtgatcgagaagacactgtacaacagaagaacccggcaggatgagcctgccctgttcgtggccctgaccttcgagcggcgggaggtcctggactcctccaatatcaaaccaatgaacctgatcggcgtggcaagaggcgaaaacatccccgccgtgatcgccctgaccgaccccgagggctgcccactgagccggtttaaggatagcctgggaaacccaacccacatcctgagaatcggcgagagctataaggagaagcagcggaccatccaggccaagaaggaggtggagcagcggagagccggcggctacagccggaagtacgccagcaaagccaagaatctggcagacgatatggtgagaaacaccgctagagatctgctgtactacgccgtgacccaggatgccatgctgatcttcgccaacctgagccggggcttcggccggcagggcaagcggaccttcatggccgagagacagtacacacggatggaggactggctgaccgccaagctggcctacgagggcctgagcaagacctacctgtccaagacactggcccagtacacctccaagacatgcagcaactgtgggtttaccatcaccagcgccgactacgacagggtgctggagaagctgaagaagacagcaacaggctggatgaccacaattaacggcaaggagctgaaggtggagggccagattacctactacaacagatacaagagacagaacgtagtcaaggacctgtccgtcgagctggatagactgagcgaagaatctgtgaacaacgacatctcctcctggacaaagggcagaagcggagaagctctgagcctcctgaagaaaagattctcccatagacccgtgcaggagaagttcgtgtgcctgaactgcggcttcgagacacacgcagccgagcaagccgccctgaacatcgccagatcctggctgttcctgcggagccaggagtacaagaaataccagacaaacaagacaaccggcaacaccgataagagagccttcgtcgagacctggcagtccttttaccggaagaagcttaaggaggtgtggaaacctgccgtgcggtctggcggatctggcggaggctccgccgtgacccagctgaccttcgaggacgtggccgtggacttcacccaggaggagtggaggtgcctgacccaggcccagaggaccctgtacagggacgtgatgctggacacctacggcaacctggtgagcgtgggcgtgagcccccccagcatgagcgtgatcctgcccctggagttccaggaggacccctgggtggccaagagccacgtgaccacccccggcgagctgaacggctgggagggcggcggcccaagcagcggcgcccctcctcccagcggcggcagcccagccggctccccaacctctaccgaggagggcacctctgagtccgccacccccgagagcggccctggcacctccaccgagcccagcgagggcagcgcacccggcagccctgccggcagccccacctccacagaggagggaaccagcaccgagcccagcgaaggcagcgccccaggcaccagcaccgagcctagtgagcaggagattaaacggatcaacaagatcagaagaagacttgtgaaagacagcaacaccaagaaggccggcaagacaggccccatgaaaaccctgctggttagagtgatgacacccgatctgagagagcggctggaaaacctgagaaagaagcctgaaaatatcccccagcccatcagcaatacatctagagccaacctgaataagctgctgaccgattacaccgaaatgaagaaggcgatcctgcatgtgtactgggaagagttccagaaggaccctgtgggcctgatgagccgggtggcccagcctgccagcaagaagatcgatcagaacaagctgaaacctgagatggacgagaagggcaacctgaccaccgccggctttgcctgctctcagtgtggccagcccctgttcgtgtacaagctggagcaggtgtctgagaagggcaaggcttacaccaactacttcggacggtgcaatgtggccgagcacgaaaagctgatcctgctggcccagctgaagcccgagaaggatagcgacgaagccgtgacatatagcctgggaaagtttgggcagagggccctggatttctacagcattcatgtgaccaaggagtccacccaccccgtgaagcccctggcccagatcgccggaaacagatacgcctccggacctgtgggaaaggccctgagcgacgcatgtatgggcacaatcgcctccttcctgtctaagtaccaggacatcatcatcgaacaccagaaggtggtgaagggcaaccagaagagactggagagcctgcgggagctggccggcaaggaaaacctggaataccctagcgtgaccctgccacctcagcctcacaccaaggagggcgttgatgcctacaacgaagtgatcgcccgggtgcgaatgtgggtgaacctgaacctgtggcagaagctgaagctaagcagagatgatgccaagcctctgctgagactgaagggattcccttcctttcctctggtcgagagacaggccaacgaagtggactggtgggacatggtgtgtaacgtgaagaagctgatcaacgagaaaaaggaggatggcaaggtgttttggcagaatctggctggctacaagagacaggaagccctgagaccatacctgagcagcgaggaagatcggaagaagggaaagaaattcgctcggtaccagctgggcgacctgctgctgcacctggaaaagaagcacggcgaggactggggaaaggtgtacgacgaggcctgggagcggattgacaagaaagtggaaggcctgagcaagcacatcaagctggaagaggaacggagaagcgaggacgcccagagcaaggccgccctgaccgactggctgcgggctaaggccagcttcgtgatcgagggcctgaaggaggccgacaaggacgagttctgcagatgcgagctgaagctgcagaagtggtacggggacctgcggggaaagcccttcgccatcgaagccgagaacagcatcctggacatcagcggcttcagcaagcagtacaactgtgccttcatctggcagaaggacggcgtgaagaagctgaacctgtacctgatcatcaactacttcaagggcggcaagctgcggttcaagaagatcaaacctgaagccttcgaagccaacagattctacaccgtgatcaacaaaaagagcggcgagatcgtgcccatggaggtgaacttcaacttcgacgaccccaacctgatcatcctgcctctggcctttggcaagagacagggcagagaattcatctggaacgacctgctgtccctggaaaccggcagcctgaagctggccaacggaagagtgatcgagaagacactgtacaacagaagaacccggcaggatgagcctgccctgttcgtggccctgaccttcgagcggcgggaggtcctggactcctccaatatcaaaccaatgaacctgatcggcgtggcaagaggcgaaaacatccccgccgtgatcgccctgaccgaccccgagggctgcccactgagccggtttaaggatagcctgggaaacccaacccacatcctgagaatcggcgagagctataaggagaagcagcggaccatccaggccaagaaggaggtggagcagcggagagccggcggctacagccggaagtacgccagcaaagccaagaatctggcagacgatatggtgagaaacaccgctagagatctgctgtactacgccgtgacccaggatgccatgctgatcttcgccaacctgagccggggcttcggccggcagggcaagcggaccttcatggccgagagacagtacacacggatggaggactggctgaccgccaagctggcctacgagggcctgagcaagacctacctgtccaagacactggcccagtacacctccaagacatgcagcaactgtgggtttaccatcaccagcgccgactacgacagggtgctggagaagctgaagaagacagcaacaggctggatgaccacaattaacggcaaggagctgaaggtggagggccagattacctactacaacagatacaagagacagaacgtagtcaaggacctgtccgtcgagctggatagactgagcgaagaatctgtgaacaacgacatctcctcctggacaaagggcagaagcggagaagctctgagcctcctgaagaaaagattctcccatagacccgtgcaggagaagttcgtgtgcctgaactgcggcttcgagacacacgcagccgagcaagccgccctgaacatcgccagatcctggctgttcctgcggagccaggagtacaagaaataccagacaaacaagacaaccggcaacaccgataagagagccttcgtcgagacctggcagtccttttaccggaagaagcttaaggaggtgtggaaacctgccgtgcggtctggcggatctggcggaggctcctgccgtgacccagctgaccttcgaggacgtggccgtggacttcacccaggaggagtggaggtgcctgacccaggcccagaggaccctgtacagggacgtgatgctggacacctacggcaacctggtgagcgtgggcgtgagcccccccagcatgagcgtgatcctgcccctggagttccaggaggacccctgggtggccaagagccacgtgaccacccccggcgagctgaacggctgggagggcggatctggctccggcagcggccccaagaaaaagagaaaagtctaagctgccttctgcggggcttgccttctggccatgcccttcttctctcccttgcacctgtacctcttggtctttgaataaagcctgagtaggaaggctagcaaaaaaaaaaaaaaaaaaaaaaaaaaaaaaaaaaaaaaaaaaaaaaaaaaaaaaaaaaaaaaaaaaaaaaaaaaaaaaaa

SEQ ID NO: 16245 - RNA, 9485 nt, synthetic construct
  source 1..9485: mol_type = other RNA
aggaaataagagagaaaagaagagtaagaagaaatataagagccaccatggcccctaagaagaagcgtaaagtgagccggatggaacgcctcgtctacgaggtgcggcagaagtgcagaaacatcgaggacatctgcatctcctgcggatctctgaacgtgaccctggagcacccactgttcatcggcggcatgtgccagaactgtaaaaactgttttctggagtgtgcctatcaatacgacgatgacggctaccagagctactgcaccatctgttgcggcggaagagaggtgctgatgtgtggaaataacaactgctgccggtgcttctgcgtggaatgcgtggacctgctggtgggccccggcgccgcccaggccgctattaaggaagatccttggaactgctacatgtgcggccacaagggcacatacggcctgctgagacggagagaggactggcctagcagactgcagatgttcttcgccaataaccacgaccaggagttcgacccccctaaggtgtaccctcccgtccccgccgagaagagaaagcccatccgggtcctgagcctgttcgatggcatcgccaccggtctgctggtgctgaaggacctgggcatccaggtggataggtacattgcctccgaggtgtgcgaggactccatcaccgtgggaatggtgcgtcatcagggcaagatcatgtacgtgggcgacgtgcggagcgtgacacagaagcatatccaggagtggggccctttcgacctggtgatcggcggcagcccttgcaatgacctgagcatcgtgaacccagcccggaagggcctgtacgagggaaccggcagactgttcttcgagttttacagactgctgcacgacgcccggcctaaggaaggcgacgaccggcccttcttttggctgttcgagaatgtggtggccatgggagtcagcgacaagcgggatattagccggttcctggagagcaaccccgtgatgatcgatgccaaggaagtgagcgccgcccaccgggccagatacttctggggcaatctgcctggcatgaacagacccctggccagcaccgtgaacgacaagctggagctgcaggagtgcctggagcacggccggatcgccaagttcagcaaggtgagaaccatcaccacccgaagcaacagcatcaaacaaggcaaggaccagcactttcctgtgttcatgaacgagaaggaggacatcctgtggtgtaccgagatggagagagtgttcgggttcccagtccactacacagatgtcagcaacatgtctagactggccagacagagactgctgggaagaagctggtccgtccctgtgatcagacacctgttcgcccctctgaaggagtacttcgcctgcgtgagcagcggcaacagcaacgccaacagccggggccccagcttctctagcggcctggtgccactgtccctgagagggagccacatgggccccatggagatctacaaaaccgtgagcgcctggaagcggcagcctgtgcgcgtgctgagcctgtttcggaatatcgataaagtcctgaaaagcctgggattcctggagagcggctctggctccggcggtggcaccctgaagtacgtggaggatgtgacaaacgtggtcagacgggatgtggagaagtggggccccttcgatctggtgtacggcagcacccaacccctgggcagctcttgtgaccggtgccctggctggtacatgtttcagttccaccggatcctgcagtacgccctgccgagacaggagtcccagcggccattcttttggattttcatggacaacttgctgctgaccgaggatgaccaggaaactaccactcggttcctgcagaccgaagccgtgaccctgcaggacgtgagaggccgggactaccagaacgccatgcgggtgtggtccaacatccctggactgaaaagcaagcacgcacctctgacccctaaagaagaggagtacctgcaggcccaggtgcggagcagaagcaagctggacgcccctaaggtggatctgctggtgaagaattgcctcctgcccctgagagagtacttcaagtatttcagccagaatagtctgcccctgggaggcagcggcggcggcgccctggtgacatttgaggacgtcgccgtgcggttcacccaggaggaatgggctctgctggatccttctcagaaaatcctgtaccgggacgtgatgagagagacataccggaatctgacctccgtgggcatcaactgggaatgttgggaccttgaagcctgcttcagaagcctgggaagaaacctgagagtgcaggtggtgaagagaaagtgcgagctgaccaacagcggcccctgcgccgagggcggcccaagcagcggcgcccctcctcccagcggcggcagcccagccggctccccaacctctaccgaggagggcacctctgagtccgccacccccgagagcggccctggcacctccaccgagcccagcgagggcagcgcacccggcagccctgccggcagccccacctccacagaggagggaaccagcaccgagcccagcgaaggcagcgccccaggcaccagcaccgagcctagtgagcaggagattaaacggatcaacaagatcagaagaagacttgtgaaagacagcaacaccaagaaggccggcaagacaggccccatgaaaaccctgctggttagagtgatgacacccgatctgagagagcggctggaaaacctgagaaagaagcctgaaaatatcccccagcccatcagcaatacatctagagccaacctgaataagctgctgaccgattacaccgaaatgaagaaggcgatcctgcatgtgtactgggaagagttccagaaggaccctgtgggcctgatgagccgggtggcccagcctgccagcaagaagatcgatcagaacaagctgaaacctgagatggacgagaagggcaacctgaccaccgccggctttgcctgctctcagtgtggccagcccctgttcgtgtacaagctggagcaggtgtctgagaagggcaaggcttacaccaactacttcggacggtgcaatgtggccgagcacgaaaagctgatcctgctggcccagctgaagcccgagaaggatagcgacgaagccgtgacatatagcctgggaaagtttgggcagagggccctggatttctacagcattcatgtgaccaaggagtccacccaccccgtgaagcccctggcccagatcgccggaaacagatacgcctccggacctgtgggaaaggccctgagcgacgcatgtatgggcacaatcgcctccttcctgtctaagtaccaggacatcatcatcgaacaccagaaggtggtgaagggcaaccagaagagactggagagcctgcgggagctggccggcaaggaaaacctggaataccctagcgtgaccctgccacctcagcctcacaccaaggagggcgttgatgcctacaacgaagtgatcgcccgggtgcgaatgtgggtgaacctgaacctgtggcagaagctgaagctaagcagagatgatgccaagcctctgctgagactgaagggattcccttcctttcctctggtcgagagacaggccaacgaagtggactggtgggacatggtgtgtaacgtgaagaagctgatcaacgagaaaaaggaggatggcaaggtgttttggcagaatctggctggctacaagagacaggaagccctgagaccatacctgagcagcgaggaagatcggaagaagggaaagaaattcgctcggtaccagctgggcgacctgctgctgcacctggaaaagaagcacggcgaggactggggaaaggtgtacgacgaggcctgggagcggattgacaagaaagtggaaggcctgagcaagcacatcaagctggaagaggaacggagaagcgaggacgcccagagcaaggccgccctgaccgactggctgcgggctaaggccagcttcgtgatcgagggcctgaaggaggccgacaaggacgagttctgcagatgcgagctgaagctgcagaagtggtacggggacctgcggggaaagcccttcgccatcgaagccgagaacagcatcctggacatcagcggcttcagcaagcagtacaactgtgccttcatctggcagaaggacggcgtgaagaagctgaacctgtacctgatcatcaactacttcaagggcggcaagctgcggttcaagaagatcaaacctgaagccttcgaagccaacagattctacaccgtgatcaacaaaaagagcggcgagatcgtgcccatggaggtgaacttcaacttcgacgaccccaacctgatcatcctgcctctggcctttggcaagagacagggcagagaattcatctggaacgacctgctgtccctggaaaccggcagcctgaagctggccaacggaagagtgatcgagaagacactgtacaacagaagaacccggcaggatgagcctgccctgttcgtggccctgaccttcgagcggcgggaggtcctggactcctccaatatcaaaccaatgaacctgatcggcgtggcaagaggcgaaaacatccccgccgtgatcgccctgaccgaccccgagggctgcccactgagccggtttaaggatagcctgggaaacccaacccacatcctgagaatcggcgagagctataaggagaagcagcggaccatccaggccaagaaggaggtggagcagcggagagccggcggctacagccggaagtacgccagcaaagccaagaatctggcagacgatatggtgagaaacaccgctagagatctgctgtactacgccgtgacccaggatgccatgctgatcttcgccaacctgagccggggcttcggccggcagggcaagcggaccttcatggccgagagacagtacacacggatggaggactggctgaccgccaagctggcctacgagggcctgagcaagacctacctgtccaagacactggcccagtacacctccaagacatgcagcaactgtgggtttaccatcaccagcgccgactacgacagggtgctggagaagctgaagaagacagcaacaggctggatgaccacaattaacggcaaggagctgaaggtggagggccagattacctactacaacagatacaagagacagaacgtagtcaaggacctgtccgtcgagctggatagactgagcgaagaatctgtgaacaacgacatctcctcctggacaaagggcagaagcggagaagctctgagcctcctgaagaaaagattctcccatagacccgtgcaggagaagttcgtgtgcctgaactgcggcttcgagacacacgcagccgagcaagccgccctgaacatcgccagatcctggctgttcctgcggagccaggagtacaagaaataccagacaaacaagacaaccggcaacaccgataagagagccttcgtcgagacctggcagtccttttaccggaagaagcttaaggaggtgtggaaacctgccgtgcggtctggcggatctggcggaggctcccaggccgaggtgaccttcgaggacgtggccgtgctgctgagcagggaggagtggggcaggctgggccccgtgcagaagggcctgtacagggacgtgatgctggagacctacaggaacctggtgagcctgggcgccggccccaccggccccaagcccgaggtgatcacccagctggagaggggcgacgagccctgggtgctggacgtgcagggcagggagggccccaccatcgacggcagcgccggcggcccaagcagcggcgcccctcctcccagcggcggcagcccagccggctccccaacctctaccgaggagggcacctctgagtccgccacccccgagagcggccctggcacctccaccgagcccagcgagggcagcgcacccggcagccctgccggcagccccacctccacagaggagggaaccagcaccgagcccagcgaaggcagcgccccaggcaccagcaccgagcctagtgagcaggagattaaacggatcaacaagatcagaagaagacttgtgaaagacagcaacaccaagaaggccggcaagacaggccccatgaaaaccctgctggttagagtgatgacacccgatctgagagagcggctggaaaacctgagaaagaagcctgaaaatatcccccagcccatcagcaatacatctagagccaacctgaataagctgctgaccgattacaccgaaatgaagaaggcgatcctgcatgtgtactgggaagagttccagaaggaccctgtgggcctgatgagccgggtggcccagcctgccagcaagaagatcgatcagaacaagctgaaacctgagatggacgagaagggcaacctgaccaccgccggctttgcctgctctcagtgtggccagcccctgttcgtgtacaagctggagcaggtgtctgagaagggcaaggcttacaccaactacttcggacggtgcaatgtggccgagcacgaaaagctgatcctgctggcccagctgaagcccgagaaggatagcgacgaagccgtgacatatagcctgggaaagtttgggcagagggccctggatttctacagcattcatgtgaccaaggagtccacccaccccgtgaagcccctggcccagatcgccggaaacagatacgcctccggacctgtgggaaaggccctgagcgacgcatgtatgggcacaatcgcctccttcctgtctaagtaccaggacatcatcatcgaacaccagaaggtggtgaagggcaaccagaagagactggagagcctgcgggagctggccggcaaggaaaacctggaataccctagcgtgaccctgccacctcagcctcacaccaaggagggcgttgatgcctacaacgaagtgatcgcccgggtgcgaatgtgggtgaacctgaacctgtggcagaagctgaagctaagcagagatgatgccaagcctctgctgagactgaagggattcccttcctttcctctggtcgagagacaggccaacgaagtggactggtgggacatggtgtgtaacgtgaagaagctgatcaacgagaaaaaggaggatggcaaggtgttttggcagaatctggctggctacaagagacaggaagccctgagaccatacctgagcagcgaggaagatcggaagaagggaaagaaattcgctcggtaccagctgggcgacctgctgctgcacctggaaaagaagcacggcgaggactggggaaaggtgtacgacgaggcctgggagcggattgacaagaaagtggaaggcctgagcaagcacatcaagctggaagaggaacggagaagcgaggacgcccagagcaaggccgccctgaccgactggctgcgggctaaggccagcttcgtgatcgagggcctgaaggaggccgacaaggacgagttctgcagatgcgagctgaagctgcagaagtggtacggggacctgcggggaaagcccttcgccatcgaagccgagaacagcatcctggacatcagcggcttcagcaagcagtacaactgtgccttcatctggcagaaggacggcgtgaagaagctgaacctgtacctgatcatcaactacttcaagggcggcaagctgcggttcaagaagatcaaacctgaagccttcgaagccaacagattctacaccgtgatcaacaaaaagagcggcgagatcgtgcccatggaggtgaacttcaacttcgacgaccccaacctgatcatcctgcctctggcctttggcaagagacagggcagagaattcatctggaacgacctgctgtccctggaaaccggcagcctgaagctggccaacggaagagtgatcgagaagacactgtacaacagaagaacccggcaggatgagcctgccctgttcgtggccctgaccttcgagcggcgggaggtcctggactcctccaatatcaaaccaatgaacctgatcggcgtggcaagaggcgaaaacatccccgccgtgatcgccctgaccgaccccgagggctgcccactgagccggtttaaggatagcctgggaaacccaacccacatcctgagaatcggcgagagctataaggagaagcagcggaccatccaggccaagaaggaggtggagcagcggagagccggcggctacagccggaagtacgccagcaaagccaagaatctggcagacgatatggtgagaaacaccgctagagatctgctgtactacgccgtgacccaggatgccatgctgatcttcgccaacctgagccggggcttcggccggcagggcaagcggaccttcatggccgagagacagtacacacggatggaggactggctgaccgccaagctggcctacgagggcctgagcaagacctacctgtccaagacactggcccagtacacctccaagacatgcagcaactgtgggtttaccatcaccagcgccgactacgacagggtgctggagaagctgaagaagacagcaacaggctggatgaccacaattaacggcaaggagctgaaggtggagggccagattacctactacaacagatacaagagacagaacgtagtcaaggacctgtccgtcgagctggatagactgagcgaagaatctgtgaacaacgacatctcctcctggacaaagggcagaagcggagaagctctgagcctcctgaagaaaagattctcccatagacccgtgcaggagaagttcgtgtgcctgaactgcggcttcgagacacacgcagccgagcaagccgccctgaacatcgccagatcctggctgttcctgcggagccaggagtacaagaaataccagacaaacaagacaaccggcaacaccgataagagagccttcgtcgagacctggcagtccttttaccggaagaagcttaaggaggtgtggaaacctgccgtgcggtctggcggatctggcggaggctcctcaggccgaggtgaccttcgaggacgtggccgtgctgctgagcagggaggagtggggcaggctgggccccgtgcagaagggcctgtacagggacgtgatgctggagacctacaggaacctggtgagcctgggcgccggccccaccggccccaagcccgaggtgatcacccagctggagaggggcgacgagccctgggtgctggacgtgcagggcagggagggccccaccatcgacggcagcgccggatctggctccggcagcggccccaagaaaaagagaaaagtctaagctgccttctgcggggcttgccttctggccatgcccttcttctctcccttgcacctgtacctcttggtctttgaataaagcctgagtaggaaggctagcaaaaaaaaaaaaaaaaaaaaaaaaaaaaaaaaaaaaaaaaaaaaaaaaaaaaaaaaaaaaaaaaaaaaaaaaaaaaaaaa

SEQ ID NO: 16246 - RNA, 9485 nt, synthetic construct
  source 1..9485: mol_type = other RNA
aggaaataagagagaaaagaagagtaagaagaaatataagagccaccatggcccctaagaagaagcgtaaagtgagccggatggaacgcctcgtctacgaggtgcggcagaagtgcagaaacatcgaggacatctgcatctcctgcggatctctgaacgtgaccctggagcacccactgttcatcggcggcatgtgccagaactgtaaaaactgttttctggagtgtgcctatcaatacgacgatgacggctaccagagctactgcaccatctgttgcggcggaagagaggtgctgatgtgtggaaataacaactgctgccggtgcttctgcgtggaatgcgtggacctgctggtgggccccggcgccgcccaggccgctattaaggaagatccttggaactgctacatgtgcggccacaagggcacatacggcctgctgagacggagagaggactggcctagcagactgcagatgttcttcgccaataaccacgaccaggagttcgacccccctaaggtgtaccctcccgtccccgccgagaagagaaagcccatccgggtcctgagcctgttcgatggcatcgccaccggtctgctggtgctgaaggacctgggcatccaggtggataggtacattgcctccgaggtgtgcgaggactccatcaccgtgggaatggtgcgtcatcagggcaagatcatgtacgtgggcgacgtgcggagcgtgacacagaagcatatccaggagtggggccctttcgacctggtgatcggcggcagcccttgcaatgacctgagcatcgtgaacccagcccggaagggcctgtacgagggaaccggcagactgttcttcgagttttacagactgctgcacgacgcccggcctaaggaaggcgacgaccggcccttcttttggctgttcgagaatgtggtggccatgggagtcagcgacaagcgggatattagccggttcctggagagcaaccccgtgatgatcgatgccaaggaagtgagcgccgcccaccgggccagatacttctggggcaatctgcctggcatgaacagacccctggccagcaccgtgaacgacaagctggagctgcaggagtgcctggagcacggccggatcgccaagttcagcaaggtgagaaccatcaccacccgaagcaacagcatcaaacaaggcaaggaccagcactttcctgtgttcatgaacgagaaggaggacatcctgtggtgtaccgagatggagagagtgttcgggttcccagtccactacacagatgtcagcaacatgtctagactggccagacagagactgctgggaagaagctggtccgtccctgtgatcagacacctgttcgcccctctgaaggagtacttcgcctgcgtgagcagcggcaacagcaacgccaacagccggggccccagcttctctagcggcctggtgccactgtccctgagagggagccacatgggccccatggagatctacaaaaccgtgagcgcctggaagcggcagcctgtgcgcgtgctgagcctgtttcggaatatcgataaagtcctgaaaagcctgggattcctggagagcggctctggctccggcggtggcaccctgaagtacgtggaggatgtgacaaacgtggtcagacgggatgtggagaagtggggccccttcgatctggtgtacggcagcacccaacccctgggcagctcttgtgaccggtgccctggctggtacatgtttcagttccaccggatcctgcagtacgccctgccgagacaggagtcccagcggccattcttttggattttcatggacaacttgctgctgaccgaggatgaccaggaaactaccactcggttcctgcagaccgaagccgtgaccctgcaggacgtgagaggccgggactaccagaacgccatgcgggtgtggtccaacatccctggactgaaaagcaagcacgcacctctgacccctaaagaagaggagtacctgcaggcccaggtgcggagcagaagcaagctggacgcccctaaggtggatctgctggtgaagaattgcctcctgcccctgagagagtacttcaagtatttcagccagaatagtctgcccctgggaggcagcggcggcggcgccctggtgacatttgaggacgtcgccgtgcggttcacccaggaggaatgggctctgctggatccttctcagaaaatcctgtaccgggacgtgatgagagagacataccggaatctgacctccgtgggcatcaactgggaatgttgggaccttgaagcctgcttcagaagcctgggaagaaacctgagagtgcaggtggtgaagagaaagtgcgagctgaccaacagcggcccctgcgccgagggcggcccaagcagcggcgcccctcctcccagcggcggcagcccagccggctccccaacctctaccgaggagggcacctctgagtccgccacccccgagagcggccctggcacctccaccgagcccagcgagggcagcgcacccggcagccctgccggcagccccacctccacagaggagggaaccagcaccgagcccagcgaaggcagcgccccaggcaccagcaccgagcctagtgagcaggagattaaacggatcaacaagatcagaagaagacttgtgaaagacagcaacaccaagaaggccggcaagacaggccccatgaaaaccctgctggttagagtgatgacacccgatctgagagagcggctggaaaacctgagaaagaagcctgaaaatatcccccagcccatcagcaatacatctagagccaacctgaataagctgctgaccgattacaccgaaatgaagaaggcgatcctgcatgtgtactgggaagagttccagaaggaccctgtgggcctgatgagccgggtggcccagcctgccagcaagaagatcgatcagaacaagctgaaacctgagatggacgagaagggcaacctgaccaccgccggctttgcctgctctcagtgtggccagcccctgttcgtgtacaagctggagcaggtgtctgagaagggcaaggcttacaccaactacttcggacggtgcaatgtggccgagcacgaaaagctgatcctgctggcccagctgaagcccgagaaggatagcgacgaagccgtgacatatagcctgggaaagtttgggcagagggccctggatttctacagcattcatgtgaccaaggagtccacccaccccgtgaagcccctggcccagatcgccggaaacagatacgcctccggacctgtgggaaaggccctgagcgacgcatgtatgggcacaatcgcctccttcctgtctaagtaccaggacatcatcatcgaacaccagaaggtggtgaagggcaaccagaagagactggagagcctgcgggagctggccggcaaggaaaacctggaataccctagcgtgaccctgccacctcagcctcacaccaaggagggcgttgatgcctacaacgaagtgatcgcccgggtgcgaatgtgggtgaacctgaacctgtggcagaagctgaagctaagcagagatgatgccaagcctctgctgagactgaagggattcccttcctttcctctggtcgagagacaggccaacgaagtggactggtgggacatggtgtgtaacgtgaagaagctgatcaacgagaaaaaggaggatggcaaggtgttttggcagaatctggctggctacaagagacaggaagccctgagaccatacctgagcagcgaggaagatcggaagaagggaaagaaattcgctcggtaccagctgggcgacctgctgctgcacctggaaaagaagcacggcgaggactggggaaaggtgtacgacgaggcctgggagcggattgacaagaaagtggaaggcctgagcaagcacatcaagctggaagaggaacggagaagcgaggacgcccagagcaaggccgccctgaccgactggctgcgggctaaggccagcttcgtgatcgagggcctgaaggaggccgacaaggacgagttctgcagatgcgagctgaagctgcagaagtggtacggggacctgcggggaaagcccttcgccatcgaagccgagaacagcatcctggacatcagcggcttcagcaagcagtacaactgtgccttcatctggcagaaggacggcgtgaagaagctgaacctgtacctgatcatcaactacttcaagggcggcaagctgcggttcaagaagatcaaacctgaagccttcgaagccaacagattctacaccgtgatcaacaaaaagagcggcgagatcgtgcccatggaggtgaacttcaacttcgacgaccccaacctgatcatcctgcctctggcctttggcaagagacagggcagagaattcatctggaacgacctgctgtccctggaaaccggcagcctgaagctggccaacggaagagtgatcgagaagacactgtacaacagaagaacccggcaggatgagcctgccctgttcgtggccctgaccttcgagcggcgggaggtcctggactcctccaatatcaaaccaatgaacctgatcggcgtggcaagaggcgaaaacatccccgccgtgatcgccctgaccgaccccgagggctgcccactgagccggtttaaggatagcctgggaaacccaacccacatcctgagaatcggcgagagctataaggagaagcagcggaccatccaggccaagaaggaggtggagcagcggagagccggcggctacagccggaagtacgccagcaaagccaagaatctggcagacgatatggtgagaaacaccgctagagatctgctgtactacgccgtgacccaggatgccatgctgatcttcgccaacctgagccggggcttcggccggcagggcaagcggaccttcatggccgagagacagtacacacggatggaggactggctgaccgccaagctggcctacgagggcctgagcaagacctacctgtccaagacactggcccagtacacctccaagacatgcagcaactgtgggtttaccatcaccagcgccgactacgacagggtgctggagaagctgaagaagacagcaacaggctggatgaccacaattaacggcaaggagctgaaggtggagggccagattacctactacaacagatacaagagacagaacgtagtcaaggacctgtccgtcgagctggatagactgagcgaagaatctgtgaacaacgacatctcctcctggacaaagggcagaagcggagaagctctgagcctcctgaagaaaagattctcccatagacccgtgcaggagaagttcgtgtgcctgaactgcggcttcgagacacacgcagccgagcaagccgccctgaacatcgccagatcctggctgttcctgcggagccaggagtacaagaaataccagacaaacaagacaaccggcaacaccgataagagagccttcgtcgagacctggcagtccttttaccggaagaagcttaaggaggtgtggaaacctgccgtgcggtctggcggatctggcggaggctcccccagcgtgcccgtgaccttcagggacgtgttcgtgcagttcagcagggacgagtgggccctgctggacgacgagcagaaggagctgcaccagagcgtgatgcagagcaactacgaggtgctgatgagcctgtactgcgacctggccaagcccgaggtgctgctgcagatggagaggggcgagccctgcctgcccgccgagcccgacctgcagggcgccgccgtgagcctgaaccccgccgccggcggcccaagcagcggcgcccctcctcccagcggcggcagcccagccggctccccaacctctaccgaggagggcacctctgagtccgccacccccgagagcggccctggcacctccaccgagcccagcgagggcagcgcacccggcagccctgccggcagccccacctccacagaggagggaaccagcaccgagcccagcgaaggcagcgccccaggcaccagcaccgagcctagtgagcaggagattaaacggatcaacaagatcagaagaagacttgtgaaagacagcaacaccaagaaggccggcaagacaggccccatgaaaaccctgctggttagagtgatgacacccgatctgagagagcggctggaaaacctgagaaagaagcctgaaaatatcccccagcccatcagcaatacatctagagccaacctgaataagctgctgaccgattacaccgaaatgaagaaggcgatcctgcatgtgtactgggaagagttccagaaggaccctgtgggcctgatgagccgggtggcccagcctgccagcaagaagatcgatcagaacaagctgaaacctgagatggacgagaagggcaacctgaccaccgccggctttgcctgctctcagtgtggccagcccctgttcgtgtacaagctggagcaggtgtctgagaagggcaaggcttacaccaactacttcggacggtgcaatgtggccgagcacgaaaagctgatcctgctggcccagctgaagcccgagaaggatagcgacgaagccgtgacatatagcctgggaaagtttgggcagagggccctggatttctacagcattcatgtgaccaaggagtccacccaccccgtgaagcccctggcccagatcgccggaaacagatacgcctccggacctgtgggaaaggccctgagcgacgcatgtatgggcacaatcgcctccttcctgtctaagtaccaggacatcatcatcgaacaccagaaggtggtgaagggcaaccagaagagactggagagcctgcgggagctggccggcaaggaaaacctggaataccctagcgtgaccctgccacctcagcctcacaccaaggagggcgttgatgcctacaacgaagtgatcgcccgggtgcgaatgtgggtgaacctgaacctgtggcagaagctgaagctaagcagagatgatgccaagcctctgctgagactgaagggattcccttcctttcctctggtcgagagacaggccaacgaagtggactggtgggacatggtgtgtaacgtgaagaagctgatcaacgagaaaaaggaggatggcaaggtgttttggcagaatctggctggctacaagagacaggaagccctgagaccatacctgagcagcgaggaagatcggaagaagggaaagaaattcgctcggtaccagctgggcgacctgctgctgcacctggaaaagaagcacggcgaggactggggaaaggtgtacgacgaggcctgggagcggattgacaagaaagtggaaggcctgagcaagcacatcaagctggaagaggaacggagaagcgaggacgcccagagcaaggccgccctgaccgactggctgcgggctaaggccagcttcgtgatcgagggcctgaaggaggccgacaaggacgagttctgcagatgcgagctgaagctgcagaagtggtacggggacctgcggggaaagcccttcgccatcgaagccgagaacagcatcctggacatcagcggcttcagcaagcagtacaactgtgccttcatctggcagaaggacggcgtgaagaagctgaacctgtacctgatcatcaactacttcaagggcggcaagctgcggttcaagaagatcaaacctgaagccttcgaagccaacagattctacaccgtgatcaacaaaaagagcggcgagatcgtgcccatggaggtgaacttcaacttcgacgaccccaacctgatcatcctgcctctggcctttggcaagagacagggcagagaattcatctggaacgacctgctgtccctggaaaccggcagcctgaagctggccaacggaagagtgatcgagaagacactgtacaacagaagaacccggcaggatgagcctgccctgttcgtggccctgaccttcgagcggcgggaggtcctggactcctccaatatcaaaccaatgaacctgatcggcgtggcaagaggcgaaaacatccccgccgtgatcgccctgaccgaccccgagggctgcccactgagccggtttaaggatagcctgggaaacccaacccacatcctgagaatcggcgagagctataaggagaagcagcggaccatccaggccaagaaggaggtggagcagcggagagccggcggctacagccggaagtacgccagcaaagccaagaatctggcagacgatatggtgagaaacaccgctagagatctgctgtactacgccgtgacccaggatgccatgctgatcttcgccaacctgagccggggcttcggccggcagggcaagcggaccttcatggccgagagacagtacacacggatggaggactggctgaccgccaagctggcctacgagggcctgagcaagacctacctgtccaagacactggcccagtacacctccaagacatgcagcaactgtgggtttaccatcaccagcgccgactacgacagggtgctggagaagctgaagaagacagcaacaggctggatgaccacaattaacggcaaggagctgaaggtggagggccagattacctactacaacagatacaagagacagaacgtagtcaaggacctgtccgtcgagctggatagactgagcgaagaatctgtgaacaacgacatctcctcctggacaaagggcagaagcggagaagctctgagcctcctgaagaaaagattctcccatagacccgtgcaggagaagttcgtgtgcctgaactgcggcttcgagacacacgcagccgagcaagccgccctgaacatcgccagatcctggctgttcctgcggagccaggagtacaagaaataccagacaaacaagacaaccggcaacaccgataagagagccttcgtcgagacctggcagtccttttaccggaagaagcttaaggaggtgtggaaacctgccgtgcggtctggcggatctggcggaggctcctcccagcgtgcccgtgaccttcagggacgtgttcgtgcagttcagcagggacgagtgggccctgctggacgacgagcagaaggagctgcaccagagcgtgatgcagagcaactacgaggtgctgatgagcctgtactgcgacctggccaagcccgaggtgctgctgcagatggagaggggcgagccctgcctgcccgccgagcccgacctgcagggcgccgccgtgagcctgaaccccgccgccggatctggctccggcagcggccccaagaaaaagagaaaagtctaagctgccttctgcggggcttgccttctggccatgcccttcttctctcccttgcacctgtacctcttggtctttgaataaagcctgagtaggaaggctagcaaaaaaaaaaaaaaaaaaaaaaaaaaaaaaaaaaaaaaaaaaaaaaaaaaaaaaaaaaaaaaaaaaaaaaaaaaaaaaaa

SEQ ID NO: 16247 - RNA, 9485 nt, synthetic construct
  source 1..9485: mol_type = other RNA
aggaaataagagagaaaagaagagtaagaagaaatataagagccaccatggcccctaagaagaagcgtaaagtgagccggatggaacgcctcgtctacgaggtgcggcagaagtgcagaaacatcgaggacatctgcatctcctgcggatctctgaacgtgaccctggagcacccactgttcatcggcggcatgtgccagaactgtaaaaactgttttctggagtgtgcctatcaatacgacgatgacggctaccagagctactgcaccatctgttgcggcggaagagaggtgctgatgtgtggaaataacaactgctgccggtgcttctgcgtggaatgcgtggacctgctggtgggccccggcgccgcccaggccgctattaaggaagatccttggaactgctacatgtgcggccacaagggcacatacggcctgctgagacggagagaggactggcctagcagactgcagatgttcttcgccaataaccacgaccaggagttcgacccccctaaggtgtaccctcccgtccccgccgagaagagaaagcccatccgggtcctgagcctgttcgatggcatcgccaccggtctgctggtgctgaaggacctgggcatccaggtggataggtacattgcctccgaggtgtgcgaggactccatcaccgtgggaatggtgcgtcatcagggcaagatcatgtacgtgggcgacgtgcggagcgtgacacagaagcatatccaggagtggggccctttcgacctggtgatcggcggcagcccttgcaatgacctgagcatcgtgaacccagcccggaagggcctgtacgagggaaccggcagactgttcttcgagttttacagactgctgcacgacgcccggcctaaggaaggcgacgaccggcccttcttttggctgttcgagaatgtggtggccatgggagtcagcgacaagcgggatattagccggttcctggagagcaaccccgtgatgatcgatgccaaggaagtgagcgccgcccaccgggccagatacttctggggcaatctgcctggcatgaacagacccctggccagcaccgtgaacgacaagctggagctgcaggagtgcctggagcacggccggatcgccaagttcagcaaggtgagaaccatcaccacccgaagcaacagcatcaaacaaggcaaggaccagcactttcctgtgttcatgaacgagaaggaggacatcctgtggtgtaccgagatggagagagtgttcgggttcccagtccactacacagatgtcagcaacatgtctagactggccagacagagactgctgggaagaagctggtccgtccctgtgatcagacacctgttcgcccctctgaaggagtacttcgcctgcgtgagcagcggcaacagcaacgccaacagccggggccccagcttctctagcggcctggtgccactgtccctgagagggagccacatgggccccatggagatctacaaaaccgtgagcgcctggaagcggcagcctgtgcgcgtgctgagcctgtttcggaatatcgataaagtcctgaaaagcctgggattcctggagagcggctctggctccggcggtggcaccctgaagtacgtggaggatgtgacaaacgtggtcagacgggatgtggagaagtggggccccttcgatctggtgtacggcagcacccaacccctgggcagctcttgtgaccggtgccctggctggtacatgtttcagttccaccggatcctgcagtacgccctgccgagacaggagtcccagcggccattcttttggattttcatggacaacttgctgctgaccgaggatgaccaggaaactaccactcggttcctgcagaccgaagccgtgaccctgcaggacgtgagaggccgggactaccagaacgccatgcgggtgtggtccaacatccctggactgaaaagcaagcacgcacctctgacccctaaagaagaggagtacctgcaggcccaggtgcggagcagaagcaagctggacgcccctaaggtggatctgctggtgaagaattgcctcctgcccctgagagagtacttcaagtatttcagccagaatagtctgcccctgggaggcagcggcggcggcgccctggtgacatttgaggacgtcgccgtgcggttcacccaggaggaatgggctctgctggatccttctcagaaaatcctgtaccgggacgtgatgagagagacataccggaatctgacctccgtgggcatcaactgggaatgttgggaccttgaagcctgcttcagaagcctgggaagaaacctgagagtgcaggtggtgaagagaaagtgcgagctgaccaacagcggcccctgcgccgagggcggcccaagcagcggcgcccctcctcccagcggcggcagcccagccggctccccaacctctaccgaggagggcacctctgagtccgccacccccgagagcggccctggcacctccaccgagcccagcgagggcagcgcacccggcagccctgccggcagccccacctccacagaggagggaaccagcaccgagcccagcgaaggcagcgccccaggcaccagcaccgagcctagtgagcaggagattaaacggatcaacaagatcagaagaagacttgtgaaagacagcaacaccaagaaggccggcaagacaggccccatgaaaaccctgctggttagagtgatgacacccgatctgagagagcggctggaaaacctgagaaagaagcctgaaaatatcccccagcccatcagcaatacatctagagccaacctgaataagctgctgaccgattacaccgaaatgaagaaggcgatcctgcatgtgtactgggaagagttccagaaggaccctgtgggcctgatgagccgggtggcccagcctgccagcaagaagatcgatcagaacaagctgaaacctgagatggacgagaagggcaacctgaccaccgccggctttgcctgctctcagtgtggccagcccctgttcgtgtacaagctggagcaggtgtctgagaagggcaaggcttacaccaactacttcggacggtgcaatgtggccgagcacgaaaagctgatcctgctggcccagctgaagcccgagaaggatagcgacgaagccgtgacatatagcctgggaaagtttgggcagagggccctggatttctacagcattcatgtgaccaaggagtccacccaccccgtgaagcccctggcccagatcgccggaaacagatacgcctccggacctgtgggaaaggccctgagcgacgcatgtatgggcacaatcgcctccttcctgtctaagtaccaggacatcatcatcgaacaccagaaggtggtgaagggcaaccagaagagactggagagcctgcgggagctggccggcaaggaaaacctggaataccctagcgtgaccctgccacctcagcctcacaccaaggagggcgttgatgcctacaacgaagtgatcgcccgggtgcgaatgtgggtgaacctgaacctgtggcagaagctgaagctaagcagagatgatgccaagcctctgctgagactgaagggattcccttcctttcctctggtcgagagacaggccaacgaagtggactggtgggacatggtgtgtaacgtgaagaagctgatcaacgagaaaaaggaggatggcaaggtgttttggcagaatctggctggctacaagagacaggaagccctgagaccatacctgagcagcgaggaagatcggaagaagggaaagaaattcgctcggtaccagctgggcgacctgctgctgcacctggaaaagaagcacggcgaggactggggaaaggtgtacgacgaggcctgggagcggattgacaagaaagtggaaggcctgagcaagcacatcaagctggaagaggaacggagaagcgaggacgcccagagcaaggccgccctgaccgactggctgcgggctaaggccagcttcgtgatcgagggcctgaaggaggccgacaaggacgagttctgcagatgcgagctgaagctgcagaagtggtacggggacctgcggggaaagcccttcgccatcgaagccgagaacagcatcctggacatcagcggcttcagcaagcagtacaactgtgccttcatctggcagaaggacggcgtgaagaagctgaacctgtacctgatcatcaactacttcaagggcggcaagctgcggttcaagaagatcaaacctgaagccttcgaagccaacagattctacaccgtgatcaacaaaaagagcggcgagatcgtgcccatggaggtgaacttcaacttcgacgaccccaacctgatcatcctgcctctggcctttggcaagagacagggcagagaattcatctggaacgacctgctgtccctggaaaccggcagcctgaagctggccaacggaagagtgatcgagaagacactgtacaacagaagaacccggcaggatgagcctgccctgttcgtggccctgaccttcgagcggcgggaggtcctggactcctccaatatcaaaccaatgaacctgatcggcgtggcaagaggcgaaaacatccccgccgtgatcgccctgaccgaccccgagggctgcccactgagccggtttaaggatagcctgggaaacccaacccacatcctgagaatcggcgagagctataaggagaagcagcggaccatccaggccaagaaggaggtggagcagcggagagccggcggctacagccggaagtacgccagcaaagccaagaatctggcagacgatatggtgagaaacaccgctagagatctgctgtactacgccgtgacccaggatgccatgctgatcttcgccaacctgagccggggcttcggccggcagggcaagcggaccttcatggccgagagacagtacacacggatggaggactggctgaccgccaagctggcctacgagggcctgagcaagacctacctgtccaagacactggcccagtacacctccaagacatgcagcaactgtgggtttaccatcaccagcgccgactacgacagggtgctggagaagctgaagaagacagcaacaggctggatgaccacaattaacggcaaggagctgaaggtggagggccagattacctactacaacagatacaagagacagaacgtagtcaaggacctgtccgtcgagctggatagactgagcgaagaatctgtgaacaacgacatctcctcctggacaaagggcagaagcggagaagctctgagcctcctgaagaaaagattctcccatagacccgtgcaggagaagttcgtgtgcctgaactgcggcttcgagacacacgcagccgagcaagccgccctgaacatcgccagatcctggctgttcctgcggagccaggagtacaagaaataccagacaaacaagacaaccggcaacaccgataagagagccttcgtcgagacctggcagtccttttaccggaagaagcttaaggaggtgtggaaacctgccgtgcggtctggcggatctggcggaggctccttccaggagcccgtgaccttcgaggacgtggccgtgtacttcacccagaacgagtgggccagcctgcaccccacccagagggccctgtacagggaggtgatgctggagaactacgccaacgtgaccagcctgctggccttccccttccccaagcccgccctgatcagccacctggagaggggcgaggccccctggggccccgacccctgggacaccgagatccccaggggcatcagccagggcggcggcccaagcagcggcgcccctcctcccagcggcggcagcccagccggctccccaacctctaccgaggagggcacctctgagtccgccacccccgagagcggccctggcacctccaccgagcccagcgagggcagcgcacccggcagccctgccggcagccccacctccacagaggagggaaccagcaccgagcccagcgaaggcagcgccccaggcaccagcaccgagcctagtgagcaggagattaaacggatcaacaagatcagaagaagacttgtgaaagacagcaacaccaagaaggccggcaagacaggccccatgaaaaccctgctggttagagtgatgacacccgatctgagagagcggctggaaaacctgagaaagaagcctgaaaatatcccccagcccatcagcaatacatctagagccaacctgaataagctgctgaccgattacaccgaaatgaagaaggcgatcctgcatgtgtactgggaagagttccagaaggaccctgtgggcctgatgagccgggtggcccagcctgccagcaagaagatcgatcagaacaagctgaaacctgagatggacgagaagggcaacctgaccaccgccggctttgcctgctctcagtgtggccagcccctgttcgtgtacaagctggagcaggtgtctgagaagggcaaggcttacaccaactacttcggacggtgcaatgtggccgagcacgaaaagctgatcctgctggcccagctgaagcccgagaaggatagcgacgaagccgtgacatatagcctgggaaagtttgggcagagggccctggatttctacagcattcatgtgaccaaggagtccacccaccccgtgaagcccctggcccagatcgccggaaacagatacgcctccggacctgtgggaaaggccctgagcgacgcatgtatgggcacaatcgcctccttcctgtctaagtaccaggacatcatcatcgaacaccagaaggtggtgaagggcaaccagaagagactggagagcctgcgggagctggccggcaaggaaaacctggaataccctagcgtgaccctgccacctcagcctcacaccaaggagggcgttgatgcctacaacgaagtgatcgcccgggtgcgaatgtgggtgaacctgaacctgtggcagaagctgaagctaagcagagatgatgccaagcctctgctgagactgaagggattcccttcctttcctctggtcgagagacaggccaacgaagtggactggtgggacatggtgtgtaacgtgaagaagctgatcaacgagaaaaaggaggatggcaaggtgttttggcagaatctggctggctacaagagacaggaagccctgagaccatacctgagcagcgaggaagatcggaagaagggaaagaaattcgctcggtaccagctgggcgacctgctgctgcacctggaaaagaagcacggcgaggactggggaaaggtgtacgacgaggcctgggagcggattgacaagaaagtggaaggcctgagcaagcacatcaagctggaagaggaacggagaagcgaggacgcccagagcaaggccgccctgaccgactggctgcgggctaaggccagcttcgtgatcgagggcctgaaggaggccgacaaggacgagttctgcagatgcgagctgaagctgcagaagtggtacggggacctgcggggaaagcccttcgccatcgaagccgagaacagcatcctggacatcagcggcttcagcaagcagtacaactgtgccttcatctggcagaaggacggcgtgaagaagctgaacctgtacctgatcatcaactacttcaagggcggcaagctgcggttcaagaagatcaaacctgaagccttcgaagccaacagattctacaccgtgatcaacaaaaagagcggcgagatcgtgcccatggaggtgaacttcaacttcgacgaccccaacctgatcatcctgcctctggcctttggcaagagacagggcagagaattcatctggaacgacctgctgtccctggaaaccggcagcctgaagctggccaacggaagagtgatcgagaagacactgtacaacagaagaacccggcaggatgagcctgccctgttcgtggccctgaccttcgagcggcgggaggtcctggactcctccaatatcaaaccaatgaacctgatcggcgtggcaagaggcgaaaacatccccgccgtgatcgccctgaccgaccccgagggctgcccactgagccggtttaaggatagcctgggaaacccaacccacatcctgagaatcggcgagagctataaggagaagcagcggaccatccaggccaagaaggaggtggagcagcggagagccggcggctacagccggaagtacgccagcaaagccaagaatctggcagacgatatggtgagaaacaccgctagagatctgctgtactacgccgtgacccaggatgccatgctgatcttcgccaacctgagccggggcttcggccggcagggcaagcggaccttcatggccgagagacagtacacacggatggaggactggctgaccgccaagctggcctacgagggcctgagcaagacctacctgtccaagacactggcccagtacacctccaagacatgcagcaactgtgggtttaccatcaccagcgccgactacgacagggtgctggagaagctgaagaagacagcaacaggctggatgaccacaattaacggcaaggagctgaaggtggagggccagattacctactacaacagatacaagagacagaacgtagtcaaggacctgtccgtcgagctggatagactgagcgaagaatctgtgaacaacgacatctcctcctggacaaagggcagaagcggagaagctctgagcctcctgaagaaaagattctcccatagacccgtgcaggagaagttcgtgtgcctgaactgcggcttcgagacacacgcagccgagcaagccgccctgaacatcgccagatcctggctgttcctgcggagccaggagtacaagaaataccagacaaacaagacaaccggcaacaccgataagagagccttcgtcgagacctggcagtccttttaccggaagaagcttaaggaggtgtggaaacctgccgtgcggtctggcggatctggcggaggctcctttccaggagcccgtgaccttcgaggacgtggccgtgtacttcacccagaacgagtgggccagcctgcaccccacccagagggccctgtacagggaggtgatgctggagaactacgccaacgtgaccagcctgctggccttccccttccccaagcccgccctgatcagccacctggagaggggcgaggccccctggggccccgacccctgggacaccgagatccccaggggcatcagccagggcggatctggctccggcagcggccccaagaaaaagagaaaagtctaagctgccttctgcggggcttgccttctggccatgcccttcttctctcccttgcacctgtacctcttggtctttgaataaagcctgagtaggaaggctagcaaaaaaaaaaaaaaaaaaaaaaaaaaaaaaaaaaaaaaaaaaaaaaaaaaaaaaaaaaaaaaaaaaaaaaaaaaaaaaaa

SEQ ID NO: 16248 - RNA, 9485 nt, synthetic construct
  source 1..9485: mol_type = other RNA
aggaaataagagagaaaagaagagtaagaagaaatataagagccaccatggcccctaagaagaagcgtaaagtgagccggatggaacgcctcgtctacgaggtgcggcagaagtgcagaaacatcgaggacatctgcatctcctgcggatctctgaacgtgaccctggagcacccactgttcatcggcggcatgtgccagaactgtaaaaactgttttctggagtgtgcctatcaatacgacgatgacggctaccagagctactgcaccatctgttgcggcggaagagaggtgctgatgtgtggaaataacaactgctgccggtgcttctgcgtggaatgcgtggacctgctggtgggccccggcgccgcccaggccgctattaaggaagatccttggaactgctacatgtgcggccacaagggcacatacggcctgctgagacggagagaggactggcctagcagactgcagatgttcttcgccaataaccacgaccaggagttcgacccccctaaggtgtaccctcccgtccccgccgagaagagaaagcccatccgggtcctgagcctgttcgatggcatcgccaccggtctgctggtgctgaaggacctgggcatccaggtggataggtacattgcctccgaggtgtgcgaggactccatcaccgtgggaatggtgcgtcatcagggcaagatcatgtacgtgggcgacgtgcggagcgtgacacagaagcatatccaggagtggggccctttcgacctggtgatcggcggcagcccttgcaatgacctgagcatcgtgaacccagcccggaagggcctgtacgagggaaccggcagactgttcttcgagttttacagactgctgcacgacgcccggcctaaggaaggcgacgaccggcccttcttttggctgttcgagaatgtggtggccatgggagtcagcgacaagcgggatattagccggttcctggagagcaaccccgtgatgatcgatgccaaggaagtgagcgccgcccaccgggccagatacttctggggcaatctgcctggcatgaacagacccctggccagcaccgtgaacgacaagctggagctgcaggagtgcctggagcacggccggatcgccaagttcagcaaggtgagaaccatcaccacccgaagcaacagcatcaaacaaggcaaggaccagcactttcctgtgttcatgaacgagaaggaggacatcctgtggtgtaccgagatggagagagtgttcgggttcccagtccactacacagatgtcagcaacatgtctagactggccagacagagactgctgggaagaagctggtccgtccctgtgatcagacacctgttcgcccctctgaaggagtacttcgcctgcgtgagcagcggcaacagcaacgccaacagccggggccccagcttctctagcggcctggtgccactgtccctgagagggagccacatgggccccatggagatctacaaaaccgtgagcgcctggaagcggcagcctgtgcgcgtgctgagcctgtttcggaatatcgataaagtcctgaaaagcctgggattcctggagagcggctctggctccggcggtggcaccctgaagtacgtggaggatgtgacaaacgtggtcagacgggatgtggagaagtggggccccttcgatctggtgtacggcagcacccaacccctgggcagctcttgtgaccggtgccctggctggtacatgtttcagttccaccggatcctgcagtacgccctgccgagacaggagtcccagcggccattcttttggattttcatggacaacttgctgctgaccgaggatgaccaggaaactaccactcggttcctgcagaccgaagccgtgaccctgcaggacgtgagaggccgggactaccagaacgccatgcgggtgtggtccaacatccctggactgaaaagcaagcacgcacctctgacccctaaagaagaggagtacctgcaggcccaggtgcggagcagaagcaagctggacgcccctaaggtggatctgctggtgaagaattgcctcctgcccctgagagagtacttcaagtatttcagccagaatagtctgcccctgggaggcagcggcggcggcgccctggtgacatttgaggacgtcgccgtgcggttcacccaggaggaatgggctctgctggatccttctcagaaaatcctgtaccgggacgtgatgagagagacataccggaatctgacctccgtgggcatcaactgggaatgttgggaccttgaagcctgcttcagaagcctgggaagaaacctgagagtgcaggtggtgaagagaaagtgcgagctgaccaacagcggcccctgcgccgagggcggcccaagcagcggcgcccctcctcccagcggcggcagcccagccggctccccaacctctaccgaggagggcacctctgagtccgccacccccgagagcggccctggcacctccaccgagcccagcgagggcagcgcacccggcagccctgccggcagccccacctccacagaggagggaaccagcaccgagcccagcgaaggcagcgccccaggcaccagcaccgagcctagtgagcaggagattaaacggatcaacaagatcagaagaagacttgtgaaagacagcaacaccaagaaggccggcaagacaggccccatgaaaaccctgctggttagagtgatgacacccgatctgagagagcggctggaaaacctgagaaagaagcctgaaaatatcccccagcccatcagcaatacatctagagccaacctgaataagctgctgaccgattacaccgaaatgaagaaggcgatcctgcatgtgtactgggaagagttccagaaggaccctgtgggcctgatgagccgggtggcccagcctgccagcaagaagatcgatcagaacaagctgaaacctgagatggacgagaagggcaacctgaccaccgccggctttgcctgctctcagtgtggccagcccctgttcgtgtacaagctggagcaggtgtctgagaagggcaaggcttacaccaactacttcggacggtgcaatgtggccgagcacgaaaagctgatcctgctggcccagctgaagcccgagaaggatagcgacgaagccgtgacatatagcctgggaaagtttgggcagagggccctggatttctacagcattcatgtgaccaaggagtccacccaccccgtgaagcccctggcccagatcgccggaaacagatacgcctccggacctgtgggaaaggccctgagcgacgcatgtatgggcacaatcgcctccttcctgtctaagtaccaggacatcatcatcgaacaccagaaggtggtgaagggcaaccagaagagactggagagcctgcgggagctggccggcaaggaaaacctggaataccctagcgtgaccctgccacctcagcctcacaccaaggagggcgttgatgcctacaacgaagtgatcgcccgggtgcgaatgtgggtgaacctgaacctgtggcagaagctgaagctaagcagagatgatgccaagcctctgctgagactgaagggattcccttcctttcctctggtcgagagacaggccaacgaagtggactggtgggacatggtgtgtaacgtgaagaagctgatcaacgagaaaaaggaggatggcaaggtgttttggcagaatctggctggctacaagagacaggaagccctgagaccatacctgagcagcgaggaagatcggaagaagggaaagaaattcgctcggtaccagctgggcgacctgctgctgcacctggaaaagaagcacggcgaggactggggaaaggtgtacgacgaggcctgggagcggattgacaagaaagtggaaggcctgagcaagcacatcaagctggaagaggaacggagaagcgaggacgcccagagcaaggccgccctgaccgactggctgcgggctaaggccagcttcgtgatcgagggcctgaaggaggccgacaaggacgagttctgcagatgcgagctgaagctgcagaagtggtacggggacctgcggggaaagcccttcgccatcgaagccgagaacagcatcctggacatcagcggcttcagcaagcagtacaactgtgccttcatctggcagaaggacggcgtgaagaagctgaacctgtacctgatcatcaactacttcaagggcggcaagctgcggttcaagaagatcaaacctgaagccttcgaagccaacagattctacaccgtgatcaacaaaaagagcggcgagatcgtgcccatggaggtgaacttcaacttcgacgaccccaacctgatcatcctgcctctggcctttggcaagagacagggcagagaattcatctggaacgacctgctgtccctggaaaccggcagcctgaagctggccaacggaagagtgatcgagaagacactgtacaacagaagaacccggcaggatgagcctgccctgttcgtggccctgaccttcgagcggcgggaggtcctggactcctccaatatcaaaccaatgaacctgatcggcgtggcaagaggcgaaaacatccccgccgtgatcgccctgaccgaccccgagggctgcccactgagccggtttaaggatagcctgggaaacccaacccacatcctgagaatcggcgagagctataaggagaagcagcggaccatccaggccaagaaggaggtggagcagcggagagccggcggctacagccggaagtacgccagcaaagccaagaatctggcagacgatatggtgagaaacaccgctagagatctgctgtactacgccgtgacccaggatgccatgctgatcttcgccaacctgagccggggcttcggccggcagggcaagcggaccttcatggccgagagacagtacacacggatggaggactggctgaccgccaagctggcctacgagggcctgagcaagacctacctgtccaagacactggcccagtacacctccaagacatgcagcaactgtgggtttaccatcaccagcgccgactacgacagggtgctggagaagctgaagaagacagcaacaggctggatgaccacaattaacggcaaggagctgaaggtggagggccagattacctactacaacagatacaagagacagaacgtagtcaaggacctgtccgtcgagctggatagactgagcgaagaatctgtgaacaacgacatctcctcctggacaaagggcagaagcggagaagctctgagcctcctgaagaaaagattctcccatagacccgtgcaggagaagttcgtgtgcctgaactgcggcttcgagacacacgcagccgagcaagccgccctgaacatcgccagatcctggctgttcctgcggagccaggagtacaagaaataccagacaaacaagacaaccggcaacaccgataagagagccttcgtcgagacctggcagtccttttaccggaagaagcttaaggaggtgtggaaacctgccgtgcggtctggcggatctggcggaggctccggcgaggaggccgtgaccttcagggacgtggccctggacttcacctgggaggagtggggctgcctgagcgccgcccagagggagctgtacaaggacgtgatgctggagaactacaggaacctggtgagcctgggcctgcccggccccaagcccggcctgatcagctggctggagggcgaggaggagccccacccctgggacagcctggtgcacgccgccaggagcaccagcctgagcaaggccggcggcccaagcagcggcgcccctcctcccagcggcggcagcccagccggctccccaacctctaccgaggagggcacctctgagtccgccacccccgagagcggccctggcacctccaccgagcccagcgagggcagcgcacccggcagccctgccggcagccccacctccacagaggagggaaccagcaccgagcccagcgaaggcagcgccccaggcaccagcaccgagcctagtgagcaggagattaaacggatcaacaagatcagaagaagacttgtgaaagacagcaacaccaagaaggccggcaagacaggccccatgaaaaccctgctggttagagtgatgacacccgatctgagagagcggctggaaaacctgagaaagaagcctgaaaatatcccccagcccatcagcaatacatctagagccaacctgaataagctgctgaccgattacaccgaaatgaagaaggcgatcctgcatgtgtactgggaagagttccagaaggaccctgtgggcctgatgagccgggtggcccagcctgccagcaagaagatcgatcagaacaagctgaaacctgagatggacgagaagggcaacctgaccaccgccggctttgcctgctctcagtgtggccagcccctgttcgtgtacaagctggagcaggtgtctgagaagggcaaggcttacaccaactacttcggacggtgcaatgtggccgagcacgaaaagctgatcctgctggcccagctgaagcccgagaaggatagcgacgaagccgtgacatatagcctgggaaagtttgggcagagggccctggatttctacagcattcatgtgaccaaggagtccacccaccccgtgaagcccctggcccagatcgccggaaacagatacgcctccggacctgtgggaaaggccctgagcgacgcatgtatgggcacaatcgcctccttcctgtctaagtaccaggacatcatcatcgaacaccagaaggtggtgaagggcaaccagaagagactggagagcctgcgggagctggccggcaaggaaaacctggaataccctagcgtgaccctgccacctcagcctcacaccaaggagggcgttgatgcctacaacgaagtgatcgcccgggtgcgaatgtgggtgaacctgaacctgtggcagaagctgaagctaagcagagatgatgccaagcctctgctgagactgaagggattcccttcctttcctctggtcgagagacaggccaacgaagtggactggtgggacatggtgtgtaacgtgaagaagctgatcaacgagaaaaaggaggatggcaaggtgttttggcagaatctggctggctacaagagacaggaagccctgagaccatacctgagcagcgaggaagatcggaagaagggaaagaaattcgctcggtaccagctgggcgacctgctgctgcacctggaaaagaagcacggcgaggactggggaaaggtgtacgacgaggcctgggagcggattgacaagaaagtggaaggcctgagcaagcacatcaagctggaagaggaacggagaagcgaggacgcccagagcaaggccgccctgaccgactggctgcgggctaaggccagcttcgtgatcgagggcctgaaggaggccgacaaggacgagttctgcagatgcgagctgaagctgcagaagtggtacggggacctgcggggaaagcccttcgccatcgaagccgagaacagcatcctggacatcagcggcttcagcaagcagtacaactgtgccttcatctggcagaaggacggcgtgaagaagctgaacctgtacctgatcatcaactacttcaagggcggcaagctgcggttcaagaagatcaaacctgaagccttcgaagccaacagattctacaccgtgatcaacaaaaagagcggcgagatcgtgcccatggaggtgaacttcaacttcgacgaccccaacctgatcatcctgcctctggcctttggcaagagacagggcagagaattcatctggaacgacctgctgtccctggaaaccggcagcctgaagctggccaacggaagagtgatcgagaagacactgtacaacagaagaacccggcaggatgagcctgccctgttcgtggccctgaccttcgagcggcgggaggtcctggactcctccaatatcaaaccaatgaacctgatcggcgtggcaagaggcgaaaacatccccgccgtgatcgccctgaccgaccccgagggctgcccactgagccggtttaaggatagcctgggaaacccaacccacatcctgagaatcggcgagagctataaggagaagcagcggaccatccaggccaagaaggaggtggagcagcggagagccggcggctacagccggaagtacgccagcaaagccaagaatctggcagacgatatggtgagaaacaccgctagagatctgctgtactacgccgtgacccaggatgccatgctgatcttcgccaacctgagccggggcttcggccggcagggcaagcggaccttcatggccgagagacagtacacacggatggaggactggctgaccgccaagctggcctacgagggcctgagcaagacctacctgtccaagacactggcccagtacacctccaagacatgcagcaactgtgggtttaccatcaccagcgccgactacgacagggtgctggagaagctgaagaagacagcaacaggctggatgaccacaattaacggcaaggagctgaaggtggagggccagattacctactacaacagatacaagagacagaacgtagtcaaggacctgtccgtcgagctggatagactgagcgaagaatctgtgaacaacgacatctcctcctggacaaagggcagaagcggagaagctctgagcctcctgaagaaaagattctcccatagacccgtgcaggagaagttcgtgtgcctgaactgcggcttcgagacacacgcagccgagcaagccgccctgaacatcgccagatcctggctgttcctgcggagccaggagtacaagaaataccagacaaacaagacaaccggcaacaccgataagagagccttcgtcgagacctggcagtccttttaccggaagaagcttaaggaggtgtggaaacctgccgtgcggtctggcggatctggcggaggctcctggcgaggaggccgtgaccttcagggacgtggccctggacttcacctgggaggagtggggctgcctgagcgccgcccagagggagctgtacaaggacgtgatgctggagaactacaggaacctggtgagcctgggcctgcccggccccaagcccggcctgatcagctggctggagggcgaggaggagccccacccctgggacagcctggtgcacgccgccaggagcaccagcctgagcaaggccggatctggctccggcagcggccccaagaaaaagagaaaagtctaagctgccttctgcggggcttgccttctggccatgcccttcttctctcccttgcacctgtacctcttggtctttgaataaagcctgagtaggaaggctagcaaaaaaaaaaaaaaaaaaaaaaaaaaaaaaaaaaaaaaaaaaaaaaaaaaaaaaaaaaaaaaaaaaaaaaaaaaaaaaaa

SEQ ID NO: 16249 - RNA, 9485 nt, synthetic construct
  source 1..9485: mol_type = other RNA
aggaaataagagagaaaagaagagtaagaagaaatataagagccaccatggcccctaagaagaagcgtaaagtgagccggatggaacgcctcgtctacgaggtgcggcagaagtgcagaaacatcgaggacatctgcatctcctgcggatctctgaacgtgaccctggagcacccactgttcatcggcggcatgtgccagaactgtaaaaactgttttctggagtgtgcctatcaatacgacgatgacggctaccagagctactgcaccatctgttgcggcggaagagaggtgctgatgtgtggaaataacaactgctgccggtgcttctgcgtggaatgcgtggacctgctggtgggccccggcgccgcccaggccgctattaaggaagatccttggaactgctacatgtgcggccacaagggcacatacggcctgctgagacggagagaggactggcctagcagactgcagatgttcttcgccaataaccacgaccaggagttcgacccccctaaggtgtaccctcccgtccccgccgagaagagaaagcccatccgggtcctgagcctgttcgatggcatcgccaccggtctgctggtgctgaaggacctgggcatccaggtggataggtacattgcctccgaggtgtgcgaggactccatcaccgtgggaatggtgcgtcatcagggcaagatcatgtacgtgggcgacgtgcggagcgtgacacagaagcatatccaggagtggggccctttcgacctggtgatcggcggcagcccttgcaatgacctgagcatcgtgaacccagcccggaagggcctgtacgagggaaccggcagactgttcttcgagttttacagactgctgcacgacgcccggcctaaggaaggcgacgaccggcccttcttttggctgttcgagaatgtggtggccatgggagtcagcgacaagcgggatattagccggttcctggagagcaaccccgtgatgatcgatgccaaggaagtgagcgccgcccaccgggccagatacttctggggcaatctgcctggcatgaacagacccctggccagcaccgtgaacgacaagctggagctgcaggagtgcctggagcacggccggatcgccaagttcagcaaggtgagaaccatcaccacccgaagcaacagcatcaaacaaggcaaggaccagcactttcctgtgttcatgaacgagaaggaggacatcctgtggtgtaccgagatggagagagtgttcgggttcccagtccactacacagatgtcagcaacatgtctagactggccagacagagactgctgggaagaagctggtccgtccctgtgatcagacacctgttcgcccctctgaaggagtacttcgcctgcgtgagcagcggcaacagcaacgccaacagccggggccccagcttctctagcggcctggtgccactgtccctgagagggagccacatgggccccatggagatctacaaaaccgtgagcgcctggaagcggcagcctgtgcgcgtgctgagcctgtttcggaatatcgataaagtcctgaaaagcctgggattcctggagagcggctctggctccggcggtggcaccctgaagtacgtggaggatgtgacaaacgtggtcagacgggatgtggagaagtggggccccttcgatctggtgtacggcagcacccaacccctgggcagctcttgtgaccggtgccctggctggtacatgtttcagttccaccggatcctgcagtacgccctgccgagacaggagtcccagcggccattcttttggattttcatggacaacttgctgctgaccgaggatgaccaggaaactaccactcggttcctgcagaccgaagccgtgaccctgcaggacgtgagaggccgggactaccagaacgccatgcgggtgtggtccaacatccctggactgaaaagcaagcacgcacctctgacccctaaagaagaggagtacctgcaggcccaggtgcggagcagaagcaagctggacgcccctaaggtggatctgctggtgaagaattgcctcctgcccctgagagagtacttcaagtatttcagccagaatagtctgcccctgggaggcagcggcggcggcgccctggtgacatttgaggacgtcgccgtgcggttcacccaggaggaatgggctctgctggatccttctcagaaaatcctgtaccgggacgtgatgagagagacataccggaatctgacctccgtgggcatcaactgggaatgttgggaccttgaagcctgcttcagaagcctgggaagaaacctgagagtgcaggtggtgaagagaaagtgcgagctgaccaacagcggcccctgcgccgagggcggcccaagcagcggcgcccctcctcccagcggcggcagcccagccggctccccaacctctaccgaggagggcacctctgagtccgccacccccgagagcggccctggcacctccaccgagcccagcgagggcagcgcacccggcagccctgccggcagccccacctccacagaggagggaaccagcaccgagcccagcgaaggcagcgccccaggcaccagcaccgagcctagtgagcaggagattaaacggatcaacaagatcagaagaagacttgtgaaagacagcaacaccaagaaggccggcaagacaggccccatgaaaaccctgctggttagagtgatgacacccgatctgagagagcggctggaaaacctgagaaagaagcctgaaaatatcccccagcccatcagcaatacatctagagccaacctgaataagctgctgaccgattacaccgaaatgaagaaggcgatcctgcatgtgtactgggaagagttccagaaggaccctgtgggcctgatgagccgggtggcccagcctgccagcaagaagatcgatcagaacaagctgaaacctgagatggacgagaagggcaacctgaccaccgccggctttgcctgctctcagtgtggccagcccctgttcgtgtacaagctggagcaggtgtctgagaagggcaaggcttacaccaactacttcggacggtgcaatgtggccgagcacgaaaagctgatcctgctggcccagctgaagcccgagaaggatagcgacgaagccgtgacatatagcctgggaaagtttgggcagagggccctggatttctacagcattcatgtgaccaaggagtccacccaccccgtgaagcccctggcccagatcgccggaaacagatacgcctccggacctgtgggaaaggccctgagcgacgcatgtatgggcacaatcgcctccttcctgtctaagtaccaggacatcatcatcgaacaccagaaggtggtgaagggcaaccagaagagactggagagcctgcgggagctggccggcaaggaaaacctggaataccctagcgtgaccctgccacctcagcctcacaccaaggagggcgttgatgcctacaacgaagtgatcgcccgggtgcgaatgtgggtgaacctgaacctgtggcagaagctgaagctaagcagagatgatgccaagcctctgctgagactgaagggattcccttcctttcctctggtcgagagacaggccaacgaagtggactggtgggacatggtgtgtaacgtgaagaagctgatcaacgagaaaaaggaggatggcaaggtgttttggcagaatctggctggctacaagagacaggaagccctgagaccatacctgagcagcgaggaagatcggaagaagggaaagaaattcgctcggtaccagctgggcgacctgctgctgcacctggaaaagaagcacggcgaggactggggaaaggtgtacgacgaggcctgggagcggattgacaagaaagtggaaggcctgagcaagcacatcaagctggaagaggaacggagaagcgaggacgcccagagcaaggccgccctgaccgactggctgcgggctaaggccagcttcgtgatcgagggcctgaaggaggccgacaaggacgagttctgcagatgcgagctgaagctgcagaagtggtacggggacctgcggggaaagcccttcgccatcgaagccgagaacagcatcctggacatcagcggcttcagcaagcagtacaactgtgccttcatctggcagaaggacggcgtgaagaagctgaacctgtacctgatcatcaactacttcaagggcggcaagctgcggttcaagaagatcaaacctgaagccttcgaagccaacagattctacaccgtgatcaacaaaaagagcggcgagatcgtgcccatggaggtgaacttcaacttcgacgaccccaacctgatcatcctgcctctggcctttggcaagagacagggcagagaattcatctggaacgacctgctgtccctggaaaccggcagcctgaagctggccaacggaagagtgatcgagaagacactgtacaacagaagaacccggcaggatgagcctgccctgttcgtggccctgaccttcgagcggcgggaggtcctggactcctccaatatcaaaccaatgaacctgatcggcgtggcaagaggcgaaaacatccccgccgtgatcgccctgaccgaccccgagggctgcccactgagccggtttaaggatagcctgggaaacccaacccacatcctgagaatcggcgagagctataaggagaagcagcggaccatccaggccaagaaggaggtggagcagcggagagccggcggctacagccggaagtacgccagcaaagccaagaatctggcagacgatatggtgagaaacaccgctagagatctgctgtactacgccgtgacccaggatgccatgctgatcttcgccaacctgagccggggcttcggccggcagggcaagcggaccttcatggccgagagacagtacacacggatggaggactggctgaccgccaagctggcctacgagggcctgagcaagacctacctgtccaagacactggcccagtacacctccaagacatgcagcaactgtgggtttaccatcaccagcgccgactacgacagggtgctggagaagctgaagaagacagcaacaggctggatgaccacaattaacggcaaggagctgaaggtggagggccagattacctactacaacagatacaagagacagaacgtagtcaaggacctgtccgtcgagctggatagactgagcgaagaatctgtgaacaacgacatctcctcctggacaaagggcagaagcggagaagctctgagcctcctgaagaaaagattctcccatagacccgtgcaggagaagttcgtgtgcctgaactgcggcttcgagacacacgcagccgagcaagccgccctgaacatcgccagatcctggctgttcctgcggagccaggagtacaagaaataccagacaaacaagacaaccggcaacaccgataagagagccttcgtcgagacctggcagtccttttaccggaagaagcttaaggaggtgtggaaacctgccgtgcggtctggcggatctggcggaggctccagccagaccctggtgaccttcaaggacgtgttcgtggacttcaccagggaggagtggaagctgctggacaccgcccagcagatcgtgtacaggaacgtgatgctggagaactacaagaacctggtgagcctgggctaccagctgaccaagcccgacgtgatcctgaggctggagaagggcgaggagccctgggtggtggagaggggcatccaccaggagacccaccccgacagcgagaccgccggcggcccaagcagcggcgcccctcctcccagcggcggcagcccagccggctccccaacctctaccgaggagggcacctctgagtccgccacccccgagagcggccctggcacctccaccgagcccagcgagggcagcgcacccggcagccctgccggcagccccacctccacagaggagggaaccagcaccgagcccagcgaaggcagcgccccaggcaccagcaccgagcctagtgagcaggagattaaacggatcaacaagatcagaagaagacttgtgaaagacagcaacaccaagaaggccggcaagacaggccccatgaaaaccctgctggttagagtgatgacacccgatctgagagagcggctggaaaacctgagaaagaagcctgaaaatatcccccagcccatcagcaatacatctagagccaacctgaataagctgctgaccgattacaccgaaatgaagaaggcgatcctgcatgtgtactgggaagagttccagaaggaccctgtgggcctgatgagccgggtggcccagcctgccagcaagaagatcgatcagaacaagctgaaacctgagatggacgagaagggcaacctgaccaccgccggctttgcctgctctcagtgtggccagcccctgttcgtgtacaagctggagcaggtgtctgagaagggcaaggcttacaccaactacttcggacggtgcaatgtggccgagcacgaaaagctgatcctgctggcccagctgaagcccgagaaggatagcgacgaagccgtgacatatagcctgggaaagtttgggcagagggccctggatttctacagcattcatgtgaccaaggagtccacccaccccgtgaagcccctggcccagatcgccggaaacagatacgcctccggacctgtgggaaaggccctgagcgacgcatgtatgggcacaatcgcctccttcctgtctaagtaccaggacatcatcatcgaacaccagaaggtggtgaagggcaaccagaagagactggagagcctgcgggagctggccggcaaggaaaacctggaataccctagcgtgaccctgccacctcagcctcacaccaaggagggcgttgatgcctacaacgaagtgatcgcccgggtgcgaatgtgggtgaacctgaacctgtggcagaagctgaagctaagcagagatgatgccaagcctctgctgagactgaagggattcccttcctttcctctggtcgagagacaggccaacgaagtggactggtgggacatggtgtgtaacgtgaagaagctgatcaacgagaaaaaggaggatggcaaggtgttttggcagaatctggctggctacaagagacaggaagccctgagaccatacctgagcagcgaggaagatcggaagaagggaaagaaattcgctcggtaccagctgggcgacctgctgctgcacctggaaaagaagcacggcgaggactggggaaaggtgtacgacgaggcctgggagcggattgacaagaaagtggaaggcctgagcaagcacatcaagctggaagaggaacggagaagcgaggacgcccagagcaaggccgccctgaccgactggctgcgggctaaggccagcttcgtgatcgagggcctgaaggaggccgacaaggacgagttctgcagatgcgagctgaagctgcagaagtggtacggggacctgcggggaaagcccttcgccatcgaagccgagaacagcatcctggacatcagcggcttcagcaagcagtacaactgtgccttcatctggcagaaggacggcgtgaagaagctgaacctgtacctgatcatcaactacttcaagggcggcaagctgcggttcaagaagatcaaacctgaagccttcgaagccaacagattctacaccgtgatcaacaaaaagagcggcgagatcgtgcccatggaggtgaacttcaacttcgacgaccccaacctgatcatcctgcctctggcctttggcaagagacagggcagagaattcatctggaacgacctgctgtccctggaaaccggcagcctgaagctggccaacggaagagtgatcgagaagacactgtacaacagaagaacccggcaggatgagcctgccctgttcgtggccctgaccttcgagcggcgggaggtcctggactcctccaatatcaaaccaatgaacctgatcggcgtggcaagaggcgaaaacatccccgccgtgatcgccctgaccgaccccgagggctgcccactgagccggtttaaggatagcctgggaaacccaacccacatcctgagaatcggcgagagctataaggagaagcagcggaccatccaggccaagaaggaggtggagcagcggagagccggcggctacagccggaagtacgccagcaaagccaagaatctggcagacgatatggtgagaaacaccgctagagatctgctgtactacgccgtgacccaggatgccatgctgatcttcgccaacctgagccggggcttcggccggcagggcaagcggaccttcatggccgagagacagtacacacggatggaggactggctgaccgccaagctggcctacgagggcctgagcaagacctacctgtccaagacactggcccagtacacctccaagacatgcagcaactgtgggtttaccatcaccagcgccgactacgacagggtgctggagaagctgaagaagacagcaacaggctggatgaccacaattaacggcaaggagctgaaggtggagggccagattacctactacaacagatacaagagacagaacgtagtcaaggacctgtccgtcgagctggatagactgagcgaagaatctgtgaacaacgacatctcctcctggacaaagggcagaagcggagaagctctgagcctcctgaagaaaagattctcccatagacccgtgcaggagaagttcgtgtgcctgaactgcggcttcgagacacacgcagccgagcaagccgccctgaacatcgccagatcctggctgttcctgcggagccaggagtacaagaaataccagacaaacaagacaaccggcaacaccgataagagagccttcgtcgagacctggcagtccttttaccggaagaagcttaaggaggtgtggaaacctgccgtgcggtctggcggatctggcggaggctcctagccagaccctggtgaccttcaaggacgtgttcgtggacttcaccagggaggagtggaagctgctggacaccgcccagcagatcgtgtacaggaacgtgatgctggagaactacaagaacctggtgagcctgggctaccagctgaccaagcccgacgtgatcctgaggctggagaagggcgaggagccctgggtggtggagaggggcatccaccaggagacccaccccgacagcgagaccgccggatctggctccggcagcggccccaagaaaaagagaaaagtctaagctgccttctgcggggcttgccttctggccatgcccttcttctctcccttgcacctgtacctcttggtctttgaataaagcctgagtaggaaggctagcaaaaaaaaaaaaaaaaaaaaaaaaaaaaaaaaaaaaaaaaaaaaaaaaaaaaaaaaaaaaaaaaaaaaaaaaaaaaaaaa

SEQ ID NO: 16250 - RNA, 9485 nt, synthetic construct
  source 1..9485: mol_type = other RNA
aggaaataagagagaaaagaagagtaagaagaaatataagagccaccatggcccctaagaagaagcgtaaagtgagccggatggaacgcctcgtctacgaggtgcggcagaagtgcagaaacatcgaggacatctgcatctcctgcggatctctgaacgtgaccctggagcacccactgttcatcggcggcatgtgccagaactgtaaaaactgttttctggagtgtgcctatcaatacgacgatgacggctaccagagctactgcaccatctgttgcggcggaagagaggtgctgatgtgtggaaataacaactgctgccggtgcttctgcgtggaatgcgtggacctgctggtgggccccggcgccgcccaggccgctattaaggaagatccttggaactgctacatgtgcggccacaagggcacatacggcctgctgagacggagagaggactggcctagcagactgcagatgttcttcgccaataaccacgaccaggagttcgacccccctaaggtgtaccctcccgtccccgccgagaagagaaagcccatccgggtcctgagcctgttcgatggcatcgccaccggtctgctggtgctgaaggacctgggcatccaggtggataggtacattgcctccgaggtgtgcgaggactccatcaccgtgggaatggtgcgtcatcagggcaagatcatgtacgtgggcgacgtgcggagcgtgacacagaagcatatccaggagtggggccctttcgacctggtgatcggcggcagcccttgcaatgacctgagcatcgtgaacccagcccggaagggcctgtacgagggaaccggcagactgttcttcgagttttacagactgctgcacgacgcccggcctaaggaaggcgacgaccggcccttcttttggctgttcgagaatgtggtggccatgggagtcagcgacaagcgggatattagccggttcctggagagcaaccccgtgatgatcgatgccaaggaagtgagcgccgcccaccgggccagatacttctggggcaatctgcctggcatgaacagacccctggccagcaccgtgaacgacaagctggagctgcaggagtgcctggagcacggccggatcgccaagttcagcaaggtgagaaccatcaccacccgaagcaacagcatcaaacaaggcaaggaccagcactttcctgtgttcatgaacgagaaggaggacatcctgtggtgtaccgagatggagagagtgttcgggttcccagtccactacacagatgtcagcaacatgtctagactggccagacagagactgctgggaagaagctggtccgtccctgtgatcagacacctgttcgcccctctgaaggagtacttcgcctgcgtgagcagcggcaacagcaacgccaacagccggggccccagcttctctagcggcctggtgccactgtccctgagagggagccacatgggccccatggagatctacaaaaccgtgagcgcctggaagcggcagcctgtgcgcgtgctgagcctgtttcggaatatcgataaagtcctgaaaagcctgggattcctggagagcggctctggctccggcggtggcaccctgaagtacgtggaggatgtgacaaacgtggtcagacgggatgtggagaagtggggccccttcgatctggtgtacggcagcacccaacccctgggcagctcttgtgaccggtgccctggctggtacatgtttcagttccaccggatcctgcagtacgccctgccgagacaggagtcccagcggccattcttttggattttcatggacaacttgctgctgaccgaggatgaccaggaaactaccactcggttcctgcagaccgaagccgtgaccctgcaggacgtgagaggccgggactaccagaacgccatgcgggtgtggtccaacatccctggactgaaaagcaagcacgcacctctgacccctaaagaagaggagtacctgcaggcccaggtgcggagcagaagcaagctggacgcccctaaggtggatctgctggtgaagaattgcctcctgcccctgagagagtacttcaagtatttcagccagaatagtctgcccctgggaggcagcggcggcggcgccctggtgacatttgaggacgtcgccgtgcggttcacccaggaggaatgggctctgctggatccttctcagaaaatcctgtaccgggacgtgatgagagagacataccggaatctgacctccgtgggcatcaactgggaatgttgggaccttgaagcctgcttcagaagcctgggaagaaacctgagagtgcaggtggtgaagagaaagtgcgagctgaccaacagcggcccctgcgccgagggcggcccaagcagcggcgcccctcctcccagcggcggcagcccagccggctccccaacctctaccgaggagggcacctctgagtccgccacccccgagagcggccctggcacctccaccgagcccagcgagggcagcgcacccggcagccctgccggcagccccacctccacagaggagggaaccagcaccgagcccagcgaaggcagcgccccaggcaccagcaccgagcctagtgagcaggagattaaacggatcaacaagatcagaagaagacttgtgaaagacagcaacaccaagaaggccggcaagacaggccccatgaaaaccctgctggttagagtgatgacacccgatctgagagagcggctggaaaacctgagaaagaagcctgaaaatatcccccagcccatcagcaatacatctagagccaacctgaataagctgctgaccgattacaccgaaatgaagaaggcgatcctgcatgtgtactgggaagagttccagaaggaccctgtgggcctgatgagccgggtggcccagcctgccagcaagaagatcgatcagaacaagctgaaacctgagatggacgagaagggcaacctgaccaccgccggctttgcctgctctcagtgtggccagcccctgttcgtgtacaagctggagcaggtgtctgagaagggcaaggcttacaccaactacttcggacggtgcaatgtggccgagcacgaaaagctgatcctgctggcccagctgaagcccgagaaggatagcgacgaagccgtgacatatagcctgggaaagtttgggcagagggccctggatttctacagcattcatgtgaccaaggagtccacccaccccgtgaagcccctggcccagatcgccggaaacagatacgcctccggacctgtgggaaaggccctgagcgacgcatgtatgggcacaatcgcctccttcctgtctaagtaccaggacatcatcatcgaacaccagaaggtggtgaagggcaaccagaagagactggagagcctgcgggagctggccggcaaggaaaacctggaataccctagcgtgaccctgccacctcagcctcacaccaaggagggcgttgatgcctacaacgaagtgatcgcccgggtgcgaatgtgggtgaacctgaacctgtggcagaagctgaagctaagcagagatgatgccaagcctctgctgagactgaagggattcccttcctttcctctggtcgagagacaggccaacgaagtggactggtgggacatggtgtgtaacgtgaagaagctgatcaacgagaaaaaggaggatggcaaggtgttttggcagaatctggctggctacaagagacaggaagccctgagaccatacctgagcagcgaggaagatcggaagaagggaaagaaattcgctcggtaccagctgggcgacctgctgctgcacctggaaaagaagcacggcgaggactggggaaaggtgtacgacgaggcctgggagcggattgacaagaaagtggaaggcctgagcaagcacatcaagctggaagaggaacggagaagcgaggacgcccagagcaaggccgccctgaccgactggctgcgggctaaggccagcttcgtgatcgagggcctgaaggaggccgacaaggacgagttctgcagatgcgagctgaagctgcagaagtggtacggggacctgcggggaaagcccttcgccatcgaagccgagaacagcatcctggacatcagcggcttcagcaagcagtacaactgtgccttcatctggcagaaggacggcgtgaagaagctgaacctgtacctgatcatcaactacttcaagggcggcaagctgcggttcaagaagatcaaacctgaagccttcgaagccaacagattctacaccgtgatcaacaaaaagagcggcgagatcgtgcccatggaggtgaacttcaacttcgacgaccccaacctgatcatcctgcctctggcctttggcaagagacagggcagagaattcatctggaacgacctgctgtccctggaaaccggcagcctgaagctggccaacggaagagtgatcgagaagacactgtacaacagaagaacccggcaggatgagcctgccctgttcgtggccctgaccttcgagcggcgggaggtcctggactcctccaatatcaaaccaatgaacctgatcggcgtggcaagaggcgaaaacatccccgccgtgatcgccctgaccgaccccgagggctgcccactgagccggtttaaggatagcctgggaaacccaacccacatcctgagaatcggcgagagctataaggagaagcagcggaccatccaggccaagaaggaggtggagcagcggagagccggcggctacagccggaagtacgccagcaaagccaagaatctggcagacgatatggtgagaaacaccgctagagatctgctgtactacgccgtgacccaggatgccatgctgatcttcgccaacctgagccggggcttcggccggcagggcaagcggaccttcatggccgagagacagtacacacggatggaggactggctgaccgccaagctggcctacgagggcctgagcaagacctacctgtccaagacactggcccagtacacctccaagacatgcagcaactgtgggtttaccatcaccagcgccgactacgacagggtgctggagaagctgaagaagacagcaacaggctggatgaccacaattaacggcaaggagctgaaggtggagggccagattacctactacaacagatacaagagacagaacgtagtcaaggacctgtccgtcgagctggatagactgagcgaagaatctgtgaacaacgacatctcctcctggacaaagggcagaagcggagaagctctgagcctcctgaagaaaagattctcccatagacccgtgcaggagaagttcgtgtgcctgaactgcggcttcgagacacacgcagccgagcaagccgccctgaacatcgccagatcctggctgttcctgcggagccaggagtacaagaaataccagacaaacaagacaaccggcaacaccgataagagagccttcgtcgagacctggcagtccttttaccggaagaagcttaaggaggtgtggaaacctgccgtgcggtctggcggatctggcggaggctcccccaaggcccccgtgaccttcggcgacgtggccatctacttcagcaaggaggagtgggagtgcctgagccccaaccagaaggacctgtacgaggacgtgatgatggagaactaccagaacctggccagcatcggcttcagctgcaggaggcccaacgtgatcaccctgctggagaagggcgaggccccctggatggccgagcccctgaggaggaggcagggccccgacagcggcagcaagaagggcggcccaagcagcggcgcccctcctcccagcggcggcagcccagccggctccccaacctctaccgaggagggcacctctgagtccgccacccccgagagcggccctggcacctccaccgagcccagcgagggcagcgcacccggcagccctgccggcagccccacctccacagaggagggaaccagcaccgagcccagcgaaggcagcgccccaggcaccagcaccgagcctagtgagcaggagattaaacggatcaacaagatcagaagaagacttgtgaaagacagcaacaccaagaaggccggcaagacaggccccatgaaaaccctgctggttagagtgatgacacccgatctgagagagcggctggaaaacctgagaaagaagcctgaaaatatcccccagcccatcagcaatacatctagagccaacctgaataagctgctgaccgattacaccgaaatgaagaaggcgatcctgcatgtgtactgggaagagttccagaaggaccctgtgggcctgatgagccgggtggcccagcctgccagcaagaagatcgatcagaacaagctgaaacctgagatggacgagaagggcaacctgaccaccgccggctttgcctgctctcagtgtggccagcccctgttcgtgtacaagctggagcaggtgtctgagaagggcaaggcttacaccaactacttcggacggtgcaatgtggccgagcacgaaaagctgatcctgctggcccagctgaagcccgagaaggatagcgacgaagccgtgacatatagcctgggaaagtttgggcagagggccctggatttctacagcattcatgtgaccaaggagtccacccaccccgtgaagcccctggcccagatcgccggaaacagatacgcctccggacctgtgggaaaggccctgagcgacgcatgtatgggcacaatcgcctccttcctgtctaagtaccaggacatcatcatcgaacaccagaaggtggtgaagggcaaccagaagagactggagagcctgcgggagctggccggcaaggaaaacctggaataccctagcgtgaccctgccacctcagcctcacaccaaggagggcgttgatgcctacaacgaagtgatcgcccgggtgcgaatgtgggtgaacctgaacctgtggcagaagctgaagctaagcagagatgatgccaagcctctgctgagactgaagggattcccttcctttcctctggtcgagagacaggccaacgaagtggactggtgggacatggtgtgtaacgtgaagaagctgatcaacgagaaaaaggaggatggcaaggtgttttggcagaatctggctggctacaagagacaggaagccctgagaccatacctgagcagcgaggaagatcggaagaagggaaagaaattcgctcggtaccagctgggcgacctgctgctgcacctggaaaagaagcacggcgaggactggggaaaggtgtacgacgaggcctgggagcggattgacaagaaagtggaaggcctgagcaagcacatcaagctggaagaggaacggagaagcgaggacgcccagagcaaggccgccctgaccgactggctgcgggctaaggccagcttcgtgatcgagggcctgaaggaggccgacaaggacgagttctgcagatgcgagctgaagctgcagaagtggtacggggacctgcggggaaagcccttcgccatcgaagccgagaacagcatcctggacatcagcggcttcagcaagcagtacaactgtgccttcatctggcagaaggacggcgtgaagaagctgaacctgtacctgatcatcaactacttcaagggcggcaagctgcggttcaagaagatcaaacctgaagccttcgaagccaacagattctacaccgtgatcaacaaaaagagcggcgagatcgtgcccatggaggtgaacttcaacttcgacgaccccaacctgatcatcctgcctctggcctttggcaagagacagggcagagaattcatctggaacgacctgctgtccctggaaaccggcagcctgaagctggccaacggaagagtgatcgagaagacactgtacaacagaagaacccggcaggatgagcctgccctgttcgtggccctgaccttcgagcggcgggaggtcctggactcctccaatatcaaaccaatgaacctgatcggcgtggcaagaggcgaaaacatccccgccgtgatcgccctgaccgaccccgagggctgcccactgagccggtttaaggatagcctgggaaacccaacccacatcctgagaatcggcgagagctataaggagaagcagcggaccatccaggccaagaaggaggtggagcagcggagagccggcggctacagccggaagtacgccagcaaagccaagaatctggcagacgatatggtgagaaacaccgctagagatctgctgtactacgccgtgacccaggatgccatgctgatcttcgccaacctgagccggggcttcggccggcagggcaagcggaccttcatggccgagagacagtacacacggatggaggactggctgaccgccaagctggcctacgagggcctgagcaagacctacctgtccaagacactggcccagtacacctccaagacatgcagcaactgtgggtttaccatcaccagcgccgactacgacagggtgctggagaagctgaagaagacagcaacaggctggatgaccacaattaacggcaaggagctgaaggtggagggccagattacctactacaacagatacaagagacagaacgtagtcaaggacctgtccgtcgagctggatagactgagcgaagaatctgtgaacaacgacatctcctcctggacaaagggcagaagcggagaagctctgagcctcctgaagaaaagattctcccatagacccgtgcaggagaagttcgtgtgcctgaactgcggcttcgagacacacgcagccgagcaagccgccctgaacatcgccagatcctggctgttcctgcggagccaggagtacaagaaataccagacaaacaagacaaccggcaacaccgataagagagccttcgtcgagacctggcagtccttttaccggaagaagcttaaggaggtgtggaaacctgccgtgcggtctggcggatctggcggaggctcctcccaaggcccccgtgaccttcggcgacgtggccatctacttcagcaaggaggagtgggagtgcctgagccccaaccagaaggacctgtacgaggacgtgatgatggagaactaccagaacctggccagcatcggcttcagctgcaggaggcccaacgtgatcaccctgctggagaagggcgaggccccctggatggccgagcccctgaggaggaggcagggccccgacagcggcagcaagaagggatctggctccggcagcggccccaagaaaaagagaaaagtctaagctgccttctgcggggcttgccttctggccatgcccttcttctctcccttgcacctgtacctcttggtctttgaataaagcctgagtaggaaggctagcaaaaaaaaaaaaaaaaaaaaaaaaaaaaaaaaaaaaaaaaaaaaaaaaaaaaaaaaaaaaaaaaaaaaaaaaaaaaaaaa

SEQ ID NO: 16251 - RNA, 9485 nt, synthetic construct
  source 1..9485: mol_type = other RNA
aggaaataagagagaaaagaagagtaagaagaaatataagagccaccatggcccctaagaagaagcgtaaagtgagccggatggaacgcctcgtctacgaggtgcggcagaagtgcagaaacatcgaggacatctgcatctcctgcggatctctgaacgtgaccctggagcacccactgttcatcggcggcatgtgccagaactgtaaaaactgttttctggagtgtgcctatcaatacgacgatgacggctaccagagctactgcaccatctgttgcggcggaagagaggtgctgatgtgtggaaataacaactgctgccggtgcttctgcgtggaatgcgtggacctgctggtgggccccggcgccgcccaggccgctattaaggaagatccttggaactgctacatgtgcggccacaagggcacatacggcctgctgagacggagagaggactggcctagcagactgcagatgttcttcgccaataaccacgaccaggagttcgacccccctaaggtgtaccctcccgtccccgccgagaagagaaagcccatccgggtcctgagcctgttcgatggcatcgccaccggtctgctggtgctgaaggacctgggcatccaggtggataggtacattgcctccgaggtgtgcgaggactccatcaccgtgggaatggtgcgtcatcagggcaagatcatgtacgtgggcgacgtgcggagcgtgacacagaagcatatccaggagtggggccctttcgacctggtgatcggcggcagcccttgcaatgacctgagcatcgtgaacccagcccggaagggcctgtacgagggaaccggcagactgttcttcgagttttacagactgctgcacgacgcccggcctaaggaaggcgacgaccggcccttcttttggctgttcgagaatgtggtggccatgggagtcagcgacaagcgggatattagccggttcctggagagcaaccccgtgatgatcgatgccaaggaagtgagcgccgcccaccgggccagatacttctggggcaatctgcctggcatgaacagacccctggccagcaccgtgaacgacaagctggagctgcaggagtgcctggagcacggccggatcgccaagttcagcaaggtgagaaccatcaccacccgaagcaacagcatcaaacaaggcaaggaccagcactttcctgtgttcatgaacgagaaggaggacatcctgtggtgtaccgagatggagagagtgttcgggttcccagtccactacacagatgtcagcaacatgtctagactggccagacagagactgctgggaagaagctggtccgtccctgtgatcagacacctgttcgcccctctgaaggagtacttcgcctgcgtgagcagcggcaacagcaacgccaacagccggggccccagcttctctagcggcctggtgccactgtccctgagagggagccacatgggccccatggagatctacaaaaccgtgagcgcctggaagcggcagcctgtgcgcgtgctgagcctgtttcggaatatcgataaagtcctgaaaagcctgggattcctggagagcggctctggctccggcggtggcaccctgaagtacgtggaggatgtgacaaacgtggtcagacgggatgtggagaagtggggccccttcgatctggtgtacggcagcacccaacccctgggcagctcttgtgaccggtgccctggctggtacatgtttcagttccaccggatcctgcagtacgccctgccgagacaggagtcccagcggccattcttttggattttcatggacaacttgctgctgaccgaggatgaccaggaaactaccactcggttcctgcagaccgaagccgtgaccctgcaggacgtgagaggccgggactaccagaacgccatgcgggtgtggtccaacatccctggactgaaaagcaagcacgcacctctgacccctaaagaagaggagtacctgcaggcccaggtgcggagcagaagcaagctggacgcccctaaggtggatctgctggtgaagaattgcctcctgcccctgagagagtacttcaagtatttcagccagaatagtctgcccctgggaggcagcggcggcggcgccctggtgacatttgaggacgtcgccgtgcggttcacccaggaggaatgggctctgctggatccttctcagaaaatcctgtaccgggacgtgatgagagagacataccggaatctgacctccgtgggcatcaactgggaatgttgggaccttgaagcctgcttcagaagcctgggaagaaacctgagagtgcaggtggtgaagagaaagtgcgagctgaccaacagcggcccctgcgccgagggcggcccaagcagcggcgcccctcctcccagcggcggcagcccagccggctccccaacctctaccgaggagggcacctctgagtccgccacccccgagagcggccctggcacctccaccgagcccagcgagggcagcgcacccggcagccctgccggcagccccacctccacagaggagggaaccagcaccgagcccagcgaaggcagcgccccaggcaccagcaccgagcctagtgagcaggagattaaacggatcaacaagatcagaagaagacttgtgaaagacagcaacaccaagaaggccggcaagacaggccccatgaaaaccctgctggttagagtgatgacacccgatctgagagagcggctggaaaacctgagaaagaagcctgaaaatatcccccagcccatcagcaatacatctagagccaacctgaataagctgctgaccgattacaccgaaatgaagaaggcgatcctgcatgtgtactgggaagagttccagaaggaccctgtgggcctgatgagccgggtggcccagcctgccagcaagaagatcgatcagaacaagctgaaacctgagatggacgagaagggcaacctgaccaccgccggctttgcctgctctcagtgtggccagcccctgttcgtgtacaagctggagcaggtgtctgagaagggcaaggcttacaccaactacttcggacggtgcaatgtggccgagcacgaaaagctgatcctgctggcccagctgaagcccgagaaggatagcgacgaagccgtgacatatagcctgggaaagtttgggcagagggccctggatttctacagcattcatgtgaccaaggagtccacccaccccgtgaagcccctggcccagatcgccggaaacagatacgcctccggacctgtgggaaaggccctgagcgacgcatgtatgggcacaatcgcctccttcctgtctaagtaccaggacatcatcatcgaacaccagaaggtggtgaagggcaaccagaagagactggagagcctgcgggagctggccggcaaggaaaacctggaataccctagcgtgaccctgccacctcagcctcacaccaaggagggcgttgatgcctacaacgaagtgatcgcccgggtgcgaatgtgggtgaacctgaacctgtggcagaagctgaagctaagcagagatgatgccaagcctctgctgagactgaagggattcccttcctttcctctggtcgagagacaggccaacgaagtggactggtgggacatggtgtgtaacgtgaagaagctgatcaacgagaaaaaggaggatggcaaggtgttttggcagaatctggctggctacaagagacaggaagccctgagaccatacctgagcagcgaggaagatcggaagaagggaaagaaattcgctcggtaccagctgggcgacctgctgctgcacctggaaaagaagcacggcgaggactggggaaaggtgtacgacgaggcctgggagcggattgacaagaaagtggaaggcctgagcaagcacatcaagctggaagaggaacggagaagcgaggacgcccagagcaaggccgccctgaccgactggctgcgggctaaggccagcttcgtgatcgagggcctgaaggaggccgacaaggacgagttctgcagatgcgagctgaagctgcagaagtggtacggggacctgcggggaaagcccttcgccatcgaagccgagaacagcatcctggacatcagcggcttcagcaagcagtacaactgtgccttcatctggcagaaggacggcgtgaagaagctgaacctgtacctgatcatcaactacttcaagggcggcaagctgcggttcaagaagatcaaacctgaagccttcgaagccaacagattctacaccgtgatcaacaaaaagagcggcgagatcgtgcccatggaggtgaacttcaacttcgacgaccccaacctgatcatcctgcctctggcctttggcaagagacagggcagagaattcatctggaacgacctgctgtccctggaaaccggcagcctgaagctggccaacggaagagtgatcgagaagacactgtacaacagaagaacccggcaggatgagcctgccctgttcgtggccctgaccttcgagcggcgggaggtcctggactcctccaatatcaaaccaatgaacctgatcggcgtggcaagaggcgaaaacatccccgccgtgatcgccctgaccgaccccgagggctgcccactgagccggtttaaggatagcctgggaaacccaacccacatcctgagaatcggcgagagctataaggagaagcagcggaccatccaggccaagaaggaggtggagcagcggagagccggcggctacagccggaagtacgccagcaaagccaagaatctggcagacgatatggtgagaaacaccgctagagatctgctgtactacgccgtgacccaggatgccatgctgatcttcgccaacctgagccggggcttcggccggcagggcaagcggaccttcatggccgagagacagtacacacggatggaggactggctgaccgccaagctggcctacgagggcctgagcaagacctacctgtccaagacactggcccagtacacctccaagacatgcagcaactgtgggtttaccatcaccagcgccgactacgacagggtgctggagaagctgaagaagacagcaacaggctggatgaccacaattaacggcaaggagctgaaggtggagggccagattacctactacaacagatacaagagacagaacgtagtcaaggacctgtccgtcgagctggatagactgagcgaagaatctgtgaacaacgacatctcctcctggacaaagggcagaagcggagaagctctgagcctcctgaagaaaagattctcccatagacccgtgcaggagaagttcgtgtgcctgaactgcggcttcgagacacacgcagccgagcaagccgccctgaacatcgccagatcctggctgttcctgcggagccaggagtacaagaaataccagacaaacaagacaaccggcaacaccgataagagagccttcgtcgagacctggcagtccttttaccggaagaagcttaaggaggtgtggaaacctgccgtgcggtctggcggatctggcggaggctccagcctggagagcgagctgttcagggacgtggccatcgtgttcagccaggaggagtggcagtgcctggcccccgcccagagggacctgtacagggacgtgatgctggagacctacagcaacctggtgagcctgggcctggccatcagcaagcccgacgtgatcagcttcctggagcagggcaaggagccctggatggtggagagggtggtgagcggcggcctgtgccccgtgctgaagtacaggggcggcccaagcagcggcgcccctcctcccagcggcggcagcccagccggctccccaacctctaccgaggagggcacctctgagtccgccacccccgagagcggccctggcacctccaccgagcccagcgagggcagcgcacccggcagccctgccggcagccccacctccacagaggagggaaccagcaccgagcccagcgaaggcagcgccccaggcaccagcaccgagcctagtgagcaggagattaaacggatcaacaagatcagaagaagacttgtgaaagacagcaacaccaagaaggccggcaagacaggccccatgaaaaccctgctggttagagtgatgacacccgatctgagagagcggctggaaaacctgagaaagaagcctgaaaatatcccccagcccatcagcaatacatctagagccaacctgaataagctgctgaccgattacaccgaaatgaagaaggcgatcctgcatgtgtactgggaagagttccagaaggaccctgtgggcctgatgagccgggtggcccagcctgccagcaagaagatcgatcagaacaagctgaaacctgagatggacgagaagggcaacctgaccaccgccggctttgcctgctctcagtgtggccagcccctgttcgtgtacaagctggagcaggtgtctgagaagggcaaggcttacaccaactacttcggacggtgcaatgtggccgagcacgaaaagctgatcctgctggcccagctgaagcccgagaaggatagcgacgaagccgtgacatatagcctgggaaagtttgggcagagggccctggatttctacagcattcatgtgaccaaggagtccacccaccccgtgaagcccctggcccagatcgccggaaacagatacgcctccggacctgtgggaaaggccctgagcgacgcatgtatgggcacaatcgcctccttcctgtctaagtaccaggacatcatcatcgaacaccagaaggtggtgaagggcaaccagaagagactggagagcctgcgggagctggccggcaaggaaaacctggaataccctagcgtgaccctgccacctcagcctcacaccaaggagggcgttgatgcctacaacgaagtgatcgcccgggtgcgaatgtgggtgaacctgaacctgtggcagaagctgaagctaagcagagatgatgccaagcctctgctgagactgaagggattcccttcctttcctctggtcgagagacaggccaacgaagtggactggtgggacatggtgtgtaacgtgaagaagctgatcaacgagaaaaaggaggatggcaaggtgttttggcagaatctggctggctacaagagacaggaagccctgagaccatacctgagcagcgaggaagatcggaagaagggaaagaaattcgctcggtaccagctgggcgacctgctgctgcacctggaaaagaagcacggcgaggactggggaaaggtgtacgacgaggcctgggagcggattgacaagaaagtggaaggcctgagcaagcacatcaagctggaagaggaacggagaagcgaggacgcccagagcaaggccgccctgaccgactggctgcgggctaaggccagcttcgtgatcgagggcctgaaggaggccgacaaggacgagttctgcagatgcgagctgaagctgcagaagtggtacggggacctgcggggaaagcccttcgccatcgaagccgagaacagcatcctggacatcagcggcttcagcaagcagtacaactgtgccttcatctggcagaaggacggcgtgaagaagctgaacctgtacctgatcatcaactacttcaagggcggcaagctgcggttcaagaagatcaaacctgaagccttcgaagccaacagattctacaccgtgatcaacaaaaagagcggcgagatcgtgcccatggaggtgaacttcaacttcgacgaccccaacctgatcatcctgcctctggcctttggcaagagacagggcagagaattcatctggaacgacctgctgtccctggaaaccggcagcctgaagctggccaacggaagagtgatcgagaagacactgtacaacagaagaacccggcaggatgagcctgccctgttcgtggccctgaccttcgagcggcgggaggtcctggactcctccaatatcaaaccaatgaacctgatcggcgtggcaagaggcgaaaacatccccgccgtgatcgccctgaccgaccccgagggctgcccactgagccggtttaaggatagcctgggaaacccaacccacatcctgagaatcggcgagagctataaggagaagcagcggaccatccaggccaagaaggaggtggagcagcggagagccggcggctacagccggaagtacgccagcaaagccaagaatctggcagacgatatggtgagaaacaccgctagagatctgctgtactacgccgtgacccaggatgccatgctgatcttcgccaacctgagccggggcttcggccggcagggcaagcggaccttcatggccgagagacagtacacacggatggaggactggctgaccgccaagctggcctacgagggcctgagcaagacctacctgtccaagacactggcccagtacacctccaagacatgcagcaactgtgggtttaccatcaccagcgccgactacgacagggtgctggagaagctgaagaagacagcaacaggctggatgaccacaattaacggcaaggagctgaaggtggagggccagattacctactacaacagatacaagagacagaacgtagtcaaggacctgtccgtcgagctggatagactgagcgaagaatctgtgaacaacgacatctcctcctggacaaagggcagaagcggagaagctctgagcctcctgaagaaaagattctcccatagacccgtgcaggagaagttcgtgtgcctgaactgcggcttcgagacacacgcagccgagcaagccgccctgaacatcgccagatcctggctgttcctgcggagccaggagtacaagaaataccagacaaacaagacaaccggcaacaccgataagagagccttcgtcgagacctggcagtccttttaccggaagaagcttaaggaggtgtggaaacctgccgtgcggtctggcggatctggcggaggctcctagcctggagagcgagctgttcagggacgtggccatcgtgttcagccaggaggagtggcagtgcctggcccccgcccagagggacctgtacagggacgtgatgctggagacctacagcaacctggtgagcctgggcctggccatcagcaagcccgacgtgatcagcttcctggagcagggcaaggagccctggatggtggagagggtggtgagcggcggcctgtgccccgtgctgaagtacaggggatctggctccggcagcggccccaagaaaaagagaaaagtctaagctgccttctgcggggcttgccttctggccatgcccttcttctctcccttgcacctgtacctcttggtctttgaataaagcctgagtaggaaggctagcaaaaaaaaaaaaaaaaaaaaaaaaaaaaaaaaaaaaaaaaaaaaaaaaaaaaaaaaaaaaaaaaaaaaaaaaaaaaaaaa

SEQ ID NO: 16252 - RNA, 9485 nt, synthetic construct
  source 1..9485: mol_type = other RNA
aggaaataagagagaaaagaagagtaagaagaaatataagagccaccatggcccctaagaagaagcgtaaagtgagccggatggaacgcctcgtctacgaggtgcggcagaagtgcagaaacatcgaggacatctgcatctcctgcggatctctgaacgtgaccctggagcacccactgttcatcggcggcatgtgccagaactgtaaaaactgttttctggagtgtgcctatcaatacgacgatgacggctaccagagctactgcaccatctgttgcggcggaagagaggtgctgatgtgtggaaataacaactgctgccggtgcttctgcgtggaatgcgtggacctgctggtgggccccggcgccgcccaggccgctattaaggaagatccttggaactgctacatgtgcggccacaagggcacatacggcctgctgagacggagagaggactggcctagcagactgcagatgttcttcgccaataaccacgaccaggagttcgacccccctaaggtgtaccctcccgtccccgccgagaagagaaagcccatccgggtcctgagcctgttcgatggcatcgccaccggtctgctggtgctgaaggacctgggcatccaggtggataggtacattgcctccgaggtgtgcgaggactccatcaccgtgggaatggtgcgtcatcagggcaagatcatgtacgtgggcgacgtgcggagcgtgacacagaagcatatccaggagtggggccctttcgacctggtgatcggcggcagcccttgcaatgacctgagcatcgtgaacccagcccggaagggcctgtacgagggaaccggcagactgttcttcgagttttacagactgctgcacgacgcccggcctaaggaaggcgacgaccggcccttcttttggctgttcgagaatgtggtggccatgggagtcagcgacaagcgggatattagccggttcctggagagcaaccccgtgatgatcgatgccaaggaagtgagcgccgcccaccgggccagatacttctggggcaatctgcctggcatgaacagacccctggccagcaccgtgaacgacaagctggagctgcaggagtgcctggagcacggccggatcgccaagttcagcaaggtgagaaccatcaccacccgaagcaacagcatcaaacaaggcaaggaccagcactttcctgtgttcatgaacgagaaggaggacatcctgtggtgtaccgagatggagagagtgttcgggttcccagtccactacacagatgtcagcaacatgtctagactggccagacagagactgctgggaagaagctggtccgtccctgtgatcagacacctgttcgcccctctgaaggagtacttcgcctgcgtgagcagcggcaacagcaacgccaacagccggggccccagcttctctagcggcctggtgccactgtccctgagagggagccacatgggccccatggagatctacaaaaccgtgagcgcctggaagcggcagcctgtgcgcgtgctgagcctgtttcggaatatcgataaagtcctgaaaagcctgggattcctggagagcggctctggctccggcggtggcaccctgaagtacgtggaggatgtgacaaacgtggtcagacgggatgtggagaagtggggccccttcgatctggtgtacggcagcacccaacccctgggcagctcttgtgaccggtgccctggctggtacatgtttcagttccaccggatcctgcagtacgccctgccgagacaggagtcccagcggccattcttttggattttcatggacaacttgctgctgaccgaggatgaccaggaaactaccactcggttcctgcagaccgaagccgtgaccctgcaggacgtgagaggccgggactaccagaacgccatgcgggtgtggtccaacatccctggactgaaaagcaagcacgcacctctgacccctaaagaagaggagtacctgcaggcccaggtgcggagcagaagcaagctggacgcccctaaggtggatctgctggtgaagaattgcctcctgcccctgagagagtacttcaagtatttcagccagaatagtctgcccctgggaggcagcggcggcggcgccctggtgacatttgaggacgtcgccgtgcggttcacccaggaggaatgggctctgctggatccttctcagaaaatcctgtaccgggacgtgatgagagagacataccggaatctgacctccgtgggcatcaactgggaatgttgggaccttgaagcctgcttcagaagcctgggaagaaacctgagagtgcaggtggtgaagagaaagtgcgagctgaccaacagcggcccctgcgccgagggcggcccaagcagcggcgcccctcctcccagcggcggcagcccagccggctccccaacctctaccgaggagggcacctctgagtccgccacccccgagagcggccctggcacctccaccgagcccagcgagggcagcgcacccggcagccctgccggcagccccacctccacagaggagggaaccagcaccgagcccagcgaaggcagcgccccaggcaccagcaccgagcctagtgagcaggagattaaacggatcaacaagatcagaagaagacttgtgaaagacagcaacaccaagaaggccggcaagacaggccccatgaaaaccctgctggttagagtgatgacacccgatctgagagagcggctggaaaacctgagaaagaagcctgaaaatatcccccagcccatcagcaatacatctagagccaacctgaataagctgctgaccgattacaccgaaatgaagaaggcgatcctgcatgtgtactgggaagagttccagaaggaccctgtgggcctgatgagccgggtggcccagcctgccagcaagaagatcgatcagaacaagctgaaacctgagatggacgagaagggcaacctgaccaccgccggctttgcctgctctcagtgtggccagcccctgttcgtgtacaagctggagcaggtgtctgagaagggcaaggcttacaccaactacttcggacggtgcaatgtggccgagcacgaaaagctgatcctgctggcccagctgaagcccgagaaggatagcgacgaagccgtgacatatagcctgggaaagtttgggcagagggccctggatttctacagcattcatgtgaccaaggagtccacccaccccgtgaagcccctggcccagatcgccggaaacagatacgcctccggacctgtgggaaaggccctgagcgacgcatgtatgggcacaatcgcctccttcctgtctaagtaccaggacatcatcatcgaacaccagaaggtggtgaagggcaaccagaagagactggagagcctgcgggagctggccggcaaggaaaacctggaataccctagcgtgaccctgccacctcagcctcacaccaaggagggcgttgatgcctacaacgaagtgatcgcccgggtgcgaatgtgggtgaacctgaacctgtggcagaagctgaagctaagcagagatgatgccaagcctctgctgagactgaagggattcccttcctttcctctggtcgagagacaggccaacgaagtggactggtgggacatggtgtgtaacgtgaagaagctgatcaacgagaaaaaggaggatggcaaggtgttttggcagaatctggctggctacaagagacaggaagccctgagaccatacctgagcagcgaggaagatcggaagaagggaaagaaattcgctcggtaccagctgggcgacctgctgctgcacctggaaaagaagcacggcgaggactggggaaaggtgtacgacgaggcctgggagcggattgacaagaaagtggaaggcctgagcaagcacatcaagctggaagaggaacggagaagcgaggacgcccagagcaaggccgccctgaccgactggctgcgggctaaggccagcttcgtgatcgagggcctgaaggaggccgacaaggacgagttctgcagatgcgagctgaagctgcagaagtggtacggggacctgcggggaaagcccttcgccatcgaagccgagaacagcatcctggacatcagcggcttcagcaagcagtacaactgtgccttcatctggcagaaggacggcgtgaagaagctgaacctgtacctgatcatcaactacttcaagggcggcaagctgcggttcaagaagatcaaacctgaagccttcgaagccaacagattctacaccgtgatcaacaaaaagagcggcgagatcgtgcccatggaggtgaacttcaacttcgacgaccccaacctgatcatcctgcctctggcctttggcaagagacagggcagagaattcatctggaacgacctgctgtccctggaaaccggcagcctgaagctggccaacggaagagtgatcgagaagacactgtacaacagaagaacccggcaggatgagcctgccctgttcgtggccctgaccttcgagcggcgggaggtcctggactcctccaatatcaaaccaatgaacctgatcggcgtggcaagaggcgaaaacatccccgccgtgatcgccctgaccgaccccgagggctgcccactgagccggtttaaggatagcctgggaaacccaacccacatcctgagaatcggcgagagctataaggagaagcagcggaccatccaggccaagaaggaggtggagcagcggagagccggcggctacagccggaagtacgccagcaaagccaagaatctggcagacgatatggtgagaaacaccgctagagatctgctgtactacgccgtgacccaggatgccatgctgatcttcgccaacctgagccggggcttcggccggcagggcaagcggaccttcatggccgagagacagtacacacggatggaggactggctgaccgccaagctggcctacgagggcctgagcaagacctacctgtccaagacactggcccagtacacctccaagacatgcagcaactgtgggtttaccatcaccagcgccgactacgacagggtgctggagaagctgaagaagacagcaacaggctggatgaccacaattaacggcaaggagctgaaggtggagggccagattacctactacaacagatacaagagacagaacgtagtcaaggacctgtccgtcgagctggatagactgagcgaagaatctgtgaacaacgacatctcctcctggacaaagggcagaagcggagaagctctgagcctcctgaagaaaagattctcccatagacccgtgcaggagaagttcgtgtgcctgaactgcggcttcgagacacacgcagccgagcaagccgccctgaacatcgccagatcctggctgttcctgcggagccaggagtacaagaaataccagacaaacaagacaaccggcaacaccgataagagagccttcgtcgagacctggcagtccttttaccggaagaagcttaaggaggtgtggaaacctgccgtgcggtctggcggatctggcggaggctccatgagccagggcagcgtgaccttcagggacgtggccatcgacttcagccaggaggagtggaagtggctgcagcccgcccagagggacctgtacaggtgcgtgatgctggagaactacggccacctggtgagcctgggcctgagcatcagcaagcccgacgtggtgagcctgctggagcagggcaaggagccctggctgggcaagagggacgtgaagagggacctgttccccgtgctgaaggagggcggcccaagcagcggcgcccctcctcccagcggcggcagcccagccggctccccaacctctaccgaggagggcacctctgagtccgccacccccgagagcggccctggcacctccaccgagcccagcgagggcagcgcacccggcagccctgccggcagccccacctccacagaggagggaaccagcaccgagcccagcgaaggcagcgccccaggcaccagcaccgagcctagtgagcaggagattaaacggatcaacaagatcagaagaagacttgtgaaagacagcaacaccaagaaggccggcaagacaggccccatgaaaaccctgctggttagagtgatgacacccgatctgagagagcggctggaaaacctgagaaagaagcctgaaaatatcccccagcccatcagcaatacatctagagccaacctgaataagctgctgaccgattacaccgaaatgaagaaggcgatcctgcatgtgtactgggaagagttccagaaggaccctgtgggcctgatgagccgggtggcccagcctgccagcaagaagatcgatcagaacaagctgaaacctgagatggacgagaagggcaacctgaccaccgccggctttgcctgctctcagtgtggccagcccctgttcgtgtacaagctggagcaggtgtctgagaagggcaaggcttacaccaactacttcggacggtgcaatgtggccgagcacgaaaagctgatcctgctggcccagctgaagcccgagaaggatagcgacgaagccgtgacatatagcctgggaaagtttgggcagagggccctggatttctacagcattcatgtgaccaaggagtccacccaccccgtgaagcccctggcccagatcgccggaaacagatacgcctccggacctgtgggaaaggccctgagcgacgcatgtatgggcacaatcgcctccttcctgtctaagtaccaggacatcatcatcgaacaccagaaggtggtgaagggcaaccagaagagactggagagcctgcgggagctggccggcaaggaaaacctggaataccctagcgtgaccctgccacctcagcctcacaccaaggagggcgttgatgcctacaacgaagtgatcgcccgggtgcgaatgtgggtgaacctgaacctgtggcagaagctgaagctaagcagagatgatgccaagcctctgctgagactgaagggattcccttcctttcctctggtcgagagacaggccaacgaagtggactggtgggacatggtgtgtaacgtgaagaagctgatcaacgagaaaaaggaggatggcaaggtgttttggcagaatctggctggctacaagagacaggaagccctgagaccatacctgagcagcgaggaagatcggaagaagggaaagaaattcgctcggtaccagctgggcgacctgctgctgcacctggaaaagaagcacggcgaggactggggaaaggtgtacgacgaggcctgggagcggattgacaagaaagtggaaggcctgagcaagcacatcaagctggaagaggaacggagaagcgaggacgcccagagcaaggccgccctgaccgactggctgcgggctaaggccagcttcgtgatcgagggcctgaaggaggccgacaaggacgagttctgcagatgcgagctgaagctgcagaagtggtacggggacctgcggggaaagcccttcgccatcgaagccgagaacagcatcctggacatcagcggcttcagcaagcagtacaactgtgccttcatctggcagaaggacggcgtgaagaagctgaacctgtacctgatcatcaactacttcaagggcggcaagctgcggttcaagaagatcaaacctgaagccttcgaagccaacagattctacaccgtgatcaacaaaaagagcggcgagatcgtgcccatggaggtgaacttcaacttcgacgaccccaacctgatcatcctgcctctggcctttggcaagagacagggcagagaattcatctggaacgacctgctgtccctggaaaccggcagcctgaagctggccaacggaagagtgatcgagaagacactgtacaacagaagaacccggcaggatgagcctgccctgttcgtggccctgaccttcgagcggcgggaggtcctggactcctccaatatcaaaccaatgaacctgatcggcgtggcaagaggcgaaaacatccccgccgtgatcgccctgaccgaccccgagggctgcccactgagccggtttaaggatagcctgggaaacccaacccacatcctgagaatcggcgagagctataaggagaagcagcggaccatccaggccaagaaggaggtggagcagcggagagccggcggctacagccggaagtacgccagcaaagccaagaatctggcagacgatatggtgagaaacaccgctagagatctgctgtactacgccgtgacccaggatgccatgctgatcttcgccaacctgagccggggcttcggccggcagggcaagcggaccttcatggccgagagacagtacacacggatggaggactggctgaccgccaagctggcctacgagggcctgagcaagacctacctgtccaagacactggcccagtacacctccaagacatgcagcaactgtgggtttaccatcaccagcgccgactacgacagggtgctggagaagctgaagaagacagcaacaggctggatgaccacaattaacggcaaggagctgaaggtggagggccagattacctactacaacagatacaagagacagaacgtagtcaaggacctgtccgtcgagctggatagactgagcgaagaatctgtgaacaacgacatctcctcctggacaaagggcagaagcggagaagctctgagcctcctgaagaaaagattctcccatagacccgtgcaggagaagttcgtgtgcctgaactgcggcttcgagacacacgcagccgagcaagccgccctgaacatcgccagatcctggctgttcctgcggagccaggagtacaagaaataccagacaaacaagacaaccggcaacaccgataagagagccttcgtcgagacctggcagtccttttaccggaagaagcttaaggaggtgtggaaacctgccgtgcggtctggcggatctggcggaggctcctatgagccagggcagcgtgaccttcagggacgtggccatcgacttcagccaggaggagtggaagtggctgcagcccgcccagagggacctgtacaggtgcgtgatgctggagaactacggccacctggtgagcctgggcctgagcatcagcaagcccgacgtggtgagcctgctggagcagggcaaggagccctggctgggcaagagggacgtgaagagggacctgttccccgtgctgaaggagggatctggctccggcagcggccccaagaaaaagagaaaagtctaagctgccttctgcggggcttgccttctggccatgcccttcttctctcccttgcacctgtacctcttggtctttgaataaagcctgagtaggaaggctagcaaaaaaaaaaaaaaaaaaaaaaaaaaaaaaaaaaaaaaaaaaaaaaaaaaaaaaaaaaaaaaaaaaaaaaaaaaaaaaaa

SEQ ID NO: 16253 - RNA, 9485 nt, synthetic construct
  source 1..9485: mol_type = other RNA
aggaaataagagagaaaagaagagtaagaagaaatataagagccaccatggcccctaagaagaagcgtaaagtgagccggatggaacgcctcgtctacgaggtgcggcagaagtgcagaaacatcgaggacatctgcatctcctgcggatctctgaacgtgaccctggagcacccactgttcatcggcggcatgtgccagaactgtaaaaactgttttctggagtgtgcctatcaatacgacgatgacggctaccagagctactgcaccatctgttgcggcggaagagaggtgctgatgtgtggaaataacaactgctgccggtgcttctgcgtggaatgcgtggacctgctggtgggccccggcgccgcccaggccgctattaaggaagatccttggaactgctacatgtgcggccacaagggcacatacggcctgctgagacggagagaggactggcctagcagactgcagatgttcttcgccaataaccacgaccaggagttcgacccccctaaggtgtaccctcccgtccccgccgagaagagaaagcccatccgggtcctgagcctgttcgatggcatcgccaccggtctgctggtgctgaaggacctgggcatccaggtggataggtacattgcctccgaggtgtgcgaggactccatcaccgtgggaatggtgcgtcatcagggcaagatcatgtacgtgggcgacgtgcggagcgtgacacagaagcatatccaggagtggggccctttcgacctggtgatcggcggcagcccttgcaatgacctgagcatcgtgaacccagcccggaagggcctgtacgagggaaccggcagactgttcttcgagttttacagactgctgcacgacgcccggcctaaggaaggcgacgaccggcccttcttttggctgttcgagaatgtggtggccatgggagtcagcgacaagcgggatattagccggttcctggagagcaaccccgtgatgatcgatgccaaggaagtgagcgccgcccaccgggccagatacttctggggcaatctgcctggcatgaacagacccctggccagcaccgtgaacgacaagctggagctgcaggagtgcctggagcacggccggatcgccaagttcagcaaggtgagaaccatcaccacccgaagcaacagcatcaaacaaggcaaggaccagcactttcctgtgttcatgaacgagaaggaggacatcctgtggtgtaccgagatggagagagtgttcgggttcccagtccactacacagatgtcagcaacatgtctagactggccagacagagactgctgggaagaagctggtccgtccctgtgatcagacacctgttcgcccctctgaaggagtacttcgcctgcgtgagcagcggcaacagcaacgccaacagccggggccccagcttctctagcggcctggtgccactgtccctgagagggagccacatgggccccatggagatctacaaaaccgtgagcgcctggaagcggcagcctgtgcgcgtgctgagcctgtttcggaatatcgataaagtcctgaaaagcctgggattcctggagagcggctctggctccggcggtggcaccctgaagtacgtggaggatgtgacaaacgtggtcagacgggatgtggagaagtggggccccttcgatctggtgtacggcagcacccaacccctgggcagctcttgtgaccggtgccctggctggtacatgtttcagttccaccggatcctgcagtacgccctgccgagacaggagtcccagcggccattcttttggattttcatggacaacttgctgctgaccgaggatgaccaggaaactaccactcggttcctgcagaccgaagccgtgaccctgcaggacgtgagaggccgggactaccagaacgccatgcgggtgtggtccaacatccctggactgaaaagcaagcacgcacctctgacccctaaagaagaggagtacctgcaggcccaggtgcggagcagaagcaagctggacgcccctaaggtggatctgctggtgaagaattgcctcctgcccctgagagagtacttcaagtatttcagccagaatagtctgcccctgggaggcagcggcggcggcgccctggtgacatttgaggacgtcgccgtgcggttcacccaggaggaatgggctctgctggatccttctcagaaaatcctgtaccgggacgtgatgagagagacataccggaatctgacctccgtgggcatcaactgggaatgttgggaccttgaagcctgcttcagaagcctgggaagaaacctgagagtgcaggtggtgaagagaaagtgcgagctgaccaacagcggcccctgcgccgagggcggcccaagcagcggcgcccctcctcccagcggcggcagcccagccggctccccaacctctaccgaggagggcacctctgagtccgccacccccgagagcggccctggcacctccaccgagcccagcgagggcagcgcacccggcagccctgccggcagccccacctccacagaggagggaaccagcaccgagcccagcgaaggcagcgccccaggcaccagcaccgagcctagtgagcaggagattaaacggatcaacaagatcagaagaagacttgtgaaagacagcaacaccaagaaggccggcaagacaggccccatgaaaaccctgctggttagagtgatgacacccgatctgagagagcggctggaaaacctgagaaagaagcctgaaaatatcccccagcccatcagcaatacatctagagccaacctgaataagctgctgaccgattacaccgaaatgaagaaggcgatcctgcatgtgtactgggaagagttccagaaggaccctgtgggcctgatgagccgggtggcccagcctgccagcaagaagatcgatcagaacaagctgaaacctgagatggacgagaagggcaacctgaccaccgccggctttgcctgctctcagtgtggccagcccctgttcgtgtacaagctggagcaggtgtctgagaagggcaaggcttacaccaactacttcggacggtgcaatgtggccgagcacgaaaagctgatcctgctggcccagctgaagcccgagaaggatagcgacgaagccgtgacatatagcctgggaaagtttgggcagagggccctggatttctacagcattcatgtgaccaaggagtccacccaccccgtgaagcccctggcccagatcgccggaaacagatacgcctccggacctgtgggaaaggccctgagcgacgcatgtatgggcacaatcgcctccttcctgtctaagtaccaggacatcatcatcgaacaccagaaggtggtgaagggcaaccagaagagactggagagcctgcgggagctggccggcaaggaaaacctggaataccctagcgtgaccctgccacctcagcctcacaccaaggagggcgttgatgcctacaacgaagtgatcgcccgggtgcgaatgtgggtgaacctgaacctgtggcagaagctgaagctaagcagagatgatgccaagcctctgctgagactgaagggattcccttcctttcctctggtcgagagacaggccaacgaagtggactggtgggacatggtgtgtaacgtgaagaagctgatcaacgagaaaaaggaggatggcaaggtgttttggcagaatctggctggctacaagagacaggaagccctgagaccatacctgagcagcgaggaagatcggaagaagggaaagaaattcgctcggtaccagctgggcgacctgctgctgcacctggaaaagaagcacggcgaggactggggaaaggtgtacgacgaggcctgggagcggattgacaagaaagtggaaggcctgagcaagcacatcaagctggaagaggaacggagaagcgaggacgcccagagcaaggccgccctgaccgactggctgcgggctaaggccagcttcgtgatcgagggcctgaaggaggccgacaaggacgagttctgcagatgcgagctgaagctgcagaagtggtacggggacctgcggggaaagcccttcgccatcgaagccgagaacagcatcctggacatcagcggcttcagcaagcagtacaactgtgccttcatctggcagaaggacggcgtgaagaagctgaacctgtacctgatcatcaactacttcaagggcggcaagctgcggttcaagaagatcaaacctgaagccttcgaagccaacagattctacaccgtgatcaacaaaaagagcggcgagatcgtgcccatggaggtgaacttcaacttcgacgaccccaacctgatcatcctgcctctggcctttggcaagagacagggcagagaattcatctggaacgacctgctgtccctggaaaccggcagcctgaagctggccaacggaagagtgatcgagaagacactgtacaacagaagaacccggcaggatgagcctgccctgttcgtggccctgaccttcgagcggcgggaggtcctggactcctccaatatcaaaccaatgaacctgatcggcgtggcaagaggcgaaaacatccccgccgtgatcgccctgaccgaccccgagggctgcccactgagccggtttaaggatagcctgggaaacccaacccacatcctgagaatcggcgagagctataaggagaagcagcggaccatccaggccaagaaggaggtggagcagcggagagccggcggctacagccggaagtacgccagcaaagccaagaatctggcagacgatatggtgagaaacaccgctagagatctgctgtactacgccgtgacccaggatgccatgctgatcttcgccaacctgagccggggcttcggccggcagggcaagcggaccttcatggccgagagacagtacacacggatggaggactggctgaccgccaagctggcctacgagggcctgagcaagacctacctgtccaagacactggcccagtacacctccaagacatgcagcaactgtgggtttaccatcaccagcgccgactacgacagggtgctggagaagctgaagaagacagcaacaggctggatgaccacaattaacggcaaggagctgaaggtggagggccagattacctactacaacagatacaagagacagaacgtagtcaaggacctgtccgtcgagctggatagactgagcgaagaatctgtgaacaacgacatctcctcctggacaaagggcagaagcggagaagctctgagcctcctgaagaaaagattctcccatagacccgtgcaggagaagttcgtgtgcctgaactgcggcttcgagacacacgcagccgagcaagccgccctgaacatcgccagatcctggctgttcctgcggagccaggagtacaagaaataccagacaaacaagacaaccggcaacaccgataagagagccttcgtcgagacctggcagtccttttaccggaagaagcttaaggaggtgtggaaacctgccgtgcggtctggcggatctggcggaggctcccagaaccccgtgaccttcagggacgtggccgtggacttcagcctggaggagtggaagtgcctgagccccgcccagagggccctgtacagggacgtgatgctggagaactacgagaacctggccagcgtgggccccaggctgcccttcagcaagccctacgtgatcagccagctggagaggggcgaggccccctggatgcccgaggaggaggtgcccagggaccactggcccgacctgttcaacggcggcccaagcagcggcgcccctcctcccagcggcggcagcccagccggctccccaacctctaccgaggagggcacctctgagtccgccacccccgagagcggccctggcacctccaccgagcccagcgagggcagcgcacccggcagccctgccggcagccccacctccacagaggagggaaccagcaccgagcccagcgaaggcagcgccccaggcaccagcaccgagcctagtgagcaggagattaaacggatcaacaagatcagaagaagacttgtgaaagacagcaacaccaagaaggccggcaagacaggccccatgaaaaccctgctggttagagtgatgacacccgatctgagagagcggctggaaaacctgagaaagaagcctgaaaatatcccccagcccatcagcaatacatctagagccaacctgaataagctgctgaccgattacaccgaaatgaagaaggcgatcctgcatgtgtactgggaagagttccagaaggaccctgtgggcctgatgagccgggtggcccagcctgccagcaagaagatcgatcagaacaagctgaaacctgagatggacgagaagggcaacctgaccaccgccggctttgcctgctctcagtgtggccagcccctgttcgtgtacaagctggagcaggtgtctgagaagggcaaggcttacaccaactacttcggacggtgcaatgtggccgagcacgaaaagctgatcctgctggcccagctgaagcccgagaaggatagcgacgaagccgtgacatatagcctgggaaagtttgggcagagggccctggatttctacagcattcatgtgaccaaggagtccacccaccccgtgaagcccctggcccagatcgccggaaacagatacgcctccggacctgtgggaaaggccctgagcgacgcatgtatgggcacaatcgcctccttcctgtctaagtaccaggacatcatcatcgaacaccagaaggtggtgaagggcaaccagaagagactggagagcctgcgggagctggccggcaaggaaaacctggaataccctagcgtgaccctgccacctcagcctcacaccaaggagggcgttgatgcctacaacgaagtgatcgcccgggtgcgaatgtgggtgaacctgaacctgtggcagaagctgaagctaagcagagatgatgccaagcctctgctgagactgaagggattcccttcctttcctctggtcgagagacaggccaacgaagtggactggtgggacatggtgtgtaacgtgaagaagctgatcaacgagaaaaaggaggatggcaaggtgttttggcagaatctggctggctacaagagacaggaagccctgagaccatacctgagcagcgaggaagatcggaagaagggaaagaaattcgctcggtaccagctgggcgacctgctgctgcacctggaaaagaagcacggcgaggactggggaaaggtgtacgacgaggcctgggagcggattgacaagaaagtggaaggcctgagcaagcacatcaagctggaagaggaacggagaagcgaggacgcccagagcaaggccgccctgaccgactggctgcgggctaaggccagcttcgtgatcgagggcctgaaggaggccgacaaggacgagttctgcagatgcgagctgaagctgcagaagtggtacggggacctgcggggaaagcccttcgccatcgaagccgagaacagcatcctggacatcagcggcttcagcaagcagtacaactgtgccttcatctggcagaaggacggcgtgaagaagctgaacctgtacctgatcatcaactacttcaagggcggcaagctgcggttcaagaagatcaaacctgaagccttcgaagccaacagattctacaccgtgatcaacaaaaagagcggcgagatcgtgcccatggaggtgaacttcaacttcgacgaccccaacctgatcatcctgcctctggcctttggcaagagacagggcagagaattcatctggaacgacctgctgtccctggaaaccggcagcctgaagctggccaacggaagagtgatcgagaagacactgtacaacagaagaacccggcaggatgagcctgccctgttcgtggccctgaccttcgagcggcgggaggtcctggactcctccaatatcaaaccaatgaacctgatcggcgtggcaagaggcgaaaacatccccgccgtgatcgccctgaccgaccccgagggctgcccactgagccggtttaaggatagcctgggaaacccaacccacatcctgagaatcggcgagagctataaggagaagcagcggaccatccaggccaagaaggaggtggagcagcggagagccggcggctacagccggaagtacgccagcaaagccaagaatctggcagacgatatggtgagaaacaccgctagagatctgctgtactacgccgtgacccaggatgccatgctgatcttcgccaacctgagccggggcttcggccggcagggcaagcggaccttcatggccgagagacagtacacacggatggaggactggctgaccgccaagctggcctacgagggcctgagcaagacctacctgtccaagacactggcccagtacacctccaagacatgcagcaactgtgggtttaccatcaccagcgccgactacgacagggtgctggagaagctgaagaagacagcaacaggctggatgaccacaattaacggcaaggagctgaaggtggagggccagattacctactacaacagatacaagagacagaacgtagtcaaggacctgtccgtcgagctggatagactgagcgaagaatctgtgaacaacgacatctcctcctggacaaagggcagaagcggagaagctctgagcctcctgaagaaaagattctcccatagacccgtgcaggagaagttcgtgtgcctgaactgcggcttcgagacacacgcagccgagcaagccgccctgaacatcgccagatcctggctgttcctgcggagccaggagtacaagaaataccagacaaacaagacaaccggcaacaccgataagagagccttcgtcgagacctggcagtccttttaccggaagaagcttaaggaggtgtggaaacctgccgtgcggtctggcggatctggcggaggctcctcagaaccccgtgaccttcagggacgtggccgtggacttcagcctggaggagtggaagtgcctgagccccgcccagagggccctgtacagggacgtgatgctggagaactacgagaacctggccagcgtgggccccaggctgcccttcagcaagccctacgtgatcagccagctggagaggggcgaggccccctggatgcccgaggaggaggtgcccagggaccactggcccgacctgttcaacggatctggctccggcagcggccccaagaaaaagagaaaagtctaagctgccttctgcggggcttgccttctggccatgcccttcttctctcccttgcacctgtacctcttggtctttgaataaagcctgagtaggaaggctagcaaaaaaaaaaaaaaaaaaaaaaaaaaaaaaaaaaaaaaaaaaaaaaaaaaaaaaaaaaaaaaaaaaaaaaaaaaaaaaaa

SEQ ID NO: 16254 - RNA, 9485 nt, synthetic construct
  source 1..9485: mol_type = other RNA
aggaaataagagagaaaagaagagtaagaagaaatataagagccaccatggcccctaagaagaagcgtaaagtgagccggatggaacgcctcgtctacgaggtgcggcagaagtgcagaaacatcgaggacatctgcatctcctgcggatctctgaacgtgaccctggagcacccactgttcatcggcggcatgtgccagaactgtaaaaactgttttctggagtgtgcctatcaatacgacgatgacggctaccagagctactgcaccatctgttgcggcggaagagaggtgctgatgtgtggaaataacaactgctgccggtgcttctgcgtggaatgcgtggacctgctggtgggccccggcgccgcccaggccgctattaaggaagatccttggaactgctacatgtgcggccacaagggcacatacggcctgctgagacggagagaggactggcctagcagactgcagatgttcttcgccaataaccacgaccaggagttcgacccccctaaggtgtaccctcccgtccccgccgagaagagaaagcccatccgggtcctgagcctgttcgatggcatcgccaccggtctgctggtgctgaaggacctgggcatccaggtggataggtacattgcctccgaggtgtgcgaggactccatcaccgtgggaatggtgcgtcatcagggcaagatcatgtacgtgggcgacgtgcggagcgtgacacagaagcatatccaggagtggggccctttcgacctggtgatcggcggcagcccttgcaatgacctgagcatcgtgaacccagcccggaagggcctgtacgagggaaccggcagactgttcttcgagttttacagactgctgcacgacgcccggcctaaggaaggcgacgaccggcccttcttttggctgttcgagaatgtggtggccatgggagtcagcgacaagcgggatattagccggttcctggagagcaaccccgtgatgatcgatgccaaggaagtgagcgccgcccaccgggccagatacttctggggcaatctgcctggcatgaacagacccctggccagcaccgtgaacgacaagctggagctgcaggagtgcctggagcacggccggatcgccaagttcagcaaggtgagaaccatcaccacccgaagcaacagcatcaaacaaggcaaggaccagcactttcctgtgttcatgaacgagaaggaggacatcctgtggtgtaccgagatggagagagtgttcgggttcccagtccactacacagatgtcagcaacatgtctagactggccagacagagactgctgggaagaagctggtccgtccctgtgatcagacacctgttcgcccctctgaaggagtacttcgcctgcgtgagcagcggcaacagcaacgccaacagccggggccccagcttctctagcggcctggtgccactgtccctgagagggagccacatgggccccatggagatctacaaaaccgtgagcgcctggaagcggcagcctgtgcgcgtgctgagcctgtttcggaatatcgataaagtcctgaaaagcctgggattcctggagagcggctctggctccggcggtggcaccctgaagtacgtggaggatgtgacaaacgtggtcagacgggatgtggagaagtggggccccttcgatctggtgtacggcagcacccaacccctgggcagctcttgtgaccggtgccctggctggtacatgtttcagttccaccggatcctgcagtacgccctgccgagacaggagtcccagcggccattcttttggattttcatggacaacttgctgctgaccgaggatgaccaggaaactaccactcggttcctgcagaccgaagccgtgaccctgcaggacgtgagaggccgggactaccagaacgccatgcgggtgtggtccaacatccctggactgaaaagcaagcacgcacctctgacccctaaagaagaggagtacctgcaggcccaggtgcggagcagaagcaagctggacgcccctaaggtggatctgctggtgaagaattgcctcctgcccctgagagagtacttcaagtatttcagccagaatagtctgcccctgggaggcagcggcggcggcgccctggtgacatttgaggacgtcgccgtgcggttcacccaggaggaatgggctctgctggatccttctcagaaaatcctgtaccgggacgtgatgagagagacataccggaatctgacctccgtgggcatcaactgggaatgttgggaccttgaagcctgcttcagaagcctgggaagaaacctgagagtgcaggtggtgaagagaaagtgcgagctgaccaacagcggcccctgcgccgagggcggcccaagcagcggcgcccctcctcccagcggcggcagcccagccggctccccaacctctaccgaggagggcacctctgagtccgccacccccgagagcggccctggcacctccaccgagcccagcgagggcagcgcacccggcagccctgccggcagccccacctccacagaggagggaaccagcaccgagcccagcgaaggcagcgccccaggcaccagcaccgagcctagtgagcaggagattaaacggatcaacaagatcagaagaagacttgtgaaagacagcaacaccaagaaggccggcaagacaggccccatgaaaaccctgctggttagagtgatgacacccgatctgagagagcggctggaaaacctgagaaagaagcctgaaaatatcccccagcccatcagcaatacatctagagccaacctgaataagctgctgaccgattacaccgaaatgaagaaggcgatcctgcatgtgtactgggaagagttccagaaggaccctgtgggcctgatgagccgggtggcccagcctgccagcaagaagatcgatcagaacaagctgaaacctgagatggacgagaagggcaacctgaccaccgccggctttgcctgctctcagtgtggccagcccctgttcgtgtacaagctggagcaggtgtctgagaagggcaaggcttacaccaactacttcggacggtgcaatgtggccgagcacgaaaagctgatcctgctggcccagctgaagcccgagaaggatagcgacgaagccgtgacatatagcctgggaaagtttgggcagagggccctggatttctacagcattcatgtgaccaaggagtccacccaccccgtgaagcccctggcccagatcgccggaaacagatacgcctccggacctgtgggaaaggccctgagcgacgcatgtatgggcacaatcgcctccttcctgtctaagtaccaggacatcatcatcgaacaccagaaggtggtgaagggcaaccagaagagactggagagcctgcgggagctggccggcaaggaaaacctggaataccctagcgtgaccctgccacctcagcctcacaccaaggagggcgttgatgcctacaacgaagtgatcgcccgggtgcgaatgtgggtgaacctgaacctgtggcagaagctgaagctaagcagagatgatgccaagcctctgctgagactgaagggattcccttcctttcctctggtcgagagacaggccaacgaagtggactggtgggacatggtgtgtaacgtgaagaagctgatcaacgagaaaaaggaggatggcaaggtgttttggcagaatctggctggctacaagagacaggaagccctgagaccatacctgagcagcgaggaagatcggaagaagggaaagaaattcgctcggtaccagctgggcgacctgctgctgcacctggaaaagaagcacggcgaggactggggaaaggtgtacgacgaggcctgggagcggattgacaagaaagtggaaggcctgagcaagcacatcaagctggaagaggaacggagaagcgaggacgcccagagcaaggccgccctgaccgactggctgcgggctaaggccagcttcgtgatcgagggcctgaaggaggccgacaaggacgagttctgcagatgcgagctgaagctgcagaagtggtacggggacctgcggggaaagcccttcgccatcgaagccgagaacagcatcctggacatcagcggcttcagcaagcagtacaactgtgccttcatctggcagaaggacggcgtgaagaagctgaacctgtacctgatcatcaactacttcaagggcggcaagctgcggttcaagaagatcaaacctgaagccttcgaagccaacagattctacaccgtgatcaacaaaaagagcggcgagatcgtgcccatggaggtgaacttcaacttcgacgaccccaacctgatcatcctgcctctggcctttggcaagagacagggcagagaattcatctggaacgacctgctgtccctggaaaccggcagcctgaagctggccaacggaagagtgatcgagaagacactgtacaacagaagaacccggcaggatgagcctgccctgttcgtggccctgaccttcgagcggcgggaggtcctggactcctccaatatcaaaccaatgaacctgatcggcgtggcaagaggcgaaaacatccccgccgtgatcgccctgaccgaccccgagggctgcccactgagccggtttaaggatagcctgggaaacccaacccacatcctgagaatcggcgagagctataaggagaagcagcggaccatccaggccaagaaggaggtggagcagcggagagccggcggctacagccggaagtacgccagcaaagccaagaatctggcagacgatatggtgagaaacaccgctagagatctgctgtactacgccgtgacccaggatgccatgctgatcttcgccaacctgagccggggcttcggccggcagggcaagcggaccttcatggccgagagacagtacacacggatggaggactggctgaccgccaagctggcctacgagggcctgagcaagacctacctgtccaagacactggcccagtacacctccaagacatgcagcaactgtgggtttaccatcaccagcgccgactacgacagggtgctggagaagctgaagaagacagcaacaggctggatgaccacaattaacggcaaggagctgaaggtggagggccagattacctactacaacagatacaagagacagaacgtagtcaaggacctgtccgtcgagctggatagactgagcgaagaatctgtgaacaacgacatctcctcctggacaaagggcagaagcggagaagctctgagcctcctgaagaaaagattctcccatagacccgtgcaggagaagttcgtgtgcctgaactgcggcttcgagacacacgcagccgagcaagccgccctgaacatcgccagatcctggctgttcctgcggagccaggagtacaagaaataccagacaaacaagacaaccggcaacaccgataagagagccttcgtcgagacctggcagtccttttaccggaagaagcttaaggaggtgtggaaacctgccgtgcggtctggcggatctggcggaggctccaaggaggccttcatggccttcggcgacgtggccgtggacttcacccaggaggagtggaggctgctgagccccgcccagaggaccctgcacagggaggtgatgctggagacctacaaccacctggtgagcctggagatccccttcagcaagcccaagctgatcagccagctggagaggggcgaggagccctggatcaaggagaggcagaggcccctgagcctgtgccccgccggcagcaagctgggcggcccaagcagcggcgcccctcctcccagcggcggcagcccagccggctccccaacctctaccgaggagggcacctctgagtccgccacccccgagagcggccctggcacctccaccgagcccagcgagggcagcgcacccggcagccctgccggcagccccacctccacagaggagggaaccagcaccgagcccagcgaaggcagcgccccaggcaccagcaccgagcctagtgagcaggagattaaacggatcaacaagatcagaagaagacttgtgaaagacagcaacaccaagaaggccggcaagacaggccccatgaaaaccctgctggttagagtgatgacacccgatctgagagagcggctggaaaacctgagaaagaagcctgaaaatatcccccagcccatcagcaatacatctagagccaacctgaataagctgctgaccgattacaccgaaatgaagaaggcgatcctgcatgtgtactgggaagagttccagaaggaccctgtgggcctgatgagccgggtggcccagcctgccagcaagaagatcgatcagaacaagctgaaacctgagatggacgagaagggcaacctgaccaccgccggctttgcctgctctcagtgtggccagcccctgttcgtgtacaagctggagcaggtgtctgagaagggcaaggcttacaccaactacttcggacggtgcaatgtggccgagcacgaaaagctgatcctgctggcccagctgaagcccgagaaggatagcgacgaagccgtgacatatagcctgggaaagtttgggcagagggccctggatttctacagcattcatgtgaccaaggagtccacccaccccgtgaagcccctggcccagatcgccggaaacagatacgcctccggacctgtgggaaaggccctgagcgacgcatgtatgggcacaatcgcctccttcctgtctaagtaccaggacatcatcatcgaacaccagaaggtggtgaagggcaaccagaagagactggagagcctgcgggagctggccggcaaggaaaacctggaataccctagcgtgaccctgccacctcagcctcacaccaaggagggcgttgatgcctacaacgaagtgatcgcccgggtgcgaatgtgggtgaacctgaacctgtggcagaagctgaagctaagcagagatgatgccaagcctctgctgagactgaagggattcccttcctttcctctggtcgagagacaggccaacgaagtggactggtgggacatggtgtgtaacgtgaagaagctgatcaacgagaaaaaggaggatggcaaggtgttttggcagaatctggctggctacaagagacaggaagccctgagaccatacctgagcagcgaggaagatcggaagaagggaaagaaattcgctcggtaccagctgggcgacctgctgctgcacctggaaaagaagcacggcgaggactggggaaaggtgtacgacgaggcctgggagcggattgacaagaaagtggaaggcctgagcaagcacatcaagctggaagaggaacggagaagcgaggacgcccagagcaaggccgccctgaccgactggctgcgggctaaggccagcttcgtgatcgagggcctgaaggaggccgacaaggacgagttctgcagatgcgagctgaagctgcagaagtggtacggggacctgcggggaaagcccttcgccatcgaagccgagaacagcatcctggacatcagcggcttcagcaagcagtacaactgtgccttcatctggcagaaggacggcgtgaagaagctgaacctgtacctgatcatcaactacttcaagggcggcaagctgcggttcaagaagatcaaacctgaagccttcgaagccaacagattctacaccgtgatcaacaaaaagagcggcgagatcgtgcccatggaggtgaacttcaacttcgacgaccccaacctgatcatcctgcctctggcctttggcaagagacagggcagagaattcatctggaacgacctgctgtccctggaaaccggcagcctgaagctggccaacggaagagtgatcgagaagacactgtacaacagaagaacccggcaggatgagcctgccctgttcgtggccctgaccttcgagcggcgggaggtcctggactcctccaatatcaaaccaatgaacctgatcggcgtggcaagaggcgaaaacatccccgccgtgatcgccctgaccgaccccgagggctgcccactgagccggtttaaggatagcctgggaaacccaacccacatcctgagaatcggcgagagctataaggagaagcagcggaccatccaggccaagaaggaggtggagcagcggagagccggcggctacagccggaagtacgccagcaaagccaagaatctggcagacgatatggtgagaaacaccgctagagatctgctgtactacgccgtgacccaggatgccatgctgatcttcgccaacctgagccggggcttcggccggcagggcaagcggaccttcatggccgagagacagtacacacggatggaggactggctgaccgccaagctggcctacgagggcctgagcaagacctacctgtccaagacactggcccagtacacctccaagacatgcagcaactgtgggtttaccatcaccagcgccgactacgacagggtgctggagaagctgaagaagacagcaacaggctggatgaccacaattaacggcaaggagctgaaggtggagggccagattacctactacaacagatacaagagacagaacgtagtcaaggacctgtccgtcgagctggatagactgagcgaagaatctgtgaacaacgacatctcctcctggacaaagggcagaagcggagaagctctgagcctcctgaagaaaagattctcccatagacccgtgcaggagaagttcgtgtgcctgaactgcggcttcgagacacacgcagccgagcaagccgccctgaacatcgccagatcctggctgttcctgcggagccaggagtacaagaaataccagacaaacaagacaaccggcaacaccgataagagagccttcgtcgagacctggcagtccttttaccggaagaagcttaaggaggtgtggaaacctgccgtgcggtctggcggatctggcggaggctcctaaggaggccttcatggccttcggcgacgtggccgtggacttcacccaggaggagtggaggctgctgagccccgcccagaggaccctgcacagggaggtgatgctggagacctacaaccacctggtgagcctggagatccccttcagcaagcccaagctgatcagccagctggagaggggcgaggagccctggatcaaggagaggcagaggcccctgagcctgtgccccgccggcagcaagctgggatctggctccggcagcggccccaagaaaaagagaaaagtctaagctgccttctgcggggcttgccttctggccatgcccttcttctctcccttgcacctgtacctcttggtctttgaataaagcctgagtaggaaggctagcaaaaaaaaaaaaaaaaaaaaaaaaaaaaaaaaaaaaaaaaaaaaaaaaaaaaaaaaaaaaaaaaaaaaaaaaaaaaaaaa

SEQ ID NO: 16255 - RNA, 9485 nt, synthetic construct
  source 1..9485: mol_type = other RNA
aggaaataagagagaaaagaagagtaagaagaaatataagagccaccatggcccctaagaagaagcgtaaagtgagccggatggaacgcctcgtctacgaggtgcggcagaagtgcagaaacatcgaggacatctgcatctcctgcggatctctgaacgtgaccctggagcacccactgttcatcggcggcatgtgccagaactgtaaaaactgttttctggagtgtgcctatcaatacgacgatgacggctaccagagctactgcaccatctgttgcggcggaagagaggtgctgatgtgtggaaataacaactgctgccggtgcttctgcgtggaatgcgtggacctgctggtgggccccggcgccgcccaggccgctattaaggaagatccttggaactgctacatgtgcggccacaagggcacatacggcctgctgagacggagagaggactggcctagcagactgcagatgttcttcgccaataaccacgaccaggagttcgacccccctaaggtgtaccctcccgtccccgccgagaagagaaagcccatccgggtcctgagcctgttcgatggcatcgccaccggtctgctggtgctgaaggacctgggcatccaggtggataggtacattgcctccgaggtgtgcgaggactccatcaccgtgggaatggtgcgtcatcagggcaagatcatgtacgtgggcgacgtgcggagcgtgacacagaagcatatccaggagtggggccctttcgacctggtgatcggcggcagcccttgcaatgacctgagcatcgtgaacccagcccggaagggcctgtacgagggaaccggcagactgttcttcgagttttacagactgctgcacgacgcccggcctaaggaaggcgacgaccggcccttcttttggctgttcgagaatgtggtggccatgggagtcagcgacaagcgggatattagccggttcctggagagcaaccccgtgatgatcgatgccaaggaagtgagcgccgcccaccgggccagatacttctggggcaatctgcctggcatgaacagacccctggccagcaccgtgaacgacaagctggagctgcaggagtgcctggagcacggccggatcgccaagttcagcaaggtgagaaccatcaccacccgaagcaacagcatcaaacaaggcaaggaccagcactttcctgtgttcatgaacgagaaggaggacatcctgtggtgtaccgagatggagagagtgttcgggttcccagtccactacacagatgtcagcaacatgtctagactggccagacagagactgctgggaagaagctggtccgtccctgtgatcagacacctgttcgcccctctgaaggagtacttcgcctgcgtgagcagcggcaacagcaacgccaacagccggggccccagcttctctagcggcctggtgccactgtccctgagagggagccacatgggccccatggagatctacaaaaccgtgagcgcctggaagcggcagcctgtgcgcgtgctgagcctgtttcggaatatcgataaagtcctgaaaagcctgggattcctggagagcggctctggctccggcggtggcaccctgaagtacgtggaggatgtgacaaacgtggtcagacgggatgtggagaagtggggccccttcgatctggtgtacggcagcacccaacccctgggcagctcttgtgaccggtgccctggctggtacatgtttcagttccaccggatcctgcagtacgccctgccgagacaggagtcccagcggccattcttttggattttcatggacaacttgctgctgaccgaggatgaccaggaaactaccactcggttcctgcagaccgaagccgtgaccctgcaggacgtgagaggccgggactaccagaacgccatgcgggtgtggtccaacatccctggactgaaaagcaagcacgcacctctgacccctaaagaagaggagtacctgcaggcccaggtgcggagcagaagcaagctggacgcccctaaggtggatctgctggtgaagaattgcctcctgcccctgagagagtacttcaagtatttcagccagaatagtctgcccctgggaggcagcggcggcggcgccctggtgacatttgaggacgtcgccgtgcggttcacccaggaggaatgggctctgctggatccttctcagaaaatcctgtaccgggacgtgatgagagagacataccggaatctgacctccgtgggcatcaactgggaatgttgggaccttgaagcctgcttcagaagcctgggaagaaacctgagagtgcaggtggtgaagagaaagtgcgagctgaccaacagcggcccctgcgccgagggcggcccaagcagcggcgcccctcctcccagcggcggcagcccagccggctccccaacctctaccgaggagggcacctctgagtccgccacccccgagagcggccctggcacctccaccgagcccagcgagggcagcgcacccggcagccctgccggcagccccacctccacagaggagggaaccagcaccgagcccagcgaaggcagcgccccaggcaccagcaccgagcctagtgagcaggagattaaacggatcaacaagatcagaagaagacttgtgaaagacagcaacaccaagaaggccggcaagacaggccccatgaaaaccctgctggttagagtgatgacacccgatctgagagagcggctggaaaacctgagaaagaagcctgaaaatatcccccagcccatcagcaatacatctagagccaacctgaataagctgctgaccgattacaccgaaatgaagaaggcgatcctgcatgtgtactgggaagagttccagaaggaccctgtgggcctgatgagccgggtggcccagcctgccagcaagaagatcgatcagaacaagctgaaacctgagatggacgagaagggcaacctgaccaccgccggctttgcctgctctcagtgtggccagcccctgttcgtgtacaagctggagcaggtgtctgagaagggcaaggcttacaccaactacttcggacggtgcaatgtggccgagcacgaaaagctgatcctgctggcccagctgaagcccgagaaggatagcgacgaagccgtgacatatagcctgggaaagtttgggcagagggccctggatttctacagcattcatgtgaccaaggagtccacccaccccgtgaagcccctggcccagatcgccggaaacagatacgcctccggacctgtgggaaaggccctgagcgacgcatgtatgggcacaatcgcctccttcctgtctaagtaccaggacatcatcatcgaacaccagaaggtggtgaagggcaaccagaagagactggagagcctgcgggagctggccggcaaggaaaacctggaataccctagcgtgaccctgccacctcagcctcacaccaaggagggcgttgatgcctacaacgaagtgatcgcccgggtgcgaatgtgggtgaacctgaacctgtggcagaagctgaagctaagcagagatgatgccaagcctctgctgagactgaagggattcccttcctttcctctggtcgagagacaggccaacgaagtggactggtgggacatggtgtgtaacgtgaagaagctgatcaacgagaaaaaggaggatggcaaggtgttttggcagaatctggctggctacaagagacaggaagccctgagaccatacctgagcagcgaggaagatcggaagaagggaaagaaattcgctcggtaccagctgggcgacctgctgctgcacctggaaaagaagcacggcgaggactggggaaaggtgtacgacgaggcctgggagcggattgacaagaaagtggaaggcctgagcaagcacatcaagctggaagaggaacggagaagcgaggacgcccagagcaaggccgccctgaccgactggctgcgggctaaggccagcttcgtgatcgagggcctgaaggaggccgacaaggacgagttctgcagatgcgagctgaagctgcagaagtggtacggggacctgcggggaaagcccttcgccatcgaagccgagaacagcatcctggacatcagcggcttcagcaagcagtacaactgtgccttcatctggcagaaggacggcgtgaagaagctgaacctgtacctgatcatcaactacttcaagggcggcaagctgcggttcaagaagatcaaacctgaagccttcgaagccaacagattctacaccgtgatcaacaaaaagagcggcgagatcgtgcccatggaggtgaacttcaacttcgacgaccccaacctgatcatcctgcctctggcctttggcaagagacagggcagagaattcatctggaacgacctgctgtccctggaaaccggcagcctgaagctggccaacggaagagtgatcgagaagacactgtacaacagaagaacccggcaggatgagcctgccctgttcgtggccctgaccttcgagcggcgggaggtcctggactcctccaatatcaaaccaatgaacctgatcggcgtggcaagaggcgaaaacatccccgccgtgatcgccctgaccgaccccgagggctgcccactgagccggtttaaggatagcctgggaaacccaacccacatcctgagaatcggcgagagctataaggagaagcagcggaccatccaggccaagaaggaggtggagcagcggagagccggcggctacagccggaagtacgccagcaaagccaagaatctggcagacgatatggtgagaaacaccgctagagatctgctgtactacgccgtgacccaggatgccatgctgatcttcgccaacctgagccggggcttcggccggcagggcaagcggaccttcatggccgagagacagtacacacggatggaggactggctgaccgccaagctggcctacgagggcctgagcaagacctacctgtccaagacactggcccagtacacctccaagacatgcagcaactgtgggtttaccatcaccagcgccgactacgacagggtgctggagaagctgaagaagacagcaacaggctggatgaccacaattaacggcaaggagctgaaggtggagggccagattacctactacaacagatacaagagacagaacgtagtcaaggacctgtccgtcgagctggatagactgagcgaagaatctgtgaacaacgacatctcctcctggacaaagggcagaagcggagaagctctgagcctcctgaagaaaagattctcccatagacccgtgcaggagaagttcgtgtgcctgaactgcggcttcgagacacacgcagccgagcaagccgccctgaacatcgccagatcctggctgttcctgcggagccaggagtacaagaaataccagacaaacaagacaaccggcaacaccgataagagagccttcgtcgagacctggcagtccttttaccggaagaagcttaaggaggtgtggaaacctgccgtgcggtctggcggatctggcggaggctccaagagcatggtgaccttcgaggacgtggccgtgtacttcagccaggaggagtgggagctgctggacgccgcccagaggcacctgtaccacagcgtgatgctggagaacctggagctggtgaccagcctgggctgctggcacggcgtggagggcgaggaggcccaccccgagcagaacgtgagcgtggaggtgctgcaggtgaggatccccaacgccgaccccagcaccaagaaggccaacagcggcggcccaagcagcggcgcccctcctcccagcggcggcagcccagccggctccccaacctctaccgaggagggcacctctgagtccgccacccccgagagcggccctggcacctccaccgagcccagcgagggcagcgcacccggcagccctgccggcagccccacctccacagaggagggaaccagcaccgagcccagcgaaggcagcgccccaggcaccagcaccgagcctagtgagcaggagattaaacggatcaacaagatcagaagaagacttgtgaaagacagcaacaccaagaaggccggcaagacaggccccatgaaaaccctgctggttagagtgatgacacccgatctgagagagcggctggaaaacctgagaaagaagcctgaaaatatcccccagcccatcagcaatacatctagagccaacctgaataagctgctgaccgattacaccgaaatgaagaaggcgatcctgcatgtgtactgggaagagttccagaaggaccctgtgggcctgatgagccgggtggcccagcctgccagcaagaagatcgatcagaacaagctgaaacctgagatggacgagaagggcaacctgaccaccgccggctttgcctgctctcagtgtggccagcccctgttcgtgtacaagctggagcaggtgtctgagaagggcaaggcttacaccaactacttcggacggtgcaatgtggccgagcacgaaaagctgatcctgctggcccagctgaagcccgagaaggatagcgacgaagccgtgacatatagcctgggaaagtttgggcagagggccctggatttctacagcattcatgtgaccaaggagtccacccaccccgtgaagcccctggcccagatcgccggaaacagatacgcctccggacctgtgggaaaggccctgagcgacgcatgtatgggcacaatcgcctccttcctgtctaagtaccaggacatcatcatcgaacaccagaaggtggtgaagggcaaccagaagagactggagagcctgcgggagctggccggcaaggaaaacctggaataccctagcgtgaccctgccacctcagcctcacaccaaggagggcgttgatgcctacaacgaagtgatcgcccgggtgcgaatgtgggtgaacctgaacctgtggcagaagctgaagctaagcagagatgatgccaagcctctgctgagactgaagggattcccttcctttcctctggtcgagagacaggccaacgaagtggactggtgggacatggtgtgtaacgtgaagaagctgatcaacgagaaaaaggaggatggcaaggtgttttggcagaatctggctggctacaagagacaggaagccctgagaccatacctgagcagcgaggaagatcggaagaagggaaagaaattcgctcggtaccagctgggcgacctgctgctgcacctggaaaagaagcacggcgaggactggggaaaggtgtacgacgaggcctgggagcggattgacaagaaagtggaaggcctgagcaagcacatcaagctggaagaggaacggagaagcgaggacgcccagagcaaggccgccctgaccgactggctgcgggctaaggccagcttcgtgatcgagggcctgaaggaggccgacaaggacgagttctgcagatgcgagctgaagctgcagaagtggtacggggacctgcggggaaagcccttcgccatcgaagccgagaacagcatcctggacatcagcggcttcagcaagcagtacaactgtgccttcatctggcagaaggacggcgtgaagaagctgaacctgtacctgatcatcaactacttcaagggcggcaagctgcggttcaagaagatcaaacctgaagccttcgaagccaacagattctacaccgtgatcaacaaaaagagcggcgagatcgtgcccatggaggtgaacttcaacttcgacgaccccaacctgatcatcctgcctctggcctttggcaagagacagggcagagaattcatctggaacgacctgctgtccctggaaaccggcagcctgaagctggccaacggaagagtgatcgagaagacactgtacaacagaagaacccggcaggatgagcctgccctgttcgtggccctgaccttcgagcggcgggaggtcctggactcctccaatatcaaaccaatgaacctgatcggcgtggcaagaggcgaaaacatccccgccgtgatcgccctgaccgaccccgagggctgcccactgagccggtttaaggatagcctgggaaacccaacccacatcctgagaatcggcgagagctataaggagaagcagcggaccatccaggccaagaaggaggtggagcagcggagagccggcggctacagccggaagtacgccagcaaagccaagaatctggcagacgatatggtgagaaacaccgctagagatctgctgtactacgccgtgacccaggatgccatgctgatcttcgccaacctgagccggggcttcggccggcagggcaagcggaccttcatggccgagagacagtacacacggatggaggactggctgaccgccaagctggcctacgagggcctgagcaagacctacctgtccaagacactggcccagtacacctccaagacatgcagcaactgtgggtttaccatcaccagcgccgactacgacagggtgctggagaagctgaagaagacagcaacaggctggatgaccacaattaacggcaaggagctgaaggtggagggccagattacctactacaacagatacaagagacagaacgtagtcaaggacctgtccgtcgagctggatagactgagcgaagaatctgtgaacaacgacatctcctcctggacaaagggcagaagcggagaagctctgagcctcctgaagaaaagattctcccatagacccgtgcaggagaagttcgtgtgcctgaactgcggcttcgagacacacgcagccgagcaagccgccctgaacatcgccagatcctggctgttcctgcggagccaggagtacaagaaataccagacaaacaagacaaccggcaacaccgataagagagccttcgtcgagacctggcagtccttttaccggaagaagcttaaggaggtgtggaaacctgccgtgcggtctggcggatctggcggaggctcctaagagcatggtgaccttcgaggacgtggccgtgtacttcagccaggaggagtgggagctgctggacgccgcccagaggcacctgtaccacagcgtgatgctggagaacctggagctggtgaccagcctgggctgctggcacggcgtggagggcgaggaggcccaccccgagcagaacgtgagcgtggaggtgctgcaggtgaggatccccaacgccgaccccagcaccaagaaggccaacagcggatctggctccggcagcggccccaagaaaaagagaaaagtctaagctgccttctgcggggcttgccttctggccatgcccttcttctctcccttgcacctgtacctcttggtctttgaataaagcctgagtaggaaggctagcaaaaaaaaaaaaaaaaaaaaaaaaaaaaaaaaaaaaaaaaaaaaaaaaaaaaaaaaaaaaaaaaaaaaaaaaaaaaaaaa

SEQ ID NO: 16256 - RNA, 9485 nt, synthetic construct
  source 1..9485: mol_type = other RNA
aggaaataagagagaaaagaagagtaagaagaaatataagagccaccatggcccctaagaagaagcgtaaagtgagccggatggaacgcctcgtctacgaggtgcggcagaagtgcagaaacatcgaggacatctgcatctcctgcggatctctgaacgtgaccctggagcacccactgttcatcggcggcatgtgccagaactgtaaaaactgttttctggagtgtgcctatcaatacgacgatgacggctaccagagctactgcaccatctgttgcggcggaagagaggtgctgatgtgtggaaataacaactgctgccggtgcttctgcgtggaatgcgtggacctgctggtgggccccggcgccgcccaggccgctattaaggaagatccttggaactgctacatgtgcggccacaagggcacatacggcctgctgagacggagagaggactggcctagcagactgcagatgttcttcgccaataaccacgaccaggagttcgacccccctaaggtgtaccctcccgtccccgccgagaagagaaagcccatccgggtcctgagcctgttcgatggcatcgccaccggtctgctggtgctgaaggacctgggcatccaggtggataggtacattgcctccgaggtgtgcgaggactccatcaccgtgggaatggtgcgtcatcagggcaagatcatgtacgtgggcgacgtgcggagcgtgacacagaagcatatccaggagtggggccctttcgacctggtgatcggcggcagcccttgcaatgacctgagcatcgtgaacccagcccggaagggcctgtacgagggaaccggcagactgttcttcgagttttacagactgctgcacgacgcccggcctaaggaaggcgacgaccggcccttcttttggctgttcgagaatgtggtggccatgggagtcagcgacaagcgggatattagccggttcctggagagcaaccccgtgatgatcgatgccaaggaagtgagcgccgcccaccgggccagatacttctggggcaatctgcctggcatgaacagacccctggccagcaccgtgaacgacaagctggagctgcaggagtgcctggagcacggccggatcgccaagttcagcaaggtgagaaccatcaccacccgaagcaacagcatcaaacaaggcaaggaccagcactttcctgtgttcatgaacgagaaggaggacatcctgtggtgtaccgagatggagagagtgttcgggttcccagtccactacacagatgtcagcaacatgtctagactggccagacagagactgctgggaagaagctggtccgtccctgtgatcagacacctgttcgcccctctgaaggagtacttcgcctgcgtgagcagcggcaacagcaacgccaacagccggggccccagcttctctagcggcctggtgccactgtccctgagagggagccacatgggccccatggagatctacaaaaccgtgagcgcctggaagcggcagcctgtgcgcgtgctgagcctgtttcggaatatcgataaagtcctgaaaagcctgggattcctggagagcggctctggctccggcggtggcaccctgaagtacgtggaggatgtgacaaacgtggtcagacgggatgtggagaagtggggccccttcgatctggtgtacggcagcacccaacccctgggcagctcttgtgaccggtgccctggctggtacatgtttcagttccaccggatcctgcagtacgccctgccgagacaggagtcccagcggccattcttttggattttcatggacaacttgctgctgaccgaggatgaccaggaaactaccactcggttcctgcagaccgaagccgtgaccctgcaggacgtgagaggccgggactaccagaacgccatgcgggtgtggtccaacatccctggactgaaaagcaagcacgcacctctgacccctaaagaagaggagtacctgcaggcccaggtgcggagcagaagcaagctggacgcccctaaggtggatctgctggtgaagaattgcctcctgcccctgagagagtacttcaagtatttcagccagaatagtctgcccctgggaggcagcggcggcggcgccctggtgacatttgaggacgtcgccgtgcggttcacccaggaggaatgggctctgctggatccttctcagaaaatcctgtaccgggacgtgatgagagagacataccggaatctgacctccgtgggcatcaactgggaatgttgggaccttgaagcctgcttcagaagcctgggaagaaacctgagagtgcaggtggtgaagagaaagtgcgagctgaccaacagcggcccctgcgccgagggcggcccaagcagcggcgcccctcctcccagcggcggcagcccagccggctccccaacctctaccgaggagggcacctctgagtccgccacccccgagagcggccctggcacctccaccgagcccagcgagggcagcgcacccggcagccctgccggcagccccacctccacagaggagggaaccagcaccgagcccagcgaaggcagcgccccaggcaccagcaccgagcctagtgagcaggagattaaacggatcaacaagatcagaagaagacttgtgaaagacagcaacaccaagaaggccggcaagacaggccccatgaaaaccctgctggttagagtgatgacacccgatctgagagagcggctggaaaacctgagaaagaagcctgaaaatatcccccagcccatcagcaatacatctagagccaacctgaataagctgctgaccgattacaccgaaatgaagaaggcgatcctgcatgtgtactgggaagagttccagaaggaccctgtgggcctgatgagccgggtggcccagcctgccagcaagaagatcgatcagaacaagctgaaacctgagatggacgagaagggcaacctgaccaccgccggctttgcctgctctcagtgtggccagcccctgttcgtgtacaagctggagcaggtgtctgagaagggcaaggcttacaccaactacttcggacggtgcaatgtggccgagcacgaaaagctgatcctgctggcccagctgaagcccgagaaggatagcgacgaagccgtgacatatagcctgggaaagtttgggcagagggccctggatttctacagcattcatgtgaccaaggagtccacccaccccgtgaagcccctggcccagatcgccggaaacagatacgcctccggacctgtgggaaaggccctgagcgacgcatgtatgggcacaatcgcctccttcctgtctaagtaccaggacatcatcatcgaacaccagaaggtggtgaagggcaaccagaagagactggagagcctgcgggagctggccggcaaggaaaacctggaataccctagcgtgaccctgccacctcagcctcacaccaaggagggcgttgatgcctacaacgaagtgatcgcccgggtgcgaatgtgggtgaacctgaacctgtggcagaagctgaagctaagcagagatgatgccaagcctctgctgagactgaagggattcccttcctttcctctggtcgagagacaggccaacgaagtggactggtgggacatggtgtgtaacgtgaagaagctgatcaacgagaaaaaggaggatggcaaggtgttttggcagaatctggctggctacaagagacaggaagccctgagaccatacctgagcagcgaggaagatcggaagaagggaaagaaattcgctcggtaccagctgggcgacctgctgctgcacctggaaaagaagcacggcgaggactggggaaaggtgtacgacgaggcctgggagcggattgacaagaaagtggaaggcctgagcaagcacatcaagctggaagaggaacggagaagcgaggacgcccagagcaaggccgccctgaccgactggctgcgggctaaggccagcttcgtgatcgagggcctgaaggaggccgacaaggacgagttctgcagatgcgagctgaagctgcagaagtggtacggggacctgcggggaaagcccttcgccatcgaagccgagaacagcatcctggacatcagcggcttcagcaagcagtacaactgtgccttcatctggcagaaggacggcgtgaagaagctgaacctgtacctgatcatcaactacttcaagggcggcaagctgcggttcaagaagatcaaacctgaagccttcgaagccaacagattctacaccgtgatcaacaaaaagagcggcgagatcgtgcccatggaggtgaacttcaacttcgacgaccccaacctgatcatcctgcctctggcctttggcaagagacagggcagagaattcatctggaacgacctgctgtccctggaaaccggcagcctgaagctggccaacggaagagtgatcgagaagacactgtacaacagaagaacccggcaggatgagcctgccctgttcgtggccctgaccttcgagcggcgggaggtcctggactcctccaatatcaaaccaatgaacctgatcggcgtggcaagaggcgaaaacatccccgccgtgatcgccctgaccgaccccgagggctgcccactgagccggtttaaggatagcctgggaaacccaacccacatcctgagaatcggcgagagctataaggagaagcagcggaccatccaggccaagaaggaggtggagcagcggagagccggcggctacagccggaagtacgccagcaaagccaagaatctggcagacgatatggtgagaaacaccgctagagatctgctgtactacgccgtgacccaggatgccatgctgatcttcgccaacctgagccggggcttcggccggcagggcaagcggaccttcatggccgagagacagtacacacggatggaggactggctgaccgccaagctggcctacgagggcctgagcaagacctacctgtccaagacactggcccagtacacctccaagacatgcagcaactgtgggtttaccatcaccagcgccgactacgacagggtgctggagaagctgaagaagacagcaacaggctggatgaccacaattaacggcaaggagctgaaggtggagggccagattacctactacaacagatacaagagacagaacgtagtcaaggacctgtccgtcgagctggatagactgagcgaagaatctgtgaacaacgacatctcctcctggacaaagggcagaagcggagaagctctgagcctcctgaagaaaagattctcccatagacccgtgcaggagaagttcgtgtgcctgaactgcggcttcgagacacacgcagccgagcaagccgccctgaacatcgccagatcctggctgttcctgcggagccaggagtacaagaaataccagacaaacaagacaaccggcaacaccgataagagagccttcgtcgagacctggcagtccttttaccggaagaagcttaaggaggtgtggaaacctgccgtgcggtctggcggatctggcggaggctcccccctgaagctggtgaccttcgaggacgtggccgtggacttcacccaggaggagtggagcctgctggacaagagccagaagaacctgttcaggaacgtgatgatggagaccatccaccacctggtgagcgtgggctaccagatcagcaagagcgacgtgatcagccagctggagcagggcaaggagctgtggagcaaggccgccggcggcttccagggccagaggcccggcgagcaccagggcggcggcccaagcagcggcgcccctcctcccagcggcggcagcccagccggctccccaacctctaccgaggagggcacctctgagtccgccacccccgagagcggccctggcacctccaccgagcccagcgagggcagcgcacccggcagccctgccggcagccccacctccacagaggagggaaccagcaccgagcccagcgaaggcagcgccccaggcaccagcaccgagcctagtgagcaggagattaaacggatcaacaagatcagaagaagacttgtgaaagacagcaacaccaagaaggccggcaagacaggccccatgaaaaccctgctggttagagtgatgacacccgatctgagagagcggctggaaaacctgagaaagaagcctgaaaatatcccccagcccatcagcaatacatctagagccaacctgaataagctgctgaccgattacaccgaaatgaagaaggcgatcctgcatgtgtactgggaagagttccagaaggaccctgtgggcctgatgagccgggtggcccagcctgccagcaagaagatcgatcagaacaagctgaaacctgagatggacgagaagggcaacctgaccaccgccggctttgcctgctctcagtgtggccagcccctgttcgtgtacaagctggagcaggtgtctgagaagggcaaggcttacaccaactacttcggacggtgcaatgtggccgagcacgaaaagctgatcctgctggcccagctgaagcccgagaaggatagcgacgaagccgtgacatatagcctgggaaagtttgggcagagggccctggatttctacagcattcatgtgaccaaggagtccacccaccccgtgaagcccctggcccagatcgccggaaacagatacgcctccggacctgtgggaaaggccctgagcgacgcatgtatgggcacaatcgcctccttcctgtctaagtaccaggacatcatcatcgaacaccagaaggtggtgaagggcaaccagaagagactggagagcctgcgggagctggccggcaaggaaaacctggaataccctagcgtgaccctgccacctcagcctcacaccaaggagggcgttgatgcctacaacgaagtgatcgcccgggtgcgaatgtgggtgaacctgaacctgtggcagaagctgaagctaagcagagatgatgccaagcctctgctgagactgaagggattcccttcctttcctctggtcgagagacaggccaacgaagtggactggtgggacatggtgtgtaacgtgaagaagctgatcaacgagaaaaaggaggatggcaaggtgttttggcagaatctggctggctacaagagacaggaagccctgagaccatacctgagcagcgaggaagatcggaagaagggaaagaaattcgctcggtaccagctgggcgacctgctgctgcacctggaaaagaagcacggcgaggactggggaaaggtgtacgacgaggcctgggagcggattgacaagaaagtggaaggcctgagcaagcacatcaagctggaagaggaacggagaagcgaggacgcccagagcaaggccgccctgaccgactggctgcgggctaaggccagcttcgtgatcgagggcctgaaggaggccgacaaggacgagttctgcagatgcgagctgaagctgcagaagtggtacggggacctgcggggaaagcccttcgccatcgaagccgagaacagcatcctggacatcagcggcttcagcaagcagtacaactgtgccttcatctggcagaaggacggcgtgaagaagctgaacctgtacctgatcatcaactacttcaagggcggcaagctgcggttcaagaagatcaaacctgaagccttcgaagccaacagattctacaccgtgatcaacaaaaagagcggcgagatcgtgcccatggaggtgaacttcaacttcgacgaccccaacctgatcatcctgcctctggcctttggcaagagacagggcagagaattcatctggaacgacctgctgtccctggaaaccggcagcctgaagctggccaacggaagagtgatcgagaagacactgtacaacagaagaacccggcaggatgagcctgccctgttcgtggccctgaccttcgagcggcgggaggtcctggactcctccaatatcaaaccaatgaacctgatcggcgtggcaagaggcgaaaacatccccgccgtgatcgccctgaccgaccccgagggctgcccactgagccggtttaaggatagcctgggaaacccaacccacatcctgagaatcggcgagagctataaggagaagcagcggaccatccaggccaagaaggaggtggagcagcggagagccggcggctacagccggaagtacgccagcaaagccaagaatctggcagacgatatggtgagaaacaccgctagagatctgctgtactacgccgtgacccaggatgccatgctgatcttcgccaacctgagccggggcttcggccggcagggcaagcggaccttcatggccgagagacagtacacacggatggaggactggctgaccgccaagctggcctacgagggcctgagcaagacctacctgtccaagacactggcccagtacacctccaagacatgcagcaactgtgggtttaccatcaccagcgccgactacgacagggtgctggagaagctgaagaagacagcaacaggctggatgaccacaattaacggcaaggagctgaaggtggagggccagattacctactacaacagatacaagagacagaacgtagtcaaggacctgtccgtcgagctggatagactgagcgaagaatctgtgaacaacgacatctcctcctggacaaagggcagaagcggagaagctctgagcctcctgaagaaaagattctcccatagacccgtgcaggagaagttcgtgtgcctgaactgcggcttcgagacacacgcagccgagcaagccgccctgaacatcgccagatcctggctgttcctgcggagccaggagtacaagaaataccagacaaacaagacaaccggcaacaccgataagagagccttcgtcgagacctggcagtccttttaccggaagaagcttaaggaggtgtggaaacctgccgtgcggtctggcggatctggcggaggctcctcccctgaagctggtgaccttcgaggacgtggccgtggacttcacccaggaggagtggagcctgctggacaagagccagaagaacctgttcaggaacgtgatgatggagaccatccaccacctggtgagcgtgggctaccagatcagcaagagcgacgtgatcagccagctggagcagggcaaggagctgtggagcaaggccgccggcggcttccagggccagaggcccggcgagcaccagggcggatctggctccggcagcggccccaagaaaaagagaaaagtctaagctgccttctgcggggcttgccttctggccatgcccttcttctctcccttgcacctgtacctcttggtctttgaataaagcctgagtaggaaggctagcaaaaaaaaaaaaaaaaaaaaaaaaaaaaaaaaaaaaaaaaaaaaaaaaaaaaaaaaaaaaaaaaaaaaaaaaaaaaaaaa

SEQ ID NO: 16257 - RNA, 9485 nt, synthetic construct
  source 1..9485: mol_type = other RNA
aggaaataagagagaaaagaagagtaagaagaaatataagagccaccatggcccctaagaagaagcgtaaagtgagccggatggaacgcctcgtctacgaggtgcggcagaagtgcagaaacatcgaggacatctgcatctcctgcggatctctgaacgtgaccctggagcacccactgttcatcggcggcatgtgccagaactgtaaaaactgttttctggagtgtgcctatcaatacgacgatgacggctaccagagctactgcaccatctgttgcggcggaagagaggtgctgatgtgtggaaataacaactgctgccggtgcttctgcgtggaatgcgtggacctgctggtgggccccggcgccgcccaggccgctattaaggaagatccttggaactgctacatgtgcggccacaagggcacatacggcctgctgagacggagagaggactggcctagcagactgcagatgttcttcgccaataaccacgaccaggagttcgacccccctaaggtgtaccctcccgtccccgccgagaagagaaagcccatccgggtcctgagcctgttcgatggcatcgccaccggtctgctggtgctgaaggacctgggcatccaggtggataggtacattgcctccgaggtgtgcgaggactccatcaccgtgggaatggtgcgtcatcagggcaagatcatgtacgtgggcgacgtgcggagcgtgacacagaagcatatccaggagtggggccctttcgacctggtgatcggcggcagcccttgcaatgacctgagcatcgtgaacccagcccggaagggcctgtacgagggaaccggcagactgttcttcgagttttacagactgctgcacgacgcccggcctaaggaaggcgacgaccggcccttcttttggctgttcgagaatgtggtggccatgggagtcagcgacaagcgggatattagccggttcctggagagcaaccccgtgatgatcgatgccaaggaagtgagcgccgcccaccgggccagatacttctggggcaatctgcctggcatgaacagacccctggccagcaccgtgaacgacaagctggagctgcaggagtgcctggagcacggccggatcgccaagttcagcaaggtgagaaccatcaccacccgaagcaacagcatcaaacaaggcaaggaccagcactttcctgtgttcatgaacgagaaggaggacatcctgtggtgtaccgagatggagagagtgttcgggttcccagtccactacacagatgtcagcaacatgtctagactggccagacagagactgctgggaagaagctggtccgtccctgtgatcagacacctgttcgcccctctgaaggagtacttcgcctgcgtgagcagcggcaacagcaacgccaacagccggggccccagcttctctagcggcctggtgccactgtccctgagagggagccacatgggccccatggagatctacaaaaccgtgagcgcctggaagcggcagcctgtgcgcgtgctgagcctgtttcggaatatcgataaagtcctgaaaagcctgggattcctggagagcggctctggctccggcggtggcaccctgaagtacgtggaggatgtgacaaacgtggtcagacgggatgtggagaagtggggccccttcgatctggtgtacggcagcacccaacccctgggcagctcttgtgaccggtgccctggctggtacatgtttcagttccaccggatcctgcagtacgccctgccgagacaggagtcccagcggccattcttttggattttcatggacaacttgctgctgaccgaggatgaccaggaaactaccactcggttcctgcagaccgaagccgtgaccctgcaggacgtgagaggccgggactaccagaacgccatgcgggtgtggtccaacatccctggactgaaaagcaagcacgcacctctgacccctaaagaagaggagtacctgcaggcccaggtgcggagcagaagcaagctggacgcccctaaggtggatctgctggtgaagaattgcctcctgcccctgagagagtacttcaagtatttcagccagaatagtctgcccctgggaggcagcggcggcggcgccctggtgacatttgaggacgtcgccgtgcggttcacccaggaggaatgggctctgctggatccttctcagaaaatcctgtaccgggacgtgatgagagagacataccggaatctgacctccgtgggcatcaactgggaatgttgggaccttgaagcctgcttcagaagcctgggaagaaacctgagagtgcaggtggtgaagagaaagtgcgagctgaccaacagcggcccctgcgccgagggcggcccaagcagcggcgcccctcctcccagcggcggcagcccagccggctccccaacctctaccgaggagggcacctctgagtccgccacccccgagagcggccctggcacctccaccgagcccagcgagggcagcgcacccggcagccctgccggcagccccacctccacagaggagggaaccagcaccgagcccagcgaaggcagcgccccaggcaccagcaccgagcctagtgagcaggagattaaacggatcaacaagatcagaagaagacttgtgaaagacagcaacaccaagaaggccggcaagacaggccccatgaaaaccctgctggttagagtgatgacacccgatctgagagagcggctggaaaacctgagaaagaagcctgaaaatatcccccagcccatcagcaatacatctagagccaacctgaataagctgctgaccgattacaccgaaatgaagaaggcgatcctgcatgtgtactgggaagagttccagaaggaccctgtgggcctgatgagccgggtggcccagcctgccagcaagaagatcgatcagaacaagctgaaacctgagatggacgagaagggcaacctgaccaccgccggctttgcctgctctcagtgtggccagcccctgttcgtgtacaagctggagcaggtgtctgagaagggcaaggcttacaccaactacttcggacggtgcaatgtggccgagcacgaaaagctgatcctgctggcccagctgaagcccgagaaggatagcgacgaagccgtgacatatagcctgggaaagtttgggcagagggccctggatttctacagcattcatgtgaccaaggagtccacccaccccgtgaagcccctggcccagatcgccggaaacagatacgcctccggacctgtgggaaaggccctgagcgacgcatgtatgggcacaatcgcctccttcctgtctaagtaccaggacatcatcatcgaacaccagaaggtggtgaagggcaaccagaagagactggagagcctgcgggagctggccggcaaggaaaacctggaataccctagcgtgaccctgccacctcagcctcacaccaaggagggcgttgatgcctacaacgaagtgatcgcccgggtgcgaatgtgggtgaacctgaacctgtggcagaagctgaagctaagcagagatgatgccaagcctctgctgagactgaagggattcccttcctttcctctggtcgagagacaggccaacgaagtggactggtgggacatggtgtgtaacgtgaagaagctgatcaacgagaaaaaggaggatggcaaggtgttttggcagaatctggctggctacaagagacaggaagccctgagaccatacctgagcagcgaggaagatcggaagaagggaaagaaattcgctcggtaccagctgggcgacctgctgctgcacctggaaaagaagcacggcgaggactggggaaaggtgtacgacgaggcctgggagcggattgacaagaaagtggaaggcctgagcaagcacatcaagctggaagaggaacggagaagcgaggacgcccagagcaaggccgccctgaccgactggctgcgggctaaggccagcttcgtgatcgagggcctgaaggaggccgacaaggacgagttctgcagatgcgagctgaagctgcagaagtggtacggggacctgcggggaaagcccttcgccatcgaagccgagaacagcatcctggacatcagcggcttcagcaagcagtacaactgtgccttcatctggcagaaggacggcgtgaagaagctgaacctgtacctgatcatcaactacttcaagggcggcaagctgcggttcaagaagatcaaacctgaagccttcgaagccaacagattctacaccgtgatcaacaaaaagagcggcgagatcgtgcccatggaggtgaacttcaacttcgacgaccccaacctgatcatcctgcctctggcctttggcaagagacagggcagagaattcatctggaacgacctgctgtccctggaaaccggcagcctgaagctggccaacggaagagtgatcgagaagacactgtacaacagaagaacccggcaggatgagcctgccctgttcgtggccctgaccttcgagcggcgggaggtcctggactcctccaatatcaaaccaatgaacctgatcggcgtggcaagaggcgaaaacatccccgccgtgatcgccctgaccgaccccgagggctgcccactgagccggtttaaggatagcctgggaaacccaacccacatcctgagaatcggcgagagctataaggagaagcagcggaccatccaggccaagaaggaggtggagcagcggagagccggcggctacagccggaagtacgccagcaaagccaagaatctggcagacgatatggtgagaaacaccgctagagatctgctgtactacgccgtgacccaggatgccatgctgatcttcgccaacctgagccggggcttcggccggcagggcaagcggaccttcatggccgagagacagtacacacggatggaggactggctgaccgccaagctggcctacgagggcctgagcaagacctacctgtccaagacactggcccagtacacctccaagacatgcagcaactgtgggtttaccatcaccagcgccgactacgacagggtgctggagaagctgaagaagacagcaacaggctggatgaccacaattaacggcaaggagctgaaggtggagggccagattacctactacaacagatacaagagacagaacgtagtcaaggacctgtccgtcgagctggatagactgagcgaagaatctgtgaacaacgacatctcctcctggacaaagggcagaagcggagaagctctgagcctcctgaagaaaagattctcccatagacccgtgcaggagaagttcgtgtgcctgaactgcggcttcgagacacacgcagccgagcaagccgccctgaacatcgccagatcctggctgttcctgcggagccaggagtacaagaaataccagacaaacaagacaaccggcaacaccgataagagagccttcgtcgagacctggcagtccttttaccggaagaagcttaaggaggtgtggaaacctgccgtgcggtctggcggatctggcggaggctccttcaaggaggccgtgaccttcaaggacgtggccgtgaccttcaccgaggaggagctgggcctgctggaccccgcccagagggagctgtacagggacgtgatgctggagaacttcaggaacctggtgagcgtgggccaccagtgcttcatccccgacgtgatcagccagctggagagggaggagaagctgtggatgctgaggaccgccgcccagagcaggtgcagcagcggcgacaagaacctgggcggcccaagcagcggcgcccctcctcccagcggcggcagcccagccggctccccaacctctaccgaggagggcacctctgagtccgccacccccgagagcggccctggcacctccaccgagcccagcgagggcagcgcacccggcagccctgccggcagccccacctccacagaggagggaaccagcaccgagcccagcgaaggcagcgccccaggcaccagcaccgagcctagtgagcaggagattaaacggatcaacaagatcagaagaagacttgtgaaagacagcaacaccaagaaggccggcaagacaggccccatgaaaaccctgctggttagagtgatgacacccgatctgagagagcggctggaaaacctgagaaagaagcctgaaaatatcccccagcccatcagcaatacatctagagccaacctgaataagctgctgaccgattacaccgaaatgaagaaggcgatcctgcatgtgtactgggaagagttccagaaggaccctgtgggcctgatgagccgggtggcccagcctgccagcaagaagatcgatcagaacaagctgaaacctgagatggacgagaagggcaacctgaccaccgccggctttgcctgctctcagtgtggccagcccctgttcgtgtacaagctggagcaggtgtctgagaagggcaaggcttacaccaactacttcggacggtgcaatgtggccgagcacgaaaagctgatcctgctggcccagctgaagcccgagaaggatagcgacgaagccgtgacatatagcctgggaaagtttgggcagagggccctggatttctacagcattcatgtgaccaaggagtccacccaccccgtgaagcccctggcccagatcgccggaaacagatacgcctccggacctgtgggaaaggccctgagcgacgcatgtatgggcacaatcgcctccttcctgtctaagtaccaggacatcatcatcgaacaccagaaggtggtgaagggcaaccagaagagactggagagcctgcgggagctggccggcaaggaaaacctggaataccctagcgtgaccctgccacctcagcctcacaccaaggagggcgttgatgcctacaacgaagtgatcgcccgggtgcgaatgtgggtgaacctgaacctgtggcagaagctgaagctaagcagagatgatgccaagcctctgctgagactgaagggattcccttcctttcctctggtcgagagacaggccaacgaagtggactggtgggacatggtgtgtaacgtgaagaagctgatcaacgagaaaaaggaggatggcaaggtgttttggcagaatctggctggctacaagagacaggaagccctgagaccatacctgagcagcgaggaagatcggaagaagggaaagaaattcgctcggtaccagctgggcgacctgctgctgcacctggaaaagaagcacggcgaggactggggaaaggtgtacgacgaggcctgggagcggattgacaagaaagtggaaggcctgagcaagcacatcaagctggaagaggaacggagaagcgaggacgcccagagcaaggccgccctgaccgactggctgcgggctaaggccagcttcgtgatcgagggcctgaaggaggccgacaaggacgagttctgcagatgcgagctgaagctgcagaagtggtacggggacctgcggggaaagcccttcgccatcgaagccgagaacagcatcctggacatcagcggcttcagcaagcagtacaactgtgccttcatctggcagaaggacggcgtgaagaagctgaacctgtacctgatcatcaactacttcaagggcggcaagctgcggttcaagaagatcaaacctgaagccttcgaagccaacagattctacaccgtgatcaacaaaaagagcggcgagatcgtgcccatggaggtgaacttcaacttcgacgaccccaacctgatcatcctgcctctggcctttggcaagagacagggcagagaattcatctggaacgacctgctgtccctggaaaccggcagcctgaagctggccaacggaagagtgatcgagaagacactgtacaacagaagaacccggcaggatgagcctgccctgttcgtggccctgaccttcgagcggcgggaggtcctggactcctccaatatcaaaccaatgaacctgatcggcgtggcaagaggcgaaaacatccccgccgtgatcgccctgaccgaccccgagggctgcccactgagccggtttaaggatagcctgggaaacccaacccacatcctgagaatcggcgagagctataaggagaagcagcggaccatccaggccaagaaggaggtggagcagcggagagccggcggctacagccggaagtacgccagcaaagccaagaatctggcagacgatatggtgagaaacaccgctagagatctgctgtactacgccgtgacccaggatgccatgctgatcttcgccaacctgagccggggcttcggccggcagggcaagcggaccttcatggccgagagacagtacacacggatggaggactggctgaccgccaagctggcctacgagggcctgagcaagacctacctgtccaagacactggcccagtacacctccaagacatgcagcaactgtgggtttaccatcaccagcgccgactacgacagggtgctggagaagctgaagaagacagcaacaggctggatgaccacaattaacggcaaggagctgaaggtggagggccagattacctactacaacagatacaagagacagaacgtagtcaaggacctgtccgtcgagctggatagactgagcgaagaatctgtgaacaacgacatctcctcctggacaaagggcagaagcggagaagctctgagcctcctgaagaaaagattctcccatagacccgtgcaggagaagttcgtgtgcctgaactgcggcttcgagacacacgcagccgagcaagccgccctgaacatcgccagatcctggctgttcctgcggagccaggagtacaagaaataccagacaaacaagacaaccggcaacaccgataagagagccttcgtcgagacctggcagtccttttaccggaagaagcttaaggaggtgtggaaacctgccgtgcggtctggcggatctggcggaggctcctttcaaggaggccgtgaccttcaaggacgtggccgtgaccttcaccgaggaggagctgggcctgctggaccccgcccagagggagctgtacagggacgtgatgctggagaacttcaggaacctggtgagcgtgggccaccagtgcttcatccccgacgtgatcagccagctggagagggaggagaagctgtggatgctgaggaccgccgcccagagcaggtgcagcagcggcgacaagaacctgggatctggctccggcagcggccccaagaaaaagagaaaagtctaagctgccttctgcggggcttgccttctggccatgcccttcttctctcccttgcacctgtacctcttggtctttgaataaagcctgagtaggaaggctagcaaaaaaaaaaaaaaaaaaaaaaaaaaaaaaaaaaaaaaaaaaaaaaaaaaaaaaaaaaaaaaaaaaaaaaaaaaaaaaaa

SEQ ID NO: 16258 - RNA, 9485 nt, synthetic construct
  source 1..9485: mol_type = other RNA
aggaaataagagagaaaagaagagtaagaagaaatataagagccaccatggcccctaagaagaagcgtaaagtgagccggatggaacgcctcgtctacgaggtgcggcagaagtgcagaaacatcgaggacatctgcatctcctgcggatctctgaacgtgaccctggagcacccactgttcatcggcggcatgtgccagaactgtaaaaactgttttctggagtgtgcctatcaatacgacgatgacggctaccagagctactgcaccatctgttgcggcggaagagaggtgctgatgtgtggaaataacaactgctgccggtgcttctgcgtggaatgcgtggacctgctggtgggccccggcgccgcccaggccgctattaaggaagatccttggaactgctacatgtgcggccacaagggcacatacggcctgctgagacggagagaggactggcctagcagactgcagatgttcttcgccaataaccacgaccaggagttcgacccccctaaggtgtaccctcccgtccccgccgagaagagaaagcccatccgggtcctgagcctgttcgatggcatcgccaccggtctgctggtgctgaaggacctgggcatccaggtggataggtacattgcctccgaggtgtgcgaggactccatcaccgtgggaatggtgcgtcatcagggcaagatcatgtacgtgggcgacgtgcggagcgtgacacagaagcatatccaggagtggggccctttcgacctggtgatcggcggcagcccttgcaatgacctgagcatcgtgaacccagcccggaagggcctgtacgagggaaccggcagactgttcttcgagttttacagactgctgcacgacgcccggcctaaggaaggcgacgaccggcccttcttttggctgttcgagaatgtggtggccatgggagtcagcgacaagcgggatattagccggttcctggagagcaaccccgtgatgatcgatgccaaggaagtgagcgccgcccaccgggccagatacttctggggcaatctgcctggcatgaacagacccctggccagcaccgtgaacgacaagctggagctgcaggagtgcctggagcacggccggatcgccaagttcagcaaggtgagaaccatcaccacccgaagcaacagcatcaaacaaggcaaggaccagcactttcctgtgttcatgaacgagaaggaggacatcctgtggtgtaccgagatggagagagtgttcgggttcccagtccactacacagatgtcagcaacatgtctagactggccagacagagactgctgggaagaagctggtccgtccctgtgatcagacacctgttcgcccctctgaaggagtacttcgcctgcgtgagcagcggcaacagcaacgccaacagccggggccccagcttctctagcggcctggtgccactgtccctgagagggagccacatgggccccatggagatctacaaaaccgtgagcgcctggaagcggcagcctgtgcgcgtgctgagcctgtttcggaatatcgataaagtcctgaaaagcctgggattcctggagagcggctctggctccggcggtggcaccctgaagtacgtggaggatgtgacaaacgtggtcagacgggatgtggagaagtggggccccttcgatctggtgtacggcagcacccaacccctgggcagctcttgtgaccggtgccctggctggtacatgtttcagttccaccggatcctgcagtacgccctgccgagacaggagtcccagcggccattcttttggattttcatggacaacttgctgctgaccgaggatgaccaggaaactaccactcggttcctgcagaccgaagccgtgaccctgcaggacgtgagaggccgggactaccagaacgccatgcgggtgtggtccaacatccctggactgaaaagcaagcacgcacctctgacccctaaagaagaggagtacctgcaggcccaggtgcggagcagaagcaagctggacgcccctaaggtggatctgctggtgaagaattgcctcctgcccctgagagagtacttcaagtatttcagccagaatagtctgcccctgggaggcagcggcggcggcgccctggtgacatttgaggacgtcgccgtgcggttcacccaggaggaatgggctctgctggatccttctcagaaaatcctgtaccgggacgtgatgagagagacataccggaatctgacctccgtgggcatcaactgggaatgttgggaccttgaagcctgcttcagaagcctgggaagaaacctgagagtgcaggtggtgaagagaaagtgcgagctgaccaacagcggcccctgcgccgagggcggcccaagcagcggcgcccctcctcccagcggcggcagcccagccggctccccaacctctaccgaggagggcacctctgagtccgccacccccgagagcggccctggcacctccaccgagcccagcgagggcagcgcacccggcagccctgccggcagccccacctccacagaggagggaaccagcaccgagcccagcgaaggcagcgccccaggcaccagcaccgagcctagtgagcaggagattaaacggatcaacaagatcagaagaagacttgtgaaagacagcaacaccaagaaggccggcaagacaggccccatgaaaaccctgctggttagagtgatgacacccgatctgagagagcggctggaaaacctgagaaagaagcctgaaaatatcccccagcccatcagcaatacatctagagccaacctgaataagctgctgaccgattacaccgaaatgaagaaggcgatcctgcatgtgtactgggaagagttccagaaggaccctgtgggcctgatgagccgggtggcccagcctgccagcaagaagatcgatcagaacaagctgaaacctgagatggacgagaagggcaacctgaccaccgccggctttgcctgctctcagtgtggccagcccctgttcgtgtacaagctggagcaggtgtctgagaagggcaaggcttacaccaactacttcggacggtgcaatgtggccgagcacgaaaagctgatcctgctggcccagctgaagcccgagaaggatagcgacgaagccgtgacatatagcctgggaaagtttgggcagagggccctggatttctacagcattcatgtgaccaaggagtccacccaccccgtgaagcccctggcccagatcgccggaaacagatacgcctccggacctgtgggaaaggccctgagcgacgcatgtatgggcacaatcgcctccttcctgtctaagtaccaggacatcatcatcgaacaccagaaggtggtgaagggcaaccagaagagactggagagcctgcgggagctggccggcaaggaaaacctggaataccctagcgtgaccctgccacctcagcctcacaccaaggagggcgttgatgcctacaacgaagtgatcgcccgggtgcgaatgtgggtgaacctgaacctgtggcagaagctgaagctaagcagagatgatgccaagcctctgctgagactgaagggattcccttcctttcctctggtcgagagacaggccaacgaagtggactggtgggacatggtgtgtaacgtgaagaagctgatcaacgagaaaaaggaggatggcaaggtgttttggcagaatctggctggctacaagagacaggaagccctgagaccatacctgagcagcgaggaagatcggaagaagggaaagaaattcgctcggtaccagctgggcgacctgctgctgcacctggaaaagaagcacggcgaggactggggaaaggtgtacgacgaggcctgggagcggattgacaagaaagtggaaggcctgagcaagcacatcaagctggaagaggaacggagaagcgaggacgcccagagcaaggccgccctgaccgactggctgcgggctaaggccagcttcgtgatcgagggcctgaaggaggccgacaaggacgagttctgcagatgcgagctgaagctgcagaagtggtacggggacctgcggggaaagcccttcgccatcgaagccgagaacagcatcctggacatcagcggcttcagcaagcagtacaactgtgccttcatctggcagaaggacggcgtgaagaagctgaacctgtacctgatcatcaactacttcaagggcggcaagctgcggttcaagaagatcaaacctgaagccttcgaagccaacagattctacaccgtgatcaacaaaaagagcggcgagatcgtgcccatggaggtgaacttcaacttcgacgaccccaacctgatcatcctgcctctggcctttggcaagagacagggcagagaattcatctggaacgacctgctgtccctggaaaccggcagcctgaagctggccaacggaagagtgatcgagaagacactgtacaacagaagaacccggcaggatgagcctgccctgttcgtggccctgaccttcgagcggcgggaggtcctggactcctccaatatcaaaccaatgaacctgatcggcgtggcaagaggcgaaaacatccccgccgtgatcgccctgaccgaccccgagggctgcccactgagccggtttaaggatagcctgggaaacccaacccacatcctgagaatcggcgagagctataaggagaagcagcggaccatccaggccaagaaggaggtggagcagcggagagccggcggctacagccggaagtacgccagcaaagccaagaatctggcagacgatatggtgagaaacaccgctagagatctgctgtactacgccgtgacccaggatgccatgctgatcttcgccaacctgagccggggcttcggccggcagggcaagcggaccttcatggccgagagacagtacacacggatggaggactggctgaccgccaagctggcctacgagggcctgagcaagacctacctgtccaagacactggcccagtacacctccaagacatgcagcaactgtgggtttaccatcaccagcgccgactacgacagggtgctggagaagctgaagaagacagcaacaggctggatgaccacaattaacggcaaggagctgaaggtggagggccagattacctactacaacagatacaagagacagaacgtagtcaaggacctgtccgtcgagctggatagactgagcgaagaatctgtgaacaacgacatctcctcctggacaaagggcagaagcggagaagctctgagcctcctgaagaaaagattctcccatagacccgtgcaggagaagttcgtgtgcctgaactgcggcttcgagacacacgcagccgagcaagccgccctgaacatcgccagatcctggctgttcctgcggagccaggagtacaagaaataccagacaaacaagacaaccggcaacaccgataagagagccttcgtcgagacctggcagtccttttaccggaagaagcttaaggaggtgtggaaacctgccgtgcggtctggcggatctggcggaggctccgccagggccagcctgagcttcgaggacgtggccgtgggcttcagctgggaggagtggcagctgctggcccccagccagaaggacctgtacagggacgtgatgctggagaactacaggaacctggtgagcgtgggctacgaggccagcaagcccgacagcgtgttccagctggagcagggcgagcccccctggatggtggagggcgccgcccagagccagacctgccaggaggagatctgggagggcggcccaagcagcggcgcccctcctcccagcggcggcagcccagccggctccccaacctctaccgaggagggcacctctgagtccgccacccccgagagcggccctggcacctccaccgagcccagcgagggcagcgcacccggcagccctgccggcagccccacctccacagaggagggaaccagcaccgagcccagcgaaggcagcgccccaggcaccagcaccgagcctagtgagcaggagattaaacggatcaacaagatcagaagaagacttgtgaaagacagcaacaccaagaaggccggcaagacaggccccatgaaaaccctgctggttagagtgatgacacccgatctgagagagcggctggaaaacctgagaaagaagcctgaaaatatcccccagcccatcagcaatacatctagagccaacctgaataagctgctgaccgattacaccgaaatgaagaaggcgatcctgcatgtgtactgggaagagttccagaaggaccctgtgggcctgatgagccgggtggcccagcctgccagcaagaagatcgatcagaacaagctgaaacctgagatggacgagaagggcaacctgaccaccgccggctttgcctgctctcagtgtggccagcccctgttcgtgtacaagctggagcaggtgtctgagaagggcaaggcttacaccaactacttcggacggtgcaatgtggccgagcacgaaaagctgatcctgctggcccagctgaagcccgagaaggatagcgacgaagccgtgacatatagcctgggaaagtttgggcagagggccctggatttctacagcattcatgtgaccaaggagtccacccaccccgtgaagcccctggcccagatcgccggaaacagatacgcctccggacctgtgggaaaggccctgagcgacgcatgtatgggcacaatcgcctccttcctgtctaagtaccaggacatcatcatcgaacaccagaaggtggtgaagggcaaccagaagagactggagagcctgcgggagctggccggcaaggaaaacctggaataccctagcgtgaccctgccacctcagcctcacaccaaggagggcgttgatgcctacaacgaagtgatcgcccgggtgcgaatgtgggtgaacctgaacctgtggcagaagctgaagctaagcagagatgatgccaagcctctgctgagactgaagggattcccttcctttcctctggtcgagagacaggccaacgaagtggactggtgggacatggtgtgtaacgtgaagaagctgatcaacgagaaaaaggaggatggcaaggtgttttggcagaatctggctggctacaagagacaggaagccctgagaccatacctgagcagcgaggaagatcggaagaagggaaagaaattcgctcggtaccagctgggcgacctgctgctgcacctggaaaagaagcacggcgaggactggggaaaggtgtacgacgaggcctgggagcggattgacaagaaagtggaaggcctgagcaagcacatcaagctggaagaggaacggagaagcgaggacgcccagagcaaggccgccctgaccgactggctgcgggctaaggccagcttcgtgatcgagggcctgaaggaggccgacaaggacgagttctgcagatgcgagctgaagctgcagaagtggtacggggacctgcggggaaagcccttcgccatcgaagccgagaacagcatcctggacatcagcggcttcagcaagcagtacaactgtgccttcatctggcagaaggacggcgtgaagaagctgaacctgtacctgatcatcaactacttcaagggcggcaagctgcggttcaagaagatcaaacctgaagccttcgaagccaacagattctacaccgtgatcaacaaaaagagcggcgagatcgtgcccatggaggtgaacttcaacttcgacgaccccaacctgatcatcctgcctctggcctttggcaagagacagggcagagaattcatctggaacgacctgctgtccctggaaaccggcagcctgaagctggccaacggaagagtgatcgagaagacactgtacaacagaagaacccggcaggatgagcctgccctgttcgtggccctgaccttcgagcggcgggaggtcctggactcctccaatatcaaaccaatgaacctgatcggcgtggcaagaggcgaaaacatccccgccgtgatcgccctgaccgaccccgagggctgcccactgagccggtttaaggatagcctgggaaacccaacccacatcctgagaatcggcgagagctataaggagaagcagcggaccatccaggccaagaaggaggtggagcagcggagagccggcggctacagccggaagtacgccagcaaagccaagaatctggcagacgatatggtgagaaacaccgctagagatctgctgtactacgccgtgacccaggatgccatgctgatcttcgccaacctgagccggggcttcggccggcagggcaagcggaccttcatggccgagagacagtacacacggatggaggactggctgaccgccaagctggcctacgagggcctgagcaagacctacctgtccaagacactggcccagtacacctccaagacatgcagcaactgtgggtttaccatcaccagcgccgactacgacagggtgctggagaagctgaagaagacagcaacaggctggatgaccacaattaacggcaaggagctgaaggtggagggccagattacctactacaacagatacaagagacagaacgtagtcaaggacctgtccgtcgagctggatagactgagcgaagaatctgtgaacaacgacatctcctcctggacaaagggcagaagcggagaagctctgagcctcctgaagaaaagattctcccatagacccgtgcaggagaagttcgtgtgcctgaactgcggcttcgagacacacgcagccgagcaagccgccctgaacatcgccagatcctggctgttcctgcggagccaggagtacaagaaataccagacaaacaagacaaccggcaacaccgataagagagccttcgtcgagacctggcagtccttttaccggaagaagcttaaggaggtgtggaaacctgccgtgcggtctggcggatctggcggaggctcctgccagggccagcctgagcttcgaggacgtggccgtgggcttcagctgggaggagtggcagctgctggcccccagccagaaggacctgtacagggacgtgatgctggagaactacaggaacctggtgagcgtgggctacgaggccagcaagcccgacagcgtgttccagctggagcagggcgagcccccctggatggtggagggcgccgcccagagccagacctgccaggaggagatctgggagggatctggctccggcagcggccccaagaaaaagagaaaagtctaagctgccttctgcggggcttgccttctggccatgcccttcttctctcccttgcacctgtacctcttggtctttgaataaagcctgagtaggaaggctagcaaaaaaaaaaaaaaaaaaaaaaaaaaaaaaaaaaaaaaaaaaaaaaaaaaaaaaaaaaaaaaaaaaaaaaaaaaaaaaaa

SEQ ID NO: 16259 - RNA, 9485 nt, synthetic construct
  source 1..9485: mol_type = other RNA
aggaaataagagagaaaagaagagtaagaagaaatataagagccaccatggcccctaagaagaagcgtaaagtgagccggatggaacgcctcgtctacgaggtgcggcagaagtgcagaaacatcgaggacatctgcatctcctgcggatctctgaacgtgaccctggagcacccactgttcatcggcggcatgtgccagaactgtaaaaactgttttctggagtgtgcctatcaatacgacgatgacggctaccagagctactgcaccatctgttgcggcggaagagaggtgctgatgtgtggaaataacaactgctgccggtgcttctgcgtggaatgcgtggacctgctggtgggccccggcgccgcccaggccgctattaaggaagatccttggaactgctacatgtgcggccacaagggcacatacggcctgctgagacggagagaggactggcctagcagactgcagatgttcttcgccaataaccacgaccaggagttcgacccccctaaggtgtaccctcccgtccccgccgagaagagaaagcccatccgggtcctgagcctgttcgatggcatcgccaccggtctgctggtgctgaaggacctgggcatccaggtggataggtacattgcctccgaggtgtgcgaggactccatcaccgtgggaatggtgcgtcatcagggcaagatcatgtacgtgggcgacgtgcggagcgtgacacagaagcatatccaggagtggggccctttcgacctggtgatcggcggcagcccttgcaatgacctgagcatcgtgaacccagcccggaagggcctgtacgagggaaccggcagactgttcttcgagttttacagactgctgcacgacgcccggcctaaggaaggcgacgaccggcccttcttttggctgttcgagaatgtggtggccatgggagtcagcgacaagcgggatattagccggttcctggagagcaaccccgtgatgatcgatgccaaggaagtgagcgccgcccaccgggccagatacttctggggcaatctgcctggcatgaacagacccctggccagcaccgtgaacgacaagctggagctgcaggagtgcctggagcacggccggatcgccaagttcagcaaggtgagaaccatcaccacccgaagcaacagcatcaaacaaggcaaggaccagcactttcctgtgttcatgaacgagaaggaggacatcctgtggtgtaccgagatggagagagtgttcgggttcccagtccactacacagatgtcagcaacatgtctagactggccagacagagactgctgggaagaagctggtccgtccctgtgatcagacacctgttcgcccctctgaaggagtacttcgcctgcgtgagcagcggcaacagcaacgccaacagccggggccccagcttctctagcggcctggtgccactgtccctgagagggagccacatgggccccatggagatctacaaaaccgtgagcgcctggaagcggcagcctgtgcgcgtgctgagcctgtttcggaatatcgataaagtcctgaaaagcctgggattcctggagagcggctctggctccggcggtggcaccctgaagtacgtggaggatgtgacaaacgtggtcagacgggatgtggagaagtggggccccttcgatctggtgtacggcagcacccaacccctgggcagctcttgtgaccggtgccctggctggtacatgtttcagttccaccggatcctgcagtacgccctgccgagacaggagtcccagcggccattcttttggattttcatggacaacttgctgctgaccgaggatgaccaggaaactaccactcggttcctgcagaccgaagccgtgaccctgcaggacgtgagaggccgggactaccagaacgccatgcgggtgtggtccaacatccctggactgaaaagcaagcacgcacctctgacccctaaagaagaggagtacctgcaggcccaggtgcggagcagaagcaagctggacgcccctaaggtggatctgctggtgaagaattgcctcctgcccctgagagagtacttcaagtatttcagccagaatagtctgcccctgggaggcagcggcggcggcgccctggtgacatttgaggacgtcgccgtgcggttcacccaggaggaatgggctctgctggatccttctcagaaaatcctgtaccgggacgtgatgagagagacataccggaatctgacctccgtgggcatcaactgggaatgttgggaccttgaagcctgcttcagaagcctgggaagaaacctgagagtgcaggtggtgaagagaaagtgcgagctgaccaacagcggcccctgcgccgagggcggcccaagcagcggcgcccctcctcccagcggcggcagcccagccggctccccaacctctaccgaggagggcacctctgagtccgccacccccgagagcggccctggcacctccaccgagcccagcgagggcagcgcacccggcagccctgccggcagccccacctccacagaggagggaaccagcaccgagcccagcgaaggcagcgccccaggcaccagcaccgagcctagtgagcaggagattaaacggatcaacaagatcagaagaagacttgtgaaagacagcaacaccaagaaggccggcaagacaggccccatgaaaaccctgctggttagagtgatgacacccgatctgagagagcggctggaaaacctgagaaagaagcctgaaaatatcccccagcccatcagcaatacatctagagccaacctgaataagctgctgaccgattacaccgaaatgaagaaggcgatcctgcatgtgtactgggaagagttccagaaggaccctgtgggcctgatgagccgggtggcccagcctgccagcaagaagatcgatcagaacaagctgaaacctgagatggacgagaagggcaacctgaccaccgccggctttgcctgctctcagtgtggccagcccctgttcgtgtacaagctggagcaggtgtctgagaagggcaaggcttacaccaactacttcggacggtgcaatgtggccgagcacgaaaagctgatcctgctggcccagctgaagcccgagaaggatagcgacgaagccgtgacatatagcctgggaaagtttgggcagagggccctggatttctacagcattcatgtgaccaaggagtccacccaccccgtgaagcccctggcccagatcgccggaaacagatacgcctccggacctgtgggaaaggccctgagcgacgcatgtatgggcacaatcgcctccttcctgtctaagtaccaggacatcatcatcgaacaccagaaggtggtgaagggcaaccagaagagactggagagcctgcgggagctggccggcaaggaaaacctggaataccctagcgtgaccctgccacctcagcctcacaccaaggagggcgttgatgcctacaacgaagtgatcgcccgggtgcgaatgtgggtgaacctgaacctgtggcagaagctgaagctaagcagagatgatgccaagcctctgctgagactgaagggattcccttcctttcctctggtcgagagacaggccaacgaagtggactggtgggacatggtgtgtaacgtgaagaagctgatcaacgagaaaaaggaggatggcaaggtgttttggcagaatctggctggctacaagagacaggaagccctgagaccatacctgagcagcgaggaagatcggaagaagggaaagaaattcgctcggtaccagctgggcgacctgctgctgcacctggaaaagaagcacggcgaggactggggaaaggtgtacgacgaggcctgggagcggattgacaagaaagtggaaggcctgagcaagcacatcaagctggaagaggaacggagaagcgaggacgcccagagcaaggccgccctgaccgactggctgcgggctaaggccagcttcgtgatcgagggcctgaaggaggccgacaaggacgagttctgcagatgcgagctgaagctgcagaagtggtacggggacctgcggggaaagcccttcgccatcgaagccgagaacagcatcctggacatcagcggcttcagcaagcagtacaactgtgccttcatctggcagaaggacggcgtgaagaagctgaacctgtacctgatcatcaactacttcaagggcggcaagctgcggttcaagaagatcaaacctgaagccttcgaagccaacagattctacaccgtgatcaacaaaaagagcggcgagatcgtgcccatggaggtgaacttcaacttcgacgaccccaacctgatcatcctgcctctggcctttggcaagagacagggcagagaattcatctggaacgacctgctgtccctggaaaccggcagcctgaagctggccaacggaagagtgatcgagaagacactgtacaacagaagaacccggcaggatgagcctgccctgttcgtggccctgaccttcgagcggcgggaggtcctggactcctccaatatcaaaccaatgaacctgatcggcgtggcaagaggcgaaaacatccccgccgtgatcgccctgaccgaccccgagggctgcccactgagccggtttaaggatagcctgggaaacccaacccacatcctgagaatcggcgagagctataaggagaagcagcggaccatccaggccaagaaggaggtggagcagcggagagccggcggctacagccggaagtacgccagcaaagccaagaatctggcagacgatatggtgagaaacaccgctagagatctgctgtactacgccgtgacccaggatgccatgctgatcttcgccaacctgagccggggcttcggccggcagggcaagcggaccttcatggccgagagacagtacacacggatggaggactggctgaccgccaagctggcctacgagggcctgagcaagacctacctgtccaagacactggcccagtacacctccaagacatgcagcaactgtgggtttaccatcaccagcgccgactacgacagggtgctggagaagctgaagaagacagcaacaggctggatgaccacaattaacggcaaggagctgaaggtggagggccagattacctactacaacagatacaagagacagaacgtagtcaaggacctgtccgtcgagctggatagactgagcgaagaatctgtgaacaacgacatctcctcctggacaaagggcagaagcggagaagctctgagcctcctgaagaaaagattctcccatagacccgtgcaggagaagttcgtgtgcctgaactgcggcttcgagacacacgcagccgagcaagccgccctgaacatcgccagatcctggctgttcctgcggagccaggagtacaagaaataccagacaaacaagacaaccggcaacaccgataagagagccttcgtcgagacctggcagtccttttaccggaagaagcttaaggaggtgtggaaacctgccgtgcggtctggcggatctggcggaggctccatggcccacatggccttcagggacgtggccgtggacttcacccaggacgagtggaggctgctgagccccgcccagaggaccctgtacagggaggtgatgctggagaactacagcaacctggtgagcctgggcatcagcttcagcaagcccgagctgatcacccagctggagcagggcaaggagacctggagggaggagaagaactgcagccccgccacctgccccgccgaccccgagcccgagggcggcccaagcagcggcgcccctcctcccagcggcggcagcccagccggctccccaacctctaccgaggagggcacctctgagtccgccacccccgagagcggccctggcacctccaccgagcccagcgagggcagcgcacccggcagccctgccggcagccccacctccacagaggagggaaccagcaccgagcccagcgaaggcagcgccccaggcaccagcaccgagcctagtgagcaggagattaaacggatcaacaagatcagaagaagacttgtgaaagacagcaacaccaagaaggccggcaagacaggccccatgaaaaccctgctggttagagtgatgacacccgatctgagagagcggctggaaaacctgagaaagaagcctgaaaatatcccccagcccatcagcaatacatctagagccaacctgaataagctgctgaccgattacaccgaaatgaagaaggcgatcctgcatgtgtactgggaagagttccagaaggaccctgtgggcctgatgagccgggtggcccagcctgccagcaagaagatcgatcagaacaagctgaaacctgagatggacgagaagggcaacctgaccaccgccggctttgcctgctctcagtgtggccagcccctgttcgtgtacaagctggagcaggtgtctgagaagggcaaggcttacaccaactacttcggacggtgcaatgtggccgagcacgaaaagctgatcctgctggcccagctgaagcccgagaaggatagcgacgaagccgtgacatatagcctgggaaagtttgggcagagggccctggatttctacagcattcatgtgaccaaggagtccacccaccccgtgaagcccctggcccagatcgccggaaacagatacgcctccggacctgtgggaaaggccctgagcgacgcatgtatgggcacaatcgcctccttcctgtctaagtaccaggacatcatcatcgaacaccagaaggtggtgaagggcaaccagaagagactggagagcctgcgggagctggccggcaaggaaaacctggaataccctagcgtgaccctgccacctcagcctcacaccaaggagggcgttgatgcctacaacgaagtgatcgcccgggtgcgaatgtgggtgaacctgaacctgtggcagaagctgaagctaagcagagatgatgccaagcctctgctgagactgaagggattcccttcctttcctctggtcgagagacaggccaacgaagtggactggtgggacatggtgtgtaacgtgaagaagctgatcaacgagaaaaaggaggatggcaaggtgttttggcagaatctggctggctacaagagacaggaagccctgagaccatacctgagcagcgaggaagatcggaagaagggaaagaaattcgctcggtaccagctgggcgacctgctgctgcacctggaaaagaagcacggcgaggactggggaaaggtgtacgacgaggcctgggagcggattgacaagaaagtggaaggcctgagcaagcacatcaagctggaagaggaacggagaagcgaggacgcccagagcaaggccgccctgaccgactggctgcgggctaaggccagcttcgtgatcgagggcctgaaggaggccgacaaggacgagttctgcagatgcgagctgaagctgcagaagtggtacggggacctgcggggaaagcccttcgccatcgaagccgagaacagcatcctggacatcagcggcttcagcaagcagtacaactgtgccttcatctggcagaaggacggcgtgaagaagctgaacctgtacctgatcatcaactacttcaagggcggcaagctgcggttcaagaagatcaaacctgaagccttcgaagccaacagattctacaccgtgatcaacaaaaagagcggcgagatcgtgcccatggaggtgaacttcaacttcgacgaccccaacctgatcatcctgcctctggcctttggcaagagacagggcagagaattcatctggaacgacctgctgtccctggaaaccggcagcctgaagctggccaacggaagagtgatcgagaagacactgtacaacagaagaacccggcaggatgagcctgccctgttcgtggccctgaccttcgagcggcgggaggtcctggactcctccaatatcaaaccaatgaacctgatcggcgtggcaagaggcgaaaacatccccgccgtgatcgccctgaccgaccccgagggctgcccactgagccggtttaaggatagcctgggaaacccaacccacatcctgagaatcggcgagagctataaggagaagcagcggaccatccaggccaagaaggaggtggagcagcggagagccggcggctacagccggaagtacgccagcaaagccaagaatctggcagacgatatggtgagaaacaccgctagagatctgctgtactacgccgtgacccaggatgccatgctgatcttcgccaacctgagccggggcttcggccggcagggcaagcggaccttcatggccgagagacagtacacacggatggaggactggctgaccgccaagctggcctacgagggcctgagcaagacctacctgtccaagacactggcccagtacacctccaagacatgcagcaactgtgggtttaccatcaccagcgccgactacgacagggtgctggagaagctgaagaagacagcaacaggctggatgaccacaattaacggcaaggagctgaaggtggagggccagattacctactacaacagatacaagagacagaacgtagtcaaggacctgtccgtcgagctggatagactgagcgaagaatctgtgaacaacgacatctcctcctggacaaagggcagaagcggagaagctctgagcctcctgaagaaaagattctcccatagacccgtgcaggagaagttcgtgtgcctgaactgcggcttcgagacacacgcagccgagcaagccgccctgaacatcgccagatcctggctgttcctgcggagccaggagtacaagaaataccagacaaacaagacaaccggcaacaccgataagagagccttcgtcgagacctggcagtccttttaccggaagaagcttaaggaggtgtggaaacctgccgtgcggtctggcggatctggcggaggctcctatggcccacatggccttcagggacgtggccgtggacttcacccaggacgagtggaggctgctgagccccgcccagaggaccctgtacagggaggtgatgctggagaactacagcaacctggtgagcctgggcatcagcttcagcaagcccgagctgatcacccagctggagcagggcaaggagacctggagggaggagaagaactgcagccccgccacctgccccgccgaccccgagcccgagggatctggctccggcagcggccccaagaaaaagagaaaagtctaagctgccttctgcggggcttgccttctggccatgcccttcttctctcccttgcacctgtacctcttggtctttgaataaagcctgagtaggaaggctagcaaaaaaaaaaaaaaaaaaaaaaaaaaaaaaaaaaaaaaaaaaaaaaaaaaaaaaaaaaaaaaaaaaaaaaaaaaaaaaaa

SEQ ID NO: 16260 - RNA, 9485 nt, synthetic construct
  source 1..9485: mol_type = other RNA
aggaaataagagagaaaagaagagtaagaagaaatataagagccaccatggcccctaagaagaagcgtaaagtgagccggatggaacgcctcgtctacgaggtgcggcagaagtgcagaaacatcgaggacatctgcatctcctgcggatctctgaacgtgaccctggagcacccactgttcatcggcggcatgtgccagaactgtaaaaactgttttctggagtgtgcctatcaatacgacgatgacggctaccagagctactgcaccatctgttgcggcggaagagaggtgctgatgtgtggaaataacaactgctgccggtgcttctgcgtggaatgcgtggacctgctggtgggccccggcgccgcccaggccgctattaaggaagatccttggaactgctacatgtgcggccacaagggcacatacggcctgctgagacggagagaggactggcctagcagactgcagatgttcttcgccaataaccacgaccaggagttcgacccccctaaggtgtaccctcccgtccccgccgagaagagaaagcccatccgggtcctgagcctgttcgatggcatcgccaccggtctgctggtgctgaaggacctgggcatccaggtggataggtacattgcctccgaggtgtgcgaggactccatcaccgtgggaatggtgcgtcatcagggcaagatcatgtacgtgggcgacgtgcggagcgtgacacagaagcatatccaggagtggggccctttcgacctggtgatcggcggcagcccttgcaatgacctgagcatcgtgaacccagcccggaagggcctgtacgagggaaccggcagactgttcttcgagttttacagactgctgcacgacgcccggcctaaggaaggcgacgaccggcccttcttttggctgttcgagaatgtggtggccatgggagtcagcgacaagcgggatattagccggttcctggagagcaaccccgtgatgatcgatgccaaggaagtgagcgccgcccaccgggccagatacttctggggcaatctgcctggcatgaacagacccctggccagcaccgtgaacgacaagctggagctgcaggagtgcctggagcacggccggatcgccaagttcagcaaggtgagaaccatcaccacccgaagcaacagcatcaaacaaggcaaggaccagcactttcctgtgttcatgaacgagaaggaggacatcctgtggtgtaccgagatggagagagtgttcgggttcccagtccactacacagatgtcagcaacatgtctagactggccagacagagactgctgggaagaagctggtccgtccctgtgatcagacacctgttcgcccctctgaaggagtacttcgcctgcgtgagcagcggcaacagcaacgccaacagccggggccccagcttctctagcggcctggtgccactgtccctgagagggagccacatgggccccatggagatctacaaaaccgtgagcgcctggaagcggcagcctgtgcgcgtgctgagcctgtttcggaatatcgataaagtcctgaaaagcctgggattcctggagagcggctctggctccggcggtggcaccctgaagtacgtggaggatgtgacaaacgtggtcagacgggatgtggagaagtggggccccttcgatctggtgtacggcagcacccaacccctgggcagctcttgtgaccggtgccctggctggtacatgtttcagttccaccggatcctgcagtacgccctgccgagacaggagtcccagcggccattcttttggattttcatggacaacttgctgctgaccgaggatgaccaggaaactaccactcggttcctgcagaccgaagccgtgaccctgcaggacgtgagaggccgggactaccagaacgccatgcgggtgtggtccaacatccctggactgaaaagcaagcacgcacctctgacccctaaagaagaggagtacctgcaggcccaggtgcggagcagaagcaagctggacgcccctaaggtggatctgctggtgaagaattgcctcctgcccctgagagagtacttcaagtatttcagccagaatagtctgcccctgggaggcagcggcggcggcgccctggtgacatttgaggacgtcgccgtgcggttcacccaggaggaatgggctctgctggatccttctcagaaaatcctgtaccgggacgtgatgagagagacataccggaatctgacctccgtgggcatcaactgggaatgttgggaccttgaagcctgcttcagaagcctgggaagaaacctgagagtgcaggtggtgaagagaaagtgcgagctgaccaacagcggcccctgcgccgagggcggcccaagcagcggcgcccctcctcccagcggcggcagcccagccggctccccaacctctaccgaggagggcacctctgagtccgccacccccgagagcggccctggcacctccaccgagcccagcgagggcagcgcacccggcagccctgccggcagccccacctccacagaggagggaaccagcaccgagcccagcgaaggcagcgccccaggcaccagcaccgagcctagtgagcaggagattaaacggatcaacaagatcagaagaagacttgtgaaagacagcaacaccaagaaggccggcaagacaggccccatgaaaaccctgctggttagagtgatgacacccgatctgagagagcggctggaaaacctgagaaagaagcctgaaaatatcccccagcccatcagcaatacatctagagccaacctgaataagctgctgaccgattacaccgaaatgaagaaggcgatcctgcatgtgtactgggaagagttccagaaggaccctgtgggcctgatgagccgggtggcccagcctgccagcaagaagatcgatcagaacaagctgaaacctgagatggacgagaagggcaacctgaccaccgccggctttgcctgctctcagtgtggccagcccctgttcgtgtacaagctggagcaggtgtctgagaagggcaaggcttacaccaactacttcggacggtgcaatgtggccgagcacgaaaagctgatcctgctggcccagctgaagcccgagaaggatagcgacgaagccgtgacatatagcctgggaaagtttgggcagagggccctggatttctacagcattcatgtgaccaaggagtccacccaccccgtgaagcccctggcccagatcgccggaaacagatacgcctccggacctgtgggaaaggccctgagcgacgcatgtatgggcacaatcgcctccttcctgtctaagtaccaggacatcatcatcgaacaccagaaggtggtgaagggcaaccagaagagactggagagcctgcgggagctggccggcaaggaaaacctggaataccctagcgtgaccctgccacctcagcctcacaccaaggagggcgttgatgcctacaacgaagtgatcgcccgggtgcgaatgtgggtgaacctgaacctgtggcagaagctgaagctaagcagagatgatgccaagcctctgctgagactgaagggattcccttcctttcctctggtcgagagacaggccaacgaagtggactggtgggacatggtgtgtaacgtgaagaagctgatcaacgagaaaaaggaggatggcaaggtgttttggcagaatctggctggctacaagagacaggaagccctgagaccatacctgagcagcgaggaagatcggaagaagggaaagaaattcgctcggtaccagctgggcgacctgctgctgcacctggaaaagaagcacggcgaggactggggaaaggtgtacgacgaggcctgggagcggattgacaagaaagtggaaggcctgagcaagcacatcaagctggaagaggaacggagaagcgaggacgcccagagcaaggccgccctgaccgactggctgcgggctaaggccagcttcgtgatcgagggcctgaaggaggccgacaaggacgagttctgcagatgcgagctgaagctgcagaagtggtacggggacctgcggggaaagcccttcgccatcgaagccgagaacagcatcctggacatcagcggcttcagcaagcagtacaactgtgccttcatctggcagaaggacggcgtgaagaagctgaacctgtacctgatcatcaactacttcaagggcggcaagctgcggttcaagaagatcaaacctgaagccttcgaagccaacagattctacaccgtgatcaacaaaaagagcggcgagatcgtgcccatggaggtgaacttcaacttcgacgaccccaacctgatcatcctgcctctggcctttggcaagagacagggcagagaattcatctggaacgacctgctgtccctggaaaccggcagcctgaagctggccaacggaagagtgatcgagaagacactgtacaacagaagaacccggcaggatgagcctgccctgttcgtggccctgaccttcgagcggcgggaggtcctggactcctccaatatcaaaccaatgaacctgatcggcgtggcaagaggcgaaaacatccccgccgtgatcgccctgaccgaccccgagggctgcccactgagccggtttaaggatagcctgggaaacccaacccacatcctgagaatcggcgagagctataaggagaagcagcggaccatccaggccaagaaggaggtggagcagcggagagccggcggctacagccggaagtacgccagcaaagccaagaatctggcagacgatatggtgagaaacaccgctagagatctgctgtactacgccgtgacccaggatgccatgctgatcttcgccaacctgagccggggcttcggccggcagggcaagcggaccttcatggccgagagacagtacacacggatggaggactggctgaccgccaagctggcctacgagggcctgagcaagacctacctgtccaagacactggcccagtacacctccaagacatgcagcaactgtgggtttaccatcaccagcgccgactacgacagggtgctggagaagctgaagaagacagcaacaggctggatgaccacaattaacggcaaggagctgaaggtggagggccagattacctactacaacagatacaagagacagaacgtagtcaaggacctgtccgtcgagctggatagactgagcgaagaatctgtgaacaacgacatctcctcctggacaaagggcagaagcggagaagctctgagcctcctgaagaaaagattctcccatagacccgtgcaggagaagttcgtgtgcctgaactgcggcttcgagacacacgcagccgagcaagccgccctgaacatcgccagatcctggctgttcctgcggagccaggagtacaagaaataccagacaaacaagacaaccggcaacaccgataagagagccttcgtcgagacctggcagtccttttaccggaagaagcttaaggaggtgtggaaacctgccgtgcggtctggcggatctggcggaggctccatggcccacttccagggcagcgtgaccttcgaggacgtggccatcgccttcagccagcaggagtgggagagcctggacagcagccagaggggcctgtacagggacgtgatgctggagaactacaggaacctggtgagcatgggccacagcctgagcaagccccacgtgatcgccctgctggagaggtggaaggagcccaaggtgaccgagaggaaggacggcaggaggtggtgcaccgacctgggcggcccaagcagcggcgcccctcctcccagcggcggcagcccagccggctccccaacctctaccgaggagggcacctctgagtccgccacccccgagagcggccctggcacctccaccgagcccagcgagggcagcgcacccggcagccctgccggcagccccacctccacagaggagggaaccagcaccgagcccagcgaaggcagcgccccaggcaccagcaccgagcctagtgagcaggagattaaacggatcaacaagatcagaagaagacttgtgaaagacagcaacaccaagaaggccggcaagacaggccccatgaaaaccctgctggttagagtgatgacacccgatctgagagagcggctggaaaacctgagaaagaagcctgaaaatatcccccagcccatcagcaatacatctagagccaacctgaataagctgctgaccgattacaccgaaatgaagaaggcgatcctgcatgtgtactgggaagagttccagaaggaccctgtgggcctgatgagccgggtggcccagcctgccagcaagaagatcgatcagaacaagctgaaacctgagatggacgagaagggcaacctgaccaccgccggctttgcctgctctcagtgtggccagcccctgttcgtgtacaagctggagcaggtgtctgagaagggcaaggcttacaccaactacttcggacggtgcaatgtggccgagcacgaaaagctgatcctgctggcccagctgaagcccgagaaggatagcgacgaagccgtgacatatagcctgggaaagtttgggcagagggccctggatttctacagcattcatgtgaccaaggagtccacccaccccgtgaagcccctggcccagatcgccggaaacagatacgcctccggacctgtgggaaaggccctgagcgacgcatgtatgggcacaatcgcctccttcctgtctaagtaccaggacatcatcatcgaacaccagaaggtggtgaagggcaaccagaagagactggagagcctgcgggagctggccggcaaggaaaacctggaataccctagcgtgaccctgccacctcagcctcacaccaaggagggcgttgatgcctacaacgaagtgatcgcccgggtgcgaatgtgggtgaacctgaacctgtggcagaagctgaagctaagcagagatgatgccaagcctctgctgagactgaagggattcccttcctttcctctggtcgagagacaggccaacgaagtggactggtgggacatggtgtgtaacgtgaagaagctgatcaacgagaaaaaggaggatggcaaggtgttttggcagaatctggctggctacaagagacaggaagccctgagaccatacctgagcagcgaggaagatcggaagaagggaaagaaattcgctcggtaccagctgggcgacctgctgctgcacctggaaaagaagcacggcgaggactggggaaaggtgtacgacgaggcctgggagcggattgacaagaaagtggaaggcctgagcaagcacatcaagctggaagaggaacggagaagcgaggacgcccagagcaaggccgccctgaccgactggctgcgggctaaggccagcttcgtgatcgagggcctgaaggaggccgacaaggacgagttctgcagatgcgagctgaagctgcagaagtggtacggggacctgcggggaaagcccttcgccatcgaagccgagaacagcatcctggacatcagcggcttcagcaagcagtacaactgtgccttcatctggcagaaggacggcgtgaagaagctgaacctgtacctgatcatcaactacttcaagggcggcaagctgcggttcaagaagatcaaacctgaagccttcgaagccaacagattctacaccgtgatcaacaaaaagagcggcgagatcgtgcccatggaggtgaacttcaacttcgacgaccccaacctgatcatcctgcctctggcctttggcaagagacagggcagagaattcatctggaacgacctgctgtccctggaaaccggcagcctgaagctggccaacggaagagtgatcgagaagacactgtacaacagaagaacccggcaggatgagcctgccctgttcgtggccctgaccttcgagcggcgggaggtcctggactcctccaatatcaaaccaatgaacctgatcggcgtggcaagaggcgaaaacatccccgccgtgatcgccctgaccgaccccgagggctgcccactgagccggtttaaggatagcctgggaaacccaacccacatcctgagaatcggcgagagctataaggagaagcagcggaccatccaggccaagaaggaggtggagcagcggagagccggcggctacagccggaagtacgccagcaaagccaagaatctggcagacgatatggtgagaaacaccgctagagatctgctgtactacgccgtgacccaggatgccatgctgatcttcgccaacctgagccggggcttcggccggcagggcaagcggaccttcatggccgagagacagtacacacggatggaggactggctgaccgccaagctggcctacgagggcctgagcaagacctacctgtccaagacactggcccagtacacctccaagacatgcagcaactgtgggtttaccatcaccagcgccgactacgacagggtgctggagaagctgaagaagacagcaacaggctggatgaccacaattaacggcaaggagctgaaggtggagggccagattacctactacaacagatacaagagacagaacgtagtcaaggacctgtccgtcgagctggatagactgagcgaagaatctgtgaacaacgacatctcctcctggacaaagggcagaagcggagaagctctgagcctcctgaagaaaagattctcccatagacccgtgcaggagaagttcgtgtgcctgaactgcggcttcgagacacacgcagccgagcaagccgccctgaacatcgccagatcctggctgttcctgcggagccaggagtacaagaaataccagacaaacaagacaaccggcaacaccgataagagagccttcgtcgagacctggcagtccttttaccggaagaagcttaaggaggtgtggaaacctgccgtgcggtctggcggatctggcggaggctcctatggcccacttccagggcagcgtgaccttcgaggacgtggccatcgccttcagccagcaggagtgggagagcctggacagcagccagaggggcctgtacagggacgtgatgctggagaactacaggaacctggtgagcatgggccacagcctgagcaagccccacgtgatcgccctgctggagaggtggaaggagcccaaggtgaccgagaggaaggacggcaggaggtggtgcaccgacctgggatctggctccggcagcggccccaagaaaaagagaaaagtctaagctgccttctgcggggcttgccttctggccatgcccttcttctctcccttgcacctgtacctcttggtctttgaataaagcctgagtaggaaggctagcaaaaaaaaaaaaaaaaaaaaaaaaaaaaaaaaaaaaaaaaaaaaaaaaaaaaaaaaaaaaaaaaaaaaaaaaaaaaaaaa

SEQ ID NO: 16261 - RNA, 9485 nt, synthetic construct
  source 1..9485: mol_type = other RNA
aggaaataagagagaaaagaagagtaagaagaaatataagagccaccatggcccctaagaagaagcgtaaagtgagccggatggaacgcctcgtctacgaggtgcggcagaagtgcagaaacatcgaggacatctgcatctcctgcggatctctgaacgtgaccctggagcacccactgttcatcggcggcatgtgccagaactgtaaaaactgttttctggagtgtgcctatcaatacgacgatgacggctaccagagctactgcaccatctgttgcggcggaagagaggtgctgatgtgtggaaataacaactgctgccggtgcttctgcgtggaatgcgtggacctgctggtgggccccggcgccgcccaggccgctattaaggaagatccttggaactgctacatgtgcggccacaagggcacatacggcctgctgagacggagagaggactggcctagcagactgcagatgttcttcgccaataaccacgaccaggagttcgacccccctaaggtgtaccctcccgtccccgccgagaagagaaagcccatccgggtcctgagcctgttcgatggcatcgccaccggtctgctggtgctgaaggacctgggcatccaggtggataggtacattgcctccgaggtgtgcgaggactccatcaccgtgggaatggtgcgtcatcagggcaagatcatgtacgtgggcgacgtgcggagcgtgacacagaagcatatccaggagtggggccctttcgacctggtgatcggcggcagcccttgcaatgacctgagcatcgtgaacccagcccggaagggcctgtacgagggaaccggcagactgttcttcgagttttacagactgctgcacgacgcccggcctaaggaaggcgacgaccggcccttcttttggctgttcgagaatgtggtggccatgggagtcagcgacaagcgggatattagccggttcctggagagcaaccccgtgatgatcgatgccaaggaagtgagcgccgcccaccgggccagatacttctggggcaatctgcctggcatgaacagacccctggccagcaccgtgaacgacaagctggagctgcaggagtgcctggagcacggccggatcgccaagttcagcaaggtgagaaccatcaccacccgaagcaacagcatcaaacaaggcaaggaccagcactttcctgtgttcatgaacgagaaggaggacatcctgtggtgtaccgagatggagagagtgttcgggttcccagtccactacacagatgtcagcaacatgtctagactggccagacagagactgctgggaagaagctggtccgtccctgtgatcagacacctgttcgcccctctgaaggagtacttcgcctgcgtgagcagcggcaacagcaacgccaacagccggggccccagcttctctagcggcctggtgccactgtccctgagagggagccacatgggccccatggagatctacaaaaccgtgagcgcctggaagcggcagcctgtgcgcgtgctgagcctgtttcggaatatcgataaagtcctgaaaagcctgggattcctggagagcggctctggctccggcggtggcaccctgaagtacgtggaggatgtgacaaacgtggtcagacgggatgtggagaagtggggccccttcgatctggtgtacggcagcacccaacccctgggcagctcttgtgaccggtgccctggctggtacatgtttcagttccaccggatcctgcagtacgccctgccgagacaggagtcccagcggccattcttttggattttcatggacaacttgctgctgaccgaggatgaccaggaaactaccactcggttcctgcagaccgaagccgtgaccctgcaggacgtgagaggccgggactaccagaacgccatgcgggtgtggtccaacatccctggactgaaaagcaagcacgcacctctgacccctaaagaagaggagtacctgcaggcccaggtgcggagcagaagcaagctggacgcccctaaggtggatctgctggtgaagaattgcctcctgcccctgagagagtacttcaagtatttcagccagaatagtctgcccctgggaggcagcggcggcggcgccctggtgacatttgaggacgtcgccgtgcggttcacccaggaggaatgggctctgctggatccttctcagaaaatcctgtaccgggacgtgatgagagagacataccggaatctgacctccgtgggcatcaactgggaatgttgggaccttgaagcctgcttcagaagcctgggaagaaacctgagagtgcaggtggtgaagagaaagtgcgagctgaccaacagcggcccctgcgccgagggcggcccaagcagcggcgcccctcctcccagcggcggcagcccagccggctccccaacctctaccgaggagggcacctctgagtccgccacccccgagagcggccctggcacctccaccgagcccagcgagggcagcgcacccggcagccctgccggcagccccacctccacagaggagggaaccagcaccgagcccagcgaaggcagcgccccaggcaccagcaccgagcctagtgagcaggagattaaacggatcaacaagatcagaagaagacttgtgaaagacagcaacaccaagaaggccggcaagacaggccccatgaaaaccctgctggttagagtgatgacacccgatctgagagagcggctggaaaacctgagaaagaagcctgaaaatatcccccagcccatcagcaatacatctagagccaacctgaataagctgctgaccgattacaccgaaatgaagaaggcgatcctgcatgtgtactgggaagagttccagaaggaccctgtgggcctgatgagccgggtggcccagcctgccagcaagaagatcgatcagaacaagctgaaacctgagatggacgagaagggcaacctgaccaccgccggctttgcctgctctcagtgtggccagcccctgttcgtgtacaagctggagcaggtgtctgagaagggcaaggcttacaccaactacttcggacggtgcaatgtggccgagcacgaaaagctgatcctgctggcccagctgaagcccgagaaggatagcgacgaagccgtgacatatagcctgggaaagtttgggcagagggccctggatttctacagcattcatgtgaccaaggagtccacccaccccgtgaagcccctggcccagatcgccggaaacagatacgcctccggacctgtgggaaaggccctgagcgacgcatgtatgggcacaatcgcctccttcctgtctaagtaccaggacatcatcatcgaacaccagaaggtggtgaagggcaaccagaagagactggagagcctgcgggagctggccggcaaggaaaacctggaataccctagcgtgaccctgccacctcagcctcacaccaaggagggcgttgatgcctacaacgaagtgatcgcccgggtgcgaatgtgggtgaacctgaacctgtggcagaagctgaagctaagcagagatgatgccaagcctctgctgagactgaagggattcccttcctttcctctggtcgagagacaggccaacgaagtggactggtgggacatggtgtgtaacgtgaagaagctgatcaacgagaaaaaggaggatggcaaggtgttttggcagaatctggctggctacaagagacaggaagccctgagaccatacctgagcagcgaggaagatcggaagaagggaaagaaattcgctcggtaccagctgggcgacctgctgctgcacctggaaaagaagcacggcgaggactggggaaaggtgtacgacgaggcctgggagcggattgacaagaaagtggaaggcctgagcaagcacatcaagctggaagaggaacggagaagcgaggacgcccagagcaaggccgccctgaccgactggctgcgggctaaggccagcttcgtgatcgagggcctgaaggaggccgacaaggacgagttctgcagatgcgagctgaagctgcagaagtggtacggggacctgcggggaaagcccttcgccatcgaagccgagaacagcatcctggacatcagcggcttcagcaagcagtacaactgtgccttcatctggcagaaggacggcgtgaagaagctgaacctgtacctgatcatcaactacttcaagggcggcaagctgcggttcaagaagatcaaacctgaagccttcgaagccaacagattctacaccgtgatcaacaaaaagagcggcgagatcgtgcccatggaggtgaacttcaacttcgacgaccccaacctgatcatcctgcctctggcctttggcaagagacagggcagagaattcatctggaacgacctgctgtccctggaaaccggcagcctgaagctggccaacggaagagtgatcgagaagacactgtacaacagaagaacccggcaggatgagcctgccctgttcgtggccctgaccttcgagcggcgggaggtcctggactcctccaatatcaaaccaatgaacctgatcggcgtggcaagaggcgaaaacatccccgccgtgatcgccctgaccgaccccgagggctgcccactgagccggtttaaggatagcctgggaaacccaacccacatcctgagaatcggcgagagctataaggagaagcagcggaccatccaggccaagaaggaggtggagcagcggagagccggcggctacagccggaagtacgccagcaaagccaagaatctggcagacgatatggtgagaaacaccgctagagatctgctgtactacgccgtgacccaggatgccatgctgatcttcgccaacctgagccggggcttcggccggcagggcaagcggaccttcatggccgagagacagtacacacggatggaggactggctgaccgccaagctggcctacgagggcctgagcaagacctacctgtccaagacactggcccagtacacctccaagacatgcagcaactgtgggtttaccatcaccagcgccgactacgacagggtgctggagaagctgaagaagacagcaacaggctggatgaccacaattaacggcaaggagctgaaggtggagggccagattacctactacaacagatacaagagacagaacgtagtcaaggacctgtccgtcgagctggatagactgagcgaagaatctgtgaacaacgacatctcctcctggacaaagggcagaagcggagaagctctgagcctcctgaagaaaagattctcccatagacccgtgcaggagaagttcgtgtgcctgaactgcggcttcgagacacacgcagccgagcaagccgccctgaacatcgccagatcctggctgttcctgcggagccaggagtacaagaaataccagacaaacaagacaaccggcaacaccgataagagagccttcgtcgagacctggcagtccttttaccggaagaagcttaaggaggtgtggaaacctgccgtgcggtctggcggatctggcggaggctccttccaggagcccgtgaccttcgaggacgtggccgtgtacttcacccagaaccagtgggccagcctggacagcgcccagagggccctgtacagggaggtgatgctggagaactacgccaacgtggccagcctggtgagccccttccccaggcccgacctgatcagccagctggagaggggcgaggccccctgggaccccaacccctgggaggccgaggacctgaggggcatctgccccggcgagggcggcccaagcagcggcgcccctcctcccagcggcggcagcccagccggctccccaacctctaccgaggagggcacctctgagtccgccacccccgagagcggccctggcacctccaccgagcccagcgagggcagcgcacccggcagccctgccggcagccccacctccacagaggagggaaccagcaccgagcccagcgaaggcagcgccccaggcaccagcaccgagcctagtgagcaggagattaaacggatcaacaagatcagaagaagacttgtgaaagacagcaacaccaagaaggccggcaagacaggccccatgaaaaccctgctggttagagtgatgacacccgatctgagagagcggctggaaaacctgagaaagaagcctgaaaatatcccccagcccatcagcaatacatctagagccaacctgaataagctgctgaccgattacaccgaaatgaagaaggcgatcctgcatgtgtactgggaagagttccagaaggaccctgtgggcctgatgagccgggtggcccagcctgccagcaagaagatcgatcagaacaagctgaaacctgagatggacgagaagggcaacctgaccaccgccggctttgcctgctctcagtgtggccagcccctgttcgtgtacaagctggagcaggtgtctgagaagggcaaggcttacaccaactacttcggacggtgcaatgtggccgagcacgaaaagctgatcctgctggcccagctgaagcccgagaaggatagcgacgaagccgtgacatatagcctgggaaagtttgggcagagggccctggatttctacagcattcatgtgaccaaggagtccacccaccccgtgaagcccctggcccagatcgccggaaacagatacgcctccggacctgtgggaaaggccctgagcgacgcatgtatgggcacaatcgcctccttcctgtctaagtaccaggacatcatcatcgaacaccagaaggtggtgaagggcaaccagaagagactggagagcctgcgggagctggccggcaaggaaaacctggaataccctagcgtgaccctgccacctcagcctcacaccaaggagggcgttgatgcctacaacgaagtgatcgcccgggtgcgaatgtgggtgaacctgaacctgtggcagaagctgaagctaagcagagatgatgccaagcctctgctgagactgaagggattcccttcctttcctctggtcgagagacaggccaacgaagtggactggtgggacatggtgtgtaacgtgaagaagctgatcaacgagaaaaaggaggatggcaaggtgttttggcagaatctggctggctacaagagacaggaagccctgagaccatacctgagcagcgaggaagatcggaagaagggaaagaaattcgctcggtaccagctgggcgacctgctgctgcacctggaaaagaagcacggcgaggactggggaaaggtgtacgacgaggcctgggagcggattgacaagaaagtggaaggcctgagcaagcacatcaagctggaagaggaacggagaagcgaggacgcccagagcaaggccgccctgaccgactggctgcgggctaaggccagcttcgtgatcgagggcctgaaggaggccgacaaggacgagttctgcagatgcgagctgaagctgcagaagtggtacggggacctgcggggaaagcccttcgccatcgaagccgagaacagcatcctggacatcagcggcttcagcaagcagtacaactgtgccttcatctggcagaaggacggcgtgaagaagctgaacctgtacctgatcatcaactacttcaagggcggcaagctgcggttcaagaagatcaaacctgaagccttcgaagccaacagattctacaccgtgatcaacaaaaagagcggcgagatcgtgcccatggaggtgaacttcaacttcgacgaccccaacctgatcatcctgcctctggcctttggcaagagacagggcagagaattcatctggaacgacctgctgtccctggaaaccggcagcctgaagctggccaacggaagagtgatcgagaagacactgtacaacagaagaacccggcaggatgagcctgccctgttcgtggccctgaccttcgagcggcgggaggtcctggactcctccaatatcaaaccaatgaacctgatcggcgtggcaagaggcgaaaacatccccgccgtgatcgccctgaccgaccccgagggctgcccactgagccggtttaaggatagcctgggaaacccaacccacatcctgagaatcggcgagagctataaggagaagcagcggaccatccaggccaagaaggaggtggagcagcggagagccggcggctacagccggaagtacgccagcaaagccaagaatctggcagacgatatggtgagaaacaccgctagagatctgctgtactacgccgtgacccaggatgccatgctgatcttcgccaacctgagccggggcttcggccggcagggcaagcggaccttcatggccgagagacagtacacacggatggaggactggctgaccgccaagctggcctacgagggcctgagcaagacctacctgtccaagacactggcccagtacacctccaagacatgcagcaactgtgggtttaccatcaccagcgccgactacgacagggtgctggagaagctgaagaagacagcaacaggctggatgaccacaattaacggcaaggagctgaaggtggagggccagattacctactacaacagatacaagagacagaacgtagtcaaggacctgtccgtcgagctggatagactgagcgaagaatctgtgaacaacgacatctcctcctggacaaagggcagaagcggagaagctctgagcctcctgaagaaaagattctcccatagacccgtgcaggagaagttcgtgtgcctgaactgcggcttcgagacacacgcagccgagcaagccgccctgaacatcgccagatcctggctgttcctgcggagccaggagtacaagaaataccagacaaacaagacaaccggcaacaccgataagagagccttcgtcgagacctggcagtccttttaccggaagaagcttaaggaggtgtggaaacctgccgtgcggtctggcggatctggcggaggctcctttccaggagcccgtgaccttcgaggacgtggccgtgtacttcacccagaaccagtgggccagcctggacagcgcccagagggccctgtacagggaggtgatgctggagaactacgccaacgtggccagcctggtgagccccttccccaggcccgacctgatcagccagctggagaggggcgaggccccctgggaccccaacccctgggaggccgaggacctgaggggcatctgccccggcgagggatctggctccggcagcggccccaagaaaaagagaaaagtctaagctgccttctgcggggcttgccttctggccatgcccttcttctctcccttgcacctgtacctcttggtctttgaataaagcctgagtaggaaggctagcaaaaaaaaaaaaaaaaaaaaaaaaaaaaaaaaaaaaaaaaaaaaaaaaaaaaaaaaaaaaaaaaaaaaaaaaaaaaaaaa

SEQ ID NO: 16262 - RNA, 9485 nt, synthetic construct
  source 1..9485: mol_type = other RNA
aggaaataagagagaaaagaagagtaagaagaaatataagagccaccatggcccctaagaagaagcgtaaagtgagccggatggaacgcctcgtctacgaggtgcggcagaagtgcagaaacatcgaggacatctgcatctcctgcggatctctgaacgtgaccctggagcacccactgttcatcggcggcatgtgccagaactgtaaaaactgttttctggagtgtgcctatcaatacgacgatgacggctaccagagctactgcaccatctgttgcggcggaagagaggtgctgatgtgtggaaataacaactgctgccggtgcttctgcgtggaatgcgtggacctgctggtgggccccggcgccgcccaggccgctattaaggaagatccttggaactgctacatgtgcggccacaagggcacatacggcctgctgagacggagagaggactggcctagcagactgcagatgttcttcgccaataaccacgaccaggagttcgacccccctaaggtgtaccctcccgtccccgccgagaagagaaagcccatccgggtcctgagcctgttcgatggcatcgccaccggtctgctggtgctgaaggacctgggcatccaggtggataggtacattgcctccgaggtgtgcgaggactccatcaccgtgggaatggtgcgtcatcagggcaagatcatgtacgtgggcgacgtgcggagcgtgacacagaagcatatccaggagtggggccctttcgacctggtgatcggcggcagcccttgcaatgacctgagcatcgtgaacccagcccggaagggcctgtacgagggaaccggcagactgttcttcgagttttacagactgctgcacgacgcccggcctaaggaaggcgacgaccggcccttcttttggctgttcgagaatgtggtggccatgggagtcagcgacaagcgggatattagccggttcctggagagcaaccccgtgatgatcgatgccaaggaagtgagcgccgcccaccgggccagatacttctggggcaatctgcctggcatgaacagacccctggccagcaccgtgaacgacaagctggagctgcaggagtgcctggagcacggccggatcgccaagttcagcaaggtgagaaccatcaccacccgaagcaacagcatcaaacaaggcaaggaccagcactttcctgtgttcatgaacgagaaggaggacatcctgtggtgtaccgagatggagagagtgttcgggttcccagtccactacacagatgtcagcaacatgtctagactggccagacagagactgctgggaagaagctggtccgtccctgtgatcagacacctgttcgcccctctgaaggagtacttcgcctgcgtgagcagcggcaacagcaacgccaacagccggggccccagcttctctagcggcctggtgccactgtccctgagagggagccacatgggccccatggagatctacaaaaccgtgagcgcctggaagcggcagcctgtgcgcgtgctgagcctgtttcggaatatcgataaagtcctgaaaagcctgggattcctggagagcggctctggctccggcggtggcaccctgaagtacgtggaggatgtgacaaacgtggtcagacgggatgtggagaagtggggccccttcgatctggtgtacggcagcacccaacccctgggcagctcttgtgaccggtgccctggctggtacatgtttcagttccaccggatcctgcagtacgccctgccgagacaggagtcccagcggccattcttttggattttcatggacaacttgctgctgaccgaggatgaccaggaaactaccactcggttcctgcagaccgaagccgtgaccctgcaggacgtgagaggccgggactaccagaacgccatgcgggtgtggtccaacatccctggactgaaaagcaagcacgcacctctgacccctaaagaagaggagtacctgcaggcccaggtgcggagcagaagcaagctggacgcccctaaggtggatctgctggtgaagaattgcctcctgcccctgagagagtacttcaagtatttcagccagaatagtctgcccctgggaggcagcggcggcggcgccctggtgacatttgaggacgtcgccgtgcggttcacccaggaggaatgggctctgctggatccttctcagaaaatcctgtaccgggacgtgatgagagagacataccggaatctgacctccgtgggcatcaactgggaatgttgggaccttgaagcctgcttcagaagcctgggaagaaacctgagagtgcaggtggtgaagagaaagtgcgagctgaccaacagcggcccctgcgccgagggcggcccaagcagcggcgcccctcctcccagcggcggcagcccagccggctccccaacctctaccgaggagggcacctctgagtccgccacccccgagagcggccctggcacctccaccgagcccagcgagggcagcgcacccggcagccctgccggcagccccacctccacagaggagggaaccagcaccgagcccagcgaaggcagcgccccaggcaccagcaccgagcctagtgagcaggagattaaacggatcaacaagatcagaagaagacttgtgaaagacagcaacaccaagaaggccggcaagacaggccccatgaaaaccctgctggttagagtgatgacacccgatctgagagagcggctggaaaacctgagaaagaagcctgaaaatatcccccagcccatcagcaatacatctagagccaacctgaataagctgctgaccgattacaccgaaatgaagaaggcgatcctgcatgtgtactgggaagagttccagaaggaccctgtgggcctgatgagccgggtggcccagcctgccagcaagaagatcgatcagaacaagctgaaacctgagatggacgagaagggcaacctgaccaccgccggctttgcctgctctcagtgtggccagcccctgttcgtgtacaagctggagcaggtgtctgagaagggcaaggcttacaccaactacttcggacggtgcaatgtggccgagcacgaaaagctgatcctgctggcccagctgaagcccgagaaggatagcgacgaagccgtgacatatagcctgggaaagtttgggcagagggccctggatttctacagcattcatgtgaccaaggagtccacccaccccgtgaagcccctggcccagatcgccggaaacagatacgcctccggacctgtgggaaaggccctgagcgacgcatgtatgggcacaatcgcctccttcctgtctaagtaccaggacatcatcatcgaacaccagaaggtggtgaagggcaaccagaagagactggagagcctgcgggagctggccggcaaggaaaacctggaataccctagcgtgaccctgccacctcagcctcacaccaaggagggcgttgatgcctacaacgaagtgatcgcccgggtgcgaatgtgggtgaacctgaacctgtggcagaagctgaagctaagcagagatgatgccaagcctctgctgagactgaagggattcccttcctttcctctggtcgagagacaggccaacgaagtggactggtgggacatggtgtgtaacgtgaagaagctgatcaacgagaaaaaggaggatggcaaggtgttttggcagaatctggctggctacaagagacaggaagccctgagaccatacctgagcagcgaggaagatcggaagaagggaaagaaattcgctcggtaccagctgggcgacctgctgctgcacctggaaaagaagcacggcgaggactggggaaaggtgtacgacgaggcctgggagcggattgacaagaaagtggaaggcctgagcaagcacatcaagctggaagaggaacggagaagcgaggacgcccagagcaaggccgccctgaccgactggctgcgggctaaggccagcttcgtgatcgagggcctgaaggaggccgacaaggacgagttctgcagatgcgagctgaagctgcagaagtggtacggggacctgcggggaaagcccttcgccatcgaagccgagaacagcatcctggacatcagcggcttcagcaagcagtacaactgtgccttcatctggcagaaggacggcgtgaagaagctgaacctgtacctgatcatcaactacttcaagggcggcaagctgcggttcaagaagatcaaacctgaagccttcgaagccaacagattctacaccgtgatcaacaaaaagagcggcgagatcgtgcccatggaggtgaacttcaacttcgacgaccccaacctgatcatcctgcctctggcctttggcaagagacagggcagagaattcatctggaacgacctgctgtccctggaaaccggcagcctgaagctggccaacggaagagtgatcgagaagacactgtacaacagaagaacccggcaggatgagcctgccctgttcgtggccctgaccttcgagcggcgggaggtcctggactcctccaatatcaaaccaatgaacctgatcggcgtggcaagaggcgaaaacatccccgccgtgatcgccctgaccgaccccgagggctgcccactgagccggtttaaggatagcctgggaaacccaacccacatcctgagaatcggcgagagctataaggagaagcagcggaccatccaggccaagaaggaggtggagcagcggagagccggcggctacagccggaagtacgccagcaaagccaagaatctggcagacgatatggtgagaaacaccgctagagatctgctgtactacgccgtgacccaggatgccatgctgatcttcgccaacctgagccggggcttcggccggcagggcaagcggaccttcatggccgagagacagtacacacggatggaggactggctgaccgccaagctggcctacgagggcctgagcaagacctacctgtccaagacactggcccagtacacctccaagacatgcagcaactgtgggtttaccatcaccagcgccgactacgacagggtgctggagaagctgaagaagacagcaacaggctggatgaccacaattaacggcaaggagctgaaggtggagggccagattacctactacaacagatacaagagacagaacgtagtcaaggacctgtccgtcgagctggatagactgagcgaagaatctgtgaacaacgacatctcctcctggacaaagggcagaagcggagaagctctgagcctcctgaagaaaagattctcccatagacccgtgcaggagaagttcgtgtgcctgaactgcggcttcgagacacacgcagccgagcaagccgccctgaacatcgccagatcctggctgttcctgcggagccaggagtacaagaaataccagacaaacaagacaaccggcaacaccgataagagagccttcgtcgagacctggcagtccttttaccggaagaagcttaaggaggtgtggaaacctgccgtgcggtctggcggatctggcggaggctccccccagaagagcgtgaccttcgaggacgtggccgtgtacttcacccaggccgagtgggacggcctgagccccgcccagaggaccctgtacagggacgtgatgctggagaactacggcaacgtggccagcctgggcttccccctgctgaagcccgccgtgatcagccagctggagggcggcggcgacctgggcggccccagccccctggccgccggcaccggcctgcagggcctgaggaccgtgggcggcccaagcagcggcgcccctcctcccagcggcggcagcccagccggctccccaacctctaccgaggagggcacctctgagtccgccacccccgagagcggccctggcacctccaccgagcccagcgagggcagcgcacccggcagccctgccggcagccccacctccacagaggagggaaccagcaccgagcccagcgaaggcagcgccccaggcaccagcaccgagcctagtgagcaggagattaaacggatcaacaagatcagaagaagacttgtgaaagacagcaacaccaagaaggccggcaagacaggccccatgaaaaccctgctggttagagtgatgacacccgatctgagagagcggctggaaaacctgagaaagaagcctgaaaatatcccccagcccatcagcaatacatctagagccaacctgaataagctgctgaccgattacaccgaaatgaagaaggcgatcctgcatgtgtactgggaagagttccagaaggaccctgtgggcctgatgagccgggtggcccagcctgccagcaagaagatcgatcagaacaagctgaaacctgagatggacgagaagggcaacctgaccaccgccggctttgcctgctctcagtgtggccagcccctgttcgtgtacaagctggagcaggtgtctgagaagggcaaggcttacaccaactacttcggacggtgcaatgtggccgagcacgaaaagctgatcctgctggcccagctgaagcccgagaaggatagcgacgaagccgtgacatatagcctgggaaagtttgggcagagggccctggatttctacagcattcatgtgaccaaggagtccacccaccccgtgaagcccctggcccagatcgccggaaacagatacgcctccggacctgtgggaaaggccctgagcgacgcatgtatgggcacaatcgcctccttcctgtctaagtaccaggacatcatcatcgaacaccagaaggtggtgaagggcaaccagaagagactggagagcctgcgggagctggccggcaaggaaaacctggaataccctagcgtgaccctgccacctcagcctcacaccaaggagggcgttgatgcctacaacgaagtgatcgcccgggtgcgaatgtgggtgaacctgaacctgtggcagaagctgaagctaagcagagatgatgccaagcctctgctgagactgaagggattcccttcctttcctctggtcgagagacaggccaacgaagtggactggtgggacatggtgtgtaacgtgaagaagctgatcaacgagaaaaaggaggatggcaaggtgttttggcagaatctggctggctacaagagacaggaagccctgagaccatacctgagcagcgaggaagatcggaagaagggaaagaaattcgctcggtaccagctgggcgacctgctgctgcacctggaaaagaagcacggcgaggactggggaaaggtgtacgacgaggcctgggagcggattgacaagaaagtggaaggcctgagcaagcacatcaagctggaagaggaacggagaagcgaggacgcccagagcaaggccgccctgaccgactggctgcgggctaaggccagcttcgtgatcgagggcctgaaggaggccgacaaggacgagttctgcagatgcgagctgaagctgcagaagtggtacggggacctgcggggaaagcccttcgccatcgaagccgagaacagcatcctggacatcagcggcttcagcaagcagtacaactgtgccttcatctggcagaaggacggcgtgaagaagctgaacctgtacctgatcatcaactacttcaagggcggcaagctgcggttcaagaagatcaaacctgaagccttcgaagccaacagattctacaccgtgatcaacaaaaagagcggcgagatcgtgcccatggaggtgaacttcaacttcgacgaccccaacctgatcatcctgcctctggcctttggcaagagacagggcagagaattcatctggaacgacctgctgtccctggaaaccggcagcctgaagctggccaacggaagagtgatcgagaagacactgtacaacagaagaacccggcaggatgagcctgccctgttcgtggccctgaccttcgagcggcgggaggtcctggactcctccaatatcaaaccaatgaacctgatcggcgtggcaagaggcgaaaacatccccgccgtgatcgccctgaccgaccccgagggctgcccactgagccggtttaaggatagcctgggaaacccaacccacatcctgagaatcggcgagagctataaggagaagcagcggaccatccaggccaagaaggaggtggagcagcggagagccggcggctacagccggaagtacgccagcaaagccaagaatctggcagacgatatggtgagaaacaccgctagagatctgctgtactacgccgtgacccaggatgccatgctgatcttcgccaacctgagccggggcttcggccggcagggcaagcggaccttcatggccgagagacagtacacacggatggaggactggctgaccgccaagctggcctacgagggcctgagcaagacctacctgtccaagacactggcccagtacacctccaagacatgcagcaactgtgggtttaccatcaccagcgccgactacgacagggtgctggagaagctgaagaagacagcaacaggctggatgaccacaattaacggcaaggagctgaaggtggagggccagattacctactacaacagatacaagagacagaacgtagtcaaggacctgtccgtcgagctggatagactgagcgaagaatctgtgaacaacgacatctcctcctggacaaagggcagaagcggagaagctctgagcctcctgaagaaaagattctcccatagacccgtgcaggagaagttcgtgtgcctgaactgcggcttcgagacacacgcagccgagcaagccgccctgaacatcgccagatcctggctgttcctgcggagccaggagtacaagaaataccagacaaacaagacaaccggcaacaccgataagagagccttcgtcgagacctggcagtccttttaccggaagaagcttaaggaggtgtggaaacctgccgtgcggtctggcggatctggcggaggctcctccccagaagagcgtgaccttcgaggacgtggccgtgtacttcacccaggccgagtgggacggcctgagccccgcccagaggaccctgtacagggacgtgatgctggagaactacggcaacgtggccagcctgggcttccccctgctgaagcccgccgtgatcagccagctggagggcggcggcgacctgggcggccccagccccctggccgccggcaccggcctgcagggcctgaggaccgtgggatctggctccggcagcggccccaagaaaaagagaaaagtctaagctgccttctgcggggcttgccttctggccatgcccttcttctctcccttgcacctgtacctcttggtctttgaataaagcctgagtaggaaggctagcaaaaaaaaaaaaaaaaaaaaaaaaaaaaaaaaaaaaaaaaaaaaaaaaaaaaaaaaaaaaaaaaaaaaaaaaaaaaaaaa

SEQ ID NO: 16263 - RNA, 9485 nt, synthetic construct
  source 1..9485: mol_type = other RNA
aggaaataagagagaaaagaagagtaagaagaaatataagagccaccatggcccctaagaagaagcgtaaagtgagccggatggaacgcctcgtctacgaggtgcggcagaagtgcagaaacatcgaggacatctgcatctcctgcggatctctgaacgtgaccctggagcacccactgttcatcggcggcatgtgccagaactgtaaaaactgttttctggagtgtgcctatcaatacgacgatgacggctaccagagctactgcaccatctgttgcggcggaagagaggtgctgatgtgtggaaataacaactgctgccggtgcttctgcgtggaatgcgtggacctgctggtgggccccggcgccgcccaggccgctattaaggaagatccttggaactgctacatgtgcggccacaagggcacatacggcctgctgagacggagagaggactggcctagcagactgcagatgttcttcgccaataaccacgaccaggagttcgacccccctaaggtgtaccctcccgtccccgccgagaagagaaagcccatccgggtcctgagcctgttcgatggcatcgccaccggtctgctggtgctgaaggacctgggcatccaggtggataggtacattgcctccgaggtgtgcgaggactccatcaccgtgggaatggtgcgtcatcagggcaagatcatgtacgtgggcgacgtgcggagcgtgacacagaagcatatccaggagtggggccctttcgacctggtgatcggcggcagcccttgcaatgacctgagcatcgtgaacccagcccggaagggcctgtacgagggaaccggcagactgttcttcgagttttacagactgctgcacgacgcccggcctaaggaaggcgacgaccggcccttcttttggctgttcgagaatgtggtggccatgggagtcagcgacaagcgggatattagccggttcctggagagcaaccccgtgatgatcgatgccaaggaagtgagcgccgcccaccgggccagatacttctggggcaatctgcctggcatgaacagacccctggccagcaccgtgaacgacaagctggagctgcaggagtgcctggagcacggccggatcgccaagttcagcaaggtgagaaccatcaccacccgaagcaacagcatcaaacaaggcaaggaccagcactttcctgtgttcatgaacgagaaggaggacatcctgtggtgtaccgagatggagagagtgttcgggttcccagtccactacacagatgtcagcaacatgtctagactggccagacagagactgctgggaagaagctggtccgtccctgtgatcagacacctgttcgcccctctgaaggagtacttcgcctgcgtgagcagcggcaacagcaacgccaacagccggggccccagcttctctagcggcctggtgccactgtccctgagagggagccacatgggccccatggagatctacaaaaccgtgagcgcctggaagcggcagcctgtgcgcgtgctgagcctgtttcggaatatcgataaagtcctgaaaagcctgggattcctggagagcggctctggctccggcggtggcaccctgaagtacgtggaggatgtgacaaacgtggtcagacgggatgtggagaagtggggccccttcgatctggtgtacggcagcacccaacccctgggcagctcttgtgaccggtgccctggctggtacatgtttcagttccaccggatcctgcagtacgccctgccgagacaggagtcccagcggccattcttttggattttcatggacaacttgctgctgaccgaggatgaccaggaaactaccactcggttcctgcagaccgaagccgtgaccctgcaggacgtgagaggccgggactaccagaacgccatgcgggtgtggtccaacatccctggactgaaaagcaagcacgcacctctgacccctaaagaagaggagtacctgcaggcccaggtgcggagcagaagcaagctggacgcccctaaggtggatctgctggtgaagaattgcctcctgcccctgagagagtacttcaagtatttcagccagaatagtctgcccctgggaggcagcggcggcggcgccctggtgacatttgaggacgtcgccgtgcggttcacccaggaggaatgggctctgctggatccttctcagaaaatcctgtaccgggacgtgatgagagagacataccggaatctgacctccgtgggcatcaactgggaatgttgggaccttgaagcctgcttcagaagcctgggaagaaacctgagagtgcaggtggtgaagagaaagtgcgagctgaccaacagcggcccctgcgccgagggcggcccaagcagcggcgcccctcctcccagcggcggcagcccagccggctccccaacctctaccgaggagggcacctctgagtccgccacccccgagagcggccctggcacctccaccgagcccagcgagggcagcgcacccggcagccctgccggcagccccacctccacagaggagggaaccagcaccgagcccagcgaaggcagcgccccaggcaccagcaccgagcctagtgagcaggagattaaacggatcaacaagatcagaagaagacttgtgaaagacagcaacaccaagaaggccggcaagacaggccccatgaaaaccctgctggttagagtgatgacacccgatctgagagagcggctggaaaacctgagaaagaagcctgaaaatatcccccagcccatcagcaatacatctagagccaacctgaataagctgctgaccgattacaccgaaatgaagaaggcgatcctgcatgtgtactgggaagagttccagaaggaccctgtgggcctgatgagccgggtggcccagcctgccagcaagaagatcgatcagaacaagctgaaacctgagatggacgagaagggcaacctgaccaccgccggctttgcctgctctcagtgtggccagcccctgttcgtgtacaagctggagcaggtgtctgagaagggcaaggcttacaccaactacttcggacggtgcaatgtggccgagcacgaaaagctgatcctgctggcccagctgaagcccgagaaggatagcgacgaagccgtgacatatagcctgggaaagtttgggcagagggccctggatttctacagcattcatgtgaccaaggagtccacccaccccgtgaagcccctggcccagatcgccggaaacagatacgcctccggacctgtgggaaaggccctgagcgacgcatgtatgggcacaatcgcctccttcctgtctaagtaccaggacatcatcatcgaacaccagaaggtggtgaagggcaaccagaagagactggagagcctgcgggagctggccggcaaggaaaacctggaataccctagcgtgaccctgccacctcagcctcacaccaaggagggcgttgatgcctacaacgaagtgatcgcccgggtgcgaatgtgggtgaacctgaacctgtggcagaagctgaagctaagcagagatgatgccaagcctctgctgagactgaagggattcccttcctttcctctggtcgagagacaggccaacgaagtggactggtgggacatggtgtgtaacgtgaagaagctgatcaacgagaaaaaggaggatggcaaggtgttttggcagaatctggctggctacaagagacaggaagccctgagaccatacctgagcagcgaggaagatcggaagaagggaaagaaattcgctcggtaccagctgggcgacctgctgctgcacctggaaaagaagcacggcgaggactggggaaaggtgtacgacgaggcctgggagcggattgacaagaaagtggaaggcctgagcaagcacatcaagctggaagaggaacggagaagcgaggacgcccagagcaaggccgccctgaccgactggctgcgggctaaggccagcttcgtgatcgagggcctgaaggaggccgacaaggacgagttctgcagatgcgagctgaagctgcagaagtggtacggggacctgcggggaaagcccttcgccatcgaagccgagaacagcatcctggacatcagcggcttcagcaagcagtacaactgtgccttcatctggcagaaggacggcgtgaagaagctgaacctgtacctgatcatcaactacttcaagggcggcaagctgcggttcaagaagatcaaacctgaagccttcgaagccaacagattctacaccgtgatcaacaaaaagagcggcgagatcgtgcccatggaggtgaacttcaacttcgacgaccccaacctgatcatcctgcctctggcctttggcaagagacagggcagagaattcatctggaacgacctgctgtccctggaaaccggcagcctgaagctggccaacggaagagtgatcgagaagacactgtacaacagaagaacccggcaggatgagcctgccctgttcgtggccctgaccttcgagcggcgggaggtcctggactcctccaatatcaaaccaatgaacctgatcggcgtggcaagaggcgaaaacatccccgccgtgatcgccctgaccgaccccgagggctgcccactgagccggtttaaggatagcctgggaaacccaacccacatcctgagaatcggcgagagctataaggagaagcagcggaccatccaggccaagaaggaggtggagcagcggagagccggcggctacagccggaagtacgccagcaaagccaagaatctggcagacgatatggtgagaaacaccgctagagatctgctgtactacgccgtgacccaggatgccatgctgatcttcgccaacctgagccggggcttcggccggcagggcaagcggaccttcatggccgagagacagtacacacggatggaggactggctgaccgccaagctggcctacgagggcctgagcaagacctacctgtccaagacactggcccagtacacctccaagacatgcagcaactgtgggtttaccatcaccagcgccgactacgacagggtgctggagaagctgaagaagacagcaacaggctggatgaccacaattaacggcaaggagctgaaggtggagggccagattacctactacaacagatacaagagacagaacgtagtcaaggacctgtccgtcgagctggatagactgagcgaagaatctgtgaacaacgacatctcctcctggacaaagggcagaagcggagaagctctgagcctcctgaagaaaagattctcccatagacccgtgcaggagaagttcgtgtgcctgaactgcggcttcgagacacacgcagccgagcaagccgccctgaacatcgccagatcctggctgttcctgcggagccaggagtacaagaaataccagacaaacaagacaaccggcaacaccgataagagagccttcgtcgagacctggcagtccttttaccggaagaagcttaaggaggtgtggaaacctgccgtgcggtctggcggatctggcggaggctccgagaagcagttcagcttccagagcctgctgaccttcgaggacgtggccatcaacttcagcaagaaggagtgggagtgcctggacaccagccagagggacctgtacaggttcgtgatgctggagaactacagcaacctggtgagcgtgggcctgagcgtgagcaagcccgagctggtgacctgcctggagcagaacaaggagccctggatggtgaacatcgaggagagcgaggtgctggagcccggcggcccaagcagcggcgcccctcctcccagcggcggcagcccagccggctccccaacctctaccgaggagggcacctctgagtccgccacccccgagagcggccctggcacctccaccgagcccagcgagggcagcgcacccggcagccctgccggcagccccacctccacagaggagggaaccagcaccgagcccagcgaaggcagcgccccaggcaccagcaccgagcctagtgagcaggagattaaacggatcaacaagatcagaagaagacttgtgaaagacagcaacaccaagaaggccggcaagacaggccccatgaaaaccctgctggttagagtgatgacacccgatctgagagagcggctggaaaacctgagaaagaagcctgaaaatatcccccagcccatcagcaatacatctagagccaacctgaataagctgctgaccgattacaccgaaatgaagaaggcgatcctgcatgtgtactgggaagagttccagaaggaccctgtgggcctgatgagccgggtggcccagcctgccagcaagaagatcgatcagaacaagctgaaacctgagatggacgagaagggcaacctgaccaccgccggctttgcctgctctcagtgtggccagcccctgttcgtgtacaagctggagcaggtgtctgagaagggcaaggcttacaccaactacttcggacggtgcaatgtggccgagcacgaaaagctgatcctgctggcccagctgaagcccgagaaggatagcgacgaagccgtgacatatagcctgggaaagtttgggcagagggccctggatttctacagcattcatgtgaccaaggagtccacccaccccgtgaagcccctggcccagatcgccggaaacagatacgcctccggacctgtgggaaaggccctgagcgacgcatgtatgggcacaatcgcctccttcctgtctaagtaccaggacatcatcatcgaacaccagaaggtggtgaagggcaaccagaagagactggagagcctgcgggagctggccggcaaggaaaacctggaataccctagcgtgaccctgccacctcagcctcacaccaaggagggcgttgatgcctacaacgaagtgatcgcccgggtgcgaatgtgggtgaacctgaacctgtggcagaagctgaagctaagcagagatgatgccaagcctctgctgagactgaagggattcccttcctttcctctggtcgagagacaggccaacgaagtggactggtgggacatggtgtgtaacgtgaagaagctgatcaacgagaaaaaggaggatggcaaggtgttttggcagaatctggctggctacaagagacaggaagccctgagaccatacctgagcagcgaggaagatcggaagaagggaaagaaattcgctcggtaccagctgggcgacctgctgctgcacctggaaaagaagcacggcgaggactggggaaaggtgtacgacgaggcctgggagcggattgacaagaaagtggaaggcctgagcaagcacatcaagctggaagaggaacggagaagcgaggacgcccagagcaaggccgccctgaccgactggctgcgggctaaggccagcttcgtgatcgagggcctgaaggaggccgacaaggacgagttctgcagatgcgagctgaagctgcagaagtggtacggggacctgcggggaaagcccttcgccatcgaagccgagaacagcatcctggacatcagcggcttcagcaagcagtacaactgtgccttcatctggcagaaggacggcgtgaagaagctgaacctgtacctgatcatcaactacttcaagggcggcaagctgcggttcaagaagatcaaacctgaagccttcgaagccaacagattctacaccgtgatcaacaaaaagagcggcgagatcgtgcccatggaggtgaacttcaacttcgacgaccccaacctgatcatcctgcctctggcctttggcaagagacagggcagagaattcatctggaacgacctgctgtccctggaaaccggcagcctgaagctggccaacggaagagtgatcgagaagacactgtacaacagaagaacccggcaggatgagcctgccctgttcgtggccctgaccttcgagcggcgggaggtcctggactcctccaatatcaaaccaatgaacctgatcggcgtggcaagaggcgaaaacatccccgccgtgatcgccctgaccgaccccgagggctgcccactgagccggtttaaggatagcctgggaaacccaacccacatcctgagaatcggcgagagctataaggagaagcagcggaccatccaggccaagaaggaggtggagcagcggagagccggcggctacagccggaagtacgccagcaaagccaagaatctggcagacgatatggtgagaaacaccgctagagatctgctgtactacgccgtgacccaggatgccatgctgatcttcgccaacctgagccggggcttcggccggcagggcaagcggaccttcatggccgagagacagtacacacggatggaggactggctgaccgccaagctggcctacgagggcctgagcaagacctacctgtccaagacactggcccagtacacctccaagacatgcagcaactgtgggtttaccatcaccagcgccgactacgacagggtgctggagaagctgaagaagacagcaacaggctggatgaccacaattaacggcaaggagctgaaggtggagggccagattacctactacaacagatacaagagacagaacgtagtcaaggacctgtccgtcgagctggatagactgagcgaagaatctgtgaacaacgacatctcctcctggacaaagggcagaagcggagaagctctgagcctcctgaagaaaagattctcccatagacccgtgcaggagaagttcgtgtgcctgaactgcggcttcgagacacacgcagccgagcaagccgccctgaacatcgccagatcctggctgttcctgcggagccaggagtacaagaaataccagacaaacaagacaaccggcaacaccgataagagagccttcgtcgagacctggcagtccttttaccggaagaagcttaaggaggtgtggaaacctgccgtgcggtctggcggatctggcggaggctcctgagaagcagttcagcttccagagcctgctgaccttcgaggacgtggccatcaacttcagcaagaaggagtgggagtgcctggacaccagccagagggacctgtacaggttcgtgatgctggagaactacagcaacctggtgagcgtgggcctgagcgtgagcaagcccgagctggtgacctgcctggagcagaacaaggagccctggatggtgaacatcgaggagagcgaggtgctggagcccggatctggctccggcagcggccccaagaaaaagagaaaagtctaagctgccttctgcggggcttgccttctggccatgcccttcttctctcccttgcacctgtacctcttggtctttgaataaagcctgagtaggaaggctagcaaaaaaaaaaaaaaaaaaaaaaaaaaaaaaaaaaaaaaaaaaaaaaaaaaaaaaaaaaaaaaaaaaaaaaaaaaaaaaaa

SEQ ID NO: 16264 - RNA, 9485 nt, synthetic construct
  source 1..9485: mol_type = other RNA
aggaaataagagagaaaagaagagtaagaagaaatataagagccaccatggcccctaagaagaagcgtaaagtgagccggatggaacgcctcgtctacgaggtgcggcagaagtgcagaaacatcgaggacatctgcatctcctgcggatctctgaacgtgaccctggagcacccactgttcatcggcggcatgtgccagaactgtaaaaactgttttctggagtgtgcctatcaatacgacgatgacggctaccagagctactgcaccatctgttgcggcggaagagaggtgctgatgtgtggaaataacaactgctgccggtgcttctgcgtggaatgcgtggacctgctggtgggccccggcgccgcccaggccgctattaaggaagatccttggaactgctacatgtgcggccacaagggcacatacggcctgctgagacggagagaggactggcctagcagactgcagatgttcttcgccaataaccacgaccaggagttcgacccccctaaggtgtaccctcccgtccccgccgagaagagaaagcccatccgggtcctgagcctgttcgatggcatcgccaccggtctgctggtgctgaaggacctgggcatccaggtggataggtacattgcctccgaggtgtgcgaggactccatcaccgtgggaatggtgcgtcatcagggcaagatcatgtacgtgggcgacgtgcggagcgtgacacagaagcatatccaggagtggggccctttcgacctggtgatcggcggcagcccttgcaatgacctgagcatcgtgaacccagcccggaagggcctgtacgagggaaccggcagactgttcttcgagttttacagactgctgcacgacgcccggcctaaggaaggcgacgaccggcccttcttttggctgttcgagaatgtggtggccatgggagtcagcgacaagcgggatattagccggttcctggagagcaaccccgtgatgatcgatgccaaggaagtgagcgccgcccaccgggccagatacttctggggcaatctgcctggcatgaacagacccctggccagcaccgtgaacgacaagctggagctgcaggagtgcctggagcacggccggatcgccaagttcagcaaggtgagaaccatcaccacccgaagcaacagcatcaaacaaggcaaggaccagcactttcctgtgttcatgaacgagaaggaggacatcctgtggtgtaccgagatggagagagtgttcgggttcccagtccactacacagatgtcagcaacatgtctagactggccagacagagactgctgggaagaagctggtccgtccctgtgatcagacacctgttcgcccctctgaaggagtacttcgcctgcgtgagcagcggcaacagcaacgccaacagccggggccccagcttctctagcggcctggtgccactgtccctgagagggagccacatgggccccatggagatctacaaaaccgtgagcgcctggaagcggcagcctgtgcgcgtgctgagcctgtttcggaatatcgataaagtcctgaaaagcctgggattcctggagagcggctctggctccggcggtggcaccctgaagtacgtggaggatgtgacaaacgtggtcagacgggatgtggagaagtggggccccttcgatctggtgtacggcagcacccaacccctgggcagctcttgtgaccggtgccctggctggtacatgtttcagttccaccggatcctgcagtacgccctgccgagacaggagtcccagcggccattcttttggattttcatggacaacttgctgctgaccgaggatgaccaggaaactaccactcggttcctgcagaccgaagccgtgaccctgcaggacgtgagaggccgggactaccagaacgccatgcgggtgtggtccaacatccctggactgaaaagcaagcacgcacctctgacccctaaagaagaggagtacctgcaggcccaggtgcggagcagaagcaagctggacgcccctaaggtggatctgctggtgaagaattgcctcctgcccctgagagagtacttcaagtatttcagccagaatagtctgcccctgggaggcagcggcggcggcgccctggtgacatttgaggacgtcgccgtgcggttcacccaggaggaatgggctctgctggatccttctcagaaaatcctgtaccgggacgtgatgagagagacataccggaatctgacctccgtgggcatcaactgggaatgttgggaccttgaagcctgcttcagaagcctgggaagaaacctgagagtgcaggtggtgaagagaaagtgcgagctgaccaacagcggcccctgcgccgagggcggcccaagcagcggcgcccctcctcccagcggcggcagcccagccggctccccaacctctaccgaggagggcacctctgagtccgccacccccgagagcggccctggcacctccaccgagcccagcgagggcagcgcacccggcagccctgccggcagccccacctccacagaggagggaaccagcaccgagcccagcgaaggcagcgccccaggcaccagcaccgagcctagtgagcaggagattaaacggatcaacaagatcagaagaagacttgtgaaagacagcaacaccaagaaggccggcaagacaggccccatgaaaaccctgctggttagagtgatgacacccgatctgagagagcggctggaaaacctgagaaagaagcctgaaaatatcccccagcccatcagcaatacatctagagccaacctgaataagctgctgaccgattacaccgaaatgaagaaggcgatcctgcatgtgtactgggaagagttccagaaggaccctgtgggcctgatgagccgggtggcccagcctgccagcaagaagatcgatcagaacaagctgaaacctgagatggacgagaagggcaacctgaccaccgccggctttgcctgctctcagtgtggccagcccctgttcgtgtacaagctggagcaggtgtctgagaagggcaaggcttacaccaactacttcggacggtgcaatgtggccgagcacgaaaagctgatcctgctggcccagctgaagcccgagaaggatagcgacgaagccgtgacatatagcctgggaaagtttgggcagagggccctggatttctacagcattcatgtgaccaaggagtccacccaccccgtgaagcccctggcccagatcgccggaaacagatacgcctccggacctgtgggaaaggccctgagcgacgcatgtatgggcacaatcgcctccttcctgtctaagtaccaggacatcatcatcgaacaccagaaggtggtgaagggcaaccagaagagactggagagcctgcgggagctggccggcaaggaaaacctggaataccctagcgtgaccctgccacctcagcctcacaccaaggagggcgttgatgcctacaacgaagtgatcgcccgggtgcgaatgtgggtgaacctgaacctgtggcagaagctgaagctaagcagagatgatgccaagcctctgctgagactgaagggattcccttcctttcctctggtcgagagacaggccaacgaagtggactggtgggacatggtgtgtaacgtgaagaagctgatcaacgagaaaaaggaggatggcaaggtgttttggcagaatctggctggctacaagagacaggaagccctgagaccatacctgagcagcgaggaagatcggaagaagggaaagaaattcgctcggtaccagctgggcgacctgctgctgcacctggaaaagaagcacggcgaggactggggaaaggtgtacgacgaggcctgggagcggattgacaagaaagtggaaggcctgagcaagcacatcaagctggaagaggaacggagaagcgaggacgcccagagcaaggccgccctgaccgactggctgcgggctaaggccagcttcgtgatcgagggcctgaaggaggccgacaaggacgagttctgcagatgcgagctgaagctgcagaagtggtacggggacctgcggggaaagcccttcgccatcgaagccgagaacagcatcctggacatcagcggcttcagcaagcagtacaactgtgccttcatctggcagaaggacggcgtgaagaagctgaacctgtacctgatcatcaactacttcaagggcggcaagctgcggttcaagaagatcaaacctgaagccttcgaagccaacagattctacaccgtgatcaacaaaaagagcggcgagatcgtgcccatggaggtgaacttcaacttcgacgaccccaacctgatcatcctgcctctggcctttggcaagagacagggcagagaattcatctggaacgacctgctgtccctggaaaccggcagcctgaagctggccaacggaagagtgatcgagaagacactgtacaacagaagaacccggcaggatgagcctgccctgttcgtggccctgaccttcgagcggcgggaggtcctggactcctccaatatcaaaccaatgaacctgatcggcgtggcaagaggcgaaaacatccccgccgtgatcgccctgaccgaccccgagggctgcccactgagccggtttaaggatagcctgggaaacccaacccacatcctgagaatcggcgagagctataaggagaagcagcggaccatccaggccaagaaggaggtggagcagcggagagccggcggctacagccggaagtacgccagcaaagccaagaatctggcagacgatatggtgagaaacaccgctagagatctgctgtactacgccgtgacccaggatgccatgctgatcttcgccaacctgagccggggcttcggccggcagggcaagcggaccttcatggccgagagacagtacacacggatggaggactggctgaccgccaagctggcctacgagggcctgagcaagacctacctgtccaagacactggcccagtacacctccaagacatgcagcaactgtgggtttaccatcaccagcgccgactacgacagggtgctggagaagctgaagaagacagcaacaggctggatgaccacaattaacggcaaggagctgaaggtggagggccagattacctactacaacagatacaagagacagaacgtagtcaaggacctgtccgtcgagctggatagactgagcgaagaatctgtgaacaacgacatctcctcctggacaaagggcagaagcggagaagctctgagcctcctgaagaaaagattctcccatagacccgtgcaggagaagttcgtgtgcctgaactgcggcttcgagacacacgcagccgagcaagccgccctgaacatcgccagatcctggctgttcctgcggagccaggagtacaagaaataccagacaaacaagacaaccggcaacaccgataagagagccttcgtcgagacctggcagtccttttaccggaagaagcttaaggaggtgtggaaacctgccgtgcggtctggcggatctggcggaggctcccagcccagggaggccgtgaccttcaaggacgtggaggtgaccttcagccaggacgagtggggctggctggaccccgcccagaggaacctgtacagggacgtgatgctggagaactacggcaacgtggtgagcctggtgggccccttcaccaagcccgtgctgatcagctggctggaggccagggagccctggggcctgaacgtgcagggcgcccagcccaagggcaagcccggcgtggcccccggcggcccaagcagcggcgcccctcctcccagcggcggcagcccagccggctccccaacctctaccgaggagggcacctctgagtccgccacccccgagagcggccctggcacctccaccgagcccagcgagggcagcgcacccggcagccctgccggcagccccacctccacagaggagggaaccagcaccgagcccagcgaaggcagcgccccaggcaccagcaccgagcctagtgagcaggagattaaacggatcaacaagatcagaagaagacttgtgaaagacagcaacaccaagaaggccggcaagacaggccccatgaaaaccctgctggttagagtgatgacacccgatctgagagagcggctggaaaacctgagaaagaagcctgaaaatatcccccagcccatcagcaatacatctagagccaacctgaataagctgctgaccgattacaccgaaatgaagaaggcgatcctgcatgtgtactgggaagagttccagaaggaccctgtgggcctgatgagccgggtggcccagcctgccagcaagaagatcgatcagaacaagctgaaacctgagatggacgagaagggcaacctgaccaccgccggctttgcctgctctcagtgtggccagcccctgttcgtgtacaagctggagcaggtgtctgagaagggcaaggcttacaccaactacttcggacggtgcaatgtggccgagcacgaaaagctgatcctgctggcccagctgaagcccgagaaggatagcgacgaagccgtgacatatagcctgggaaagtttgggcagagggccctggatttctacagcattcatgtgaccaaggagtccacccaccccgtgaagcccctggcccagatcgccggaaacagatacgcctccggacctgtgggaaaggccctgagcgacgcatgtatgggcacaatcgcctccttcctgtctaagtaccaggacatcatcatcgaacaccagaaggtggtgaagggcaaccagaagagactggagagcctgcgggagctggccggcaaggaaaacctggaataccctagcgtgaccctgccacctcagcctcacaccaaggagggcgttgatgcctacaacgaagtgatcgcccgggtgcgaatgtgggtgaacctgaacctgtggcagaagctgaagctaagcagagatgatgccaagcctctgctgagactgaagggattcccttcctttcctctggtcgagagacaggccaacgaagtggactggtgggacatggtgtgtaacgtgaagaagctgatcaacgagaaaaaggaggatggcaaggtgttttggcagaatctggctggctacaagagacaggaagccctgagaccatacctgagcagcgaggaagatcggaagaagggaaagaaattcgctcggtaccagctgggcgacctgctgctgcacctggaaaagaagcacggcgaggactggggaaaggtgtacgacgaggcctgggagcggattgacaagaaagtggaaggcctgagcaagcacatcaagctggaagaggaacggagaagcgaggacgcccagagcaaggccgccctgaccgactggctgcgggctaaggccagcttcgtgatcgagggcctgaaggaggccgacaaggacgagttctgcagatgcgagctgaagctgcagaagtggtacggggacctgcggggaaagcccttcgccatcgaagccgagaacagcatcctggacatcagcggcttcagcaagcagtacaactgtgccttcatctggcagaaggacggcgtgaagaagctgaacctgtacctgatcatcaactacttcaagggcggcaagctgcggttcaagaagatcaaacctgaagccttcgaagccaacagattctacaccgtgatcaacaaaaagagcggcgagatcgtgcccatggaggtgaacttcaacttcgacgaccccaacctgatcatcctgcctctggcctttggcaagagacagggcagagaattcatctggaacgacctgctgtccctggaaaccggcagcctgaagctggccaacggaagagtgatcgagaagacactgtacaacagaagaacccggcaggatgagcctgccctgttcgtggccctgaccttcgagcggcgggaggtcctggactcctccaatatcaaaccaatgaacctgatcggcgtggcaagaggcgaaaacatccccgccgtgatcgccctgaccgaccccgagggctgcccactgagccggtttaaggatagcctgggaaacccaacccacatcctgagaatcggcgagagctataaggagaagcagcggaccatccaggccaagaaggaggtggagcagcggagagccggcggctacagccggaagtacgccagcaaagccaagaatctggcagacgatatggtgagaaacaccgctagagatctgctgtactacgccgtgacccaggatgccatgctgatcttcgccaacctgagccggggcttcggccggcagggcaagcggaccttcatggccgagagacagtacacacggatggaggactggctgaccgccaagctggcctacgagggcctgagcaagacctacctgtccaagacactggcccagtacacctccaagacatgcagcaactgtgggtttaccatcaccagcgccgactacgacagggtgctggagaagctgaagaagacagcaacaggctggatgaccacaattaacggcaaggagctgaaggtggagggccagattacctactacaacagatacaagagacagaacgtagtcaaggacctgtccgtcgagctggatagactgagcgaagaatctgtgaacaacgacatctcctcctggacaaagggcagaagcggagaagctctgagcctcctgaagaaaagattctcccatagacccgtgcaggagaagttcgtgtgcctgaactgcggcttcgagacacacgcagccgagcaagccgccctgaacatcgccagatcctggctgttcctgcggagccaggagtacaagaaataccagacaaacaagacaaccggcaacaccgataagagagccttcgtcgagacctggcagtccttttaccggaagaagcttaaggaggtgtggaaacctgccgtgcggtctggcggatctggcggaggctcctcagcccagggaggccgtgaccttcaaggacgtggaggtgaccttcagccaggacgagtggggctggctggaccccgcccagaggaacctgtacagggacgtgatgctggagaactacggcaacgtggtgagcctggtgggccccttcaccaagcccgtgctgatcagctggctggaggccagggagccctggggcctgaacgtgcagggcgcccagcccaagggcaagcccggcgtggcccccggatctggctccggcagcggccccaagaaaaagagaaaagtctaagctgccttctgcggggcttgccttctggccatgcccttcttctctcccttgcacctgtacctcttggtctttgaataaagcctgagtaggaaggctagcaaaaaaaaaaaaaaaaaaaaaaaaaaaaaaaaaaaaaaaaaaaaaaaaaaaaaaaaaaaaaaaaaaaaaaaaaaaaaaaa

SEQ ID NO: 16265 - RNA, 9485 nt, synthetic construct
  source 1..9485: mol_type = other RNA
aggaaataagagagaaaagaagagtaagaagaaatataagagccaccatggcccctaagaagaagcgtaaagtgagccggatggaacgcctcgtctacgaggtgcggcagaagtgcagaaacatcgaggacatctgcatctcctgcggatctctgaacgtgaccctggagcacccactgttcatcggcggcatgtgccagaactgtaaaaactgttttctggagtgtgcctatcaatacgacgatgacggctaccagagctactgcaccatctgttgcggcggaagagaggtgctgatgtgtggaaataacaactgctgccggtgcttctgcgtggaatgcgtggacctgctggtgggccccggcgccgcccaggccgctattaaggaagatccttggaactgctacatgtgcggccacaagggcacatacggcctgctgagacggagagaggactggcctagcagactgcagatgttcttcgccaataaccacgaccaggagttcgacccccctaaggtgtaccctcccgtccccgccgagaagagaaagcccatccgggtcctgagcctgttcgatggcatcgccaccggtctgctggtgctgaaggacctgggcatccaggtggataggtacattgcctccgaggtgtgcgaggactccatcaccgtgggaatggtgcgtcatcagggcaagatcatgtacgtgggcgacgtgcggagcgtgacacagaagcatatccaggagtggggccctttcgacctggtgatcggcggcagcccttgcaatgacctgagcatcgtgaacccagcccggaagggcctgtacgagggaaccggcagactgttcttcgagttttacagactgctgcacgacgcccggcctaaggaaggcgacgaccggcccttcttttggctgttcgagaatgtggtggccatgggagtcagcgacaagcgggatattagccggttcctggagagcaaccccgtgatgatcgatgccaaggaagtgagcgccgcccaccgggccagatacttctggggcaatctgcctggcatgaacagacccctggccagcaccgtgaacgacaagctggagctgcaggagtgcctggagcacggccggatcgccaagttcagcaaggtgagaaccatcaccacccgaagcaacagcatcaaacaaggcaaggaccagcactttcctgtgttcatgaacgagaaggaggacatcctgtggtgtaccgagatggagagagtgttcgggttcccagtccactacacagatgtcagcaacatgtctagactggccagacagagactgctgggaagaagctggtccgtccctgtgatcagacacctgttcgcccctctgaaggagtacttcgcctgcgtgagcagcggcaacagcaacgccaacagccggggccccagcttctctagcggcctggtgccactgtccctgagagggagccacatgggccccatggagatctacaaaaccgtgagcgcctggaagcggcagcctgtgcgcgtgctgagcctgtttcggaatatcgataaagtcctgaaaagcctgggattcctggagagcggctctggctccggcggtggcaccctgaagtacgtggaggatgtgacaaacgtggtcagacgggatgtggagaagtggggccccttcgatctggtgtacggcagcacccaacccctgggcagctcttgtgaccggtgccctggctggtacatgtttcagttccaccggatcctgcagtacgccctgccgagacaggagtcccagcggccattcttttggattttcatggacaacttgctgctgaccgaggatgaccaggaaactaccactcggttcctgcagaccgaagccgtgaccctgcaggacgtgagaggccgggactaccagaacgccatgcgggtgtggtccaacatccctggactgaaaagcaagcacgcacctctgacccctaaagaagaggagtacctgcaggcccaggtgcggagcagaagcaagctggacgcccctaaggtggatctgctggtgaagaattgcctcctgcccctgagagagtacttcaagtatttcagccagaatagtctgcccctgggaggcagcggcggcggcgccctggtgacatttgaggacgtcgccgtgcggttcacccaggaggaatgggctctgctggatccttctcagaaaatcctgtaccgggacgtgatgagagagacataccggaatctgacctccgtgggcatcaactgggaatgttgggaccttgaagcctgcttcagaagcctgggaagaaacctgagagtgcaggtggtgaagagaaagtgcgagctgaccaacagcggcccctgcgccgagggcggcccaagcagcggcgcccctcctcccagcggcggcagcccagccggctccccaacctctaccgaggagggcacctctgagtccgccacccccgagagcggccctggcacctccaccgagcccagcgagggcagcgcacccggcagccctgccggcagccccacctccacagaggagggaaccagcaccgagcccagcgaaggcagcgccccaggcaccagcaccgagcctagtgagcaggagattaaacggatcaacaagatcagaagaagacttgtgaaagacagcaacaccaagaaggccggcaagacaggccccatgaaaaccctgctggttagagtgatgacacccgatctgagagagcggctggaaaacctgagaaagaagcctgaaaatatcccccagcccatcagcaatacatctagagccaacctgaataagctgctgaccgattacaccgaaatgaagaaggcgatcctgcatgtgtactgggaagagttccagaaggaccctgtgggcctgatgagccgggtggcccagcctgccagcaagaagatcgatcagaacaagctgaaacctgagatggacgagaagggcaacctgaccaccgccggctttgcctgctctcagtgtggccagcccctgttcgtgtacaagctggagcaggtgtctgagaagggcaaggcttacaccaactacttcggacggtgcaatgtggccgagcacgaaaagctgatcctgctggcccagctgaagcccgagaaggatagcgacgaagccgtgacatatagcctgggaaagtttgggcagagggccctggatttctacagcattcatgtgaccaaggagtccacccaccccgtgaagcccctggcccagatcgccggaaacagatacgcctccggacctgtgggaaaggccctgagcgacgcatgtatgggcacaatcgcctccttcctgtctaagtaccaggacatcatcatcgaacaccagaaggtggtgaagggcaaccagaagagactggagagcctgcgggagctggccggcaaggaaaacctggaataccctagcgtgaccctgccacctcagcctcacaccaaggagggcgttgatgcctacaacgaagtgatcgcccgggtgcgaatgtgggtgaacctgaacctgtggcagaagctgaagctaagcagagatgatgccaagcctctgctgagactgaagggattcccttcctttcctctggtcgagagacaggccaacgaagtggactggtgggacatggtgtgtaacgtgaagaagctgatcaacgagaaaaaggaggatggcaaggtgttttggcagaatctggctggctacaagagacaggaagccctgagaccatacctgagcagcgaggaagatcggaagaagggaaagaaattcgctcggtaccagctgggcgacctgctgctgcacctggaaaagaagcacggcgaggactggggaaaggtgtacgacgaggcctgggagcggattgacaagaaagtggaaggcctgagcaagcacatcaagctggaagaggaacggagaagcgaggacgcccagagcaaggccgccctgaccgactggctgcgggctaaggccagcttcgtgatcgagggcctgaaggaggccgacaaggacgagttctgcagatgcgagctgaagctgcagaagtggtacggggacctgcggggaaagcccttcgccatcgaagccgagaacagcatcctggacatcagcggcttcagcaagcagtacaactgtgccttcatctggcagaaggacggcgtgaagaagctgaacctgtacctgatcatcaactacttcaagggcggcaagctgcggttcaagaagatcaaacctgaagccttcgaagccaacagattctacaccgtgatcaacaaaaagagcggcgagatcgtgcccatggaggtgaacttcaacttcgacgaccccaacctgatcatcctgcctctggcctttggcaagagacagggcagagaattcatctggaacgacctgctgtccctggaaaccggcagcctgaagctggccaacggaagagtgatcgagaagacactgtacaacagaagaacccggcaggatgagcctgccctgttcgtggccctgaccttcgagcggcgggaggtcctggactcctccaatatcaaaccaatgaacctgatcggcgtggcaagaggcgaaaacatccccgccgtgatcgccctgaccgaccccgagggctgcccactgagccggtttaaggatagcctgggaaacccaacccacatcctgagaatcggcgagagctataaggagaagcagcggaccatccaggccaagaaggaggtggagcagcggagagccggcggctacagccggaagtacgccagcaaagccaagaatctggcagacgatatggtgagaaacaccgctagagatctgctgtactacgccgtgacccaggatgccatgctgatcttcgccaacctgagccggggcttcggccggcagggcaagcggaccttcatggccgagagacagtacacacggatggaggactggctgaccgccaagctggcctacgagggcctgagcaagacctacctgtccaagacactggcccagtacacctccaagacatgcagcaactgtgggtttaccatcaccagcgccgactacgacagggtgctggagaagctgaagaagacagcaacaggctggatgaccacaattaacggcaaggagctgaaggtggagggccagattacctactacaacagatacaagagacagaacgtagtcaaggacctgtccgtcgagctggatagactgagcgaagaatctgtgaacaacgacatctcctcctggacaaagggcagaagcggagaagctctgagcctcctgaagaaaagattctcccatagacccgtgcaggagaagttcgtgtgcctgaactgcggcttcgagacacacgcagccgagcaagccgccctgaacatcgccagatcctggctgttcctgcggagccaggagtacaagaaataccagacaaacaagacaaccggcaacaccgataagagagccttcgtcgagacctggcagtccttttaccggaagaagcttaaggaggtgtggaaacctgccgtgcggtctggcggatctggcggaggctccgccgagctgcccgtggtgttcgaggacgtggccgtgtacttcaccagggaggagtggggcatgctggacaagaggcagaaggagctgtacagggacgtgatgaggatgaactacgagctgatggccagcctgggccccgccgccgccaagcccgacctgatcagcaagctggagaggagggccgccccctggatcaaggaccccaacggccccaagtggggcaagggcaggccccccggcaacggcggcccaagcagcggcgcccctcctcccagcggcggcagcccagccggctccccaacctctaccgaggagggcacctctgagtccgccacccccgagagcggccctggcacctccaccgagcccagcgagggcagcgcacccggcagccctgccggcagccccacctccacagaggagggaaccagcaccgagcccagcgaaggcagcgccccaggcaccagcaccgagcctagtgagcaggagattaaacggatcaacaagatcagaagaagacttgtgaaagacagcaacaccaagaaggccggcaagacaggccccatgaaaaccctgctggttagagtgatgacacccgatctgagagagcggctggaaaacctgagaaagaagcctgaaaatatcccccagcccatcagcaatacatctagagccaacctgaataagctgctgaccgattacaccgaaatgaagaaggcgatcctgcatgtgtactgggaagagttccagaaggaccctgtgggcctgatgagccgggtggcccagcctgccagcaagaagatcgatcagaacaagctgaaacctgagatggacgagaagggcaacctgaccaccgccggctttgcctgctctcagtgtggccagcccctgttcgtgtacaagctggagcaggtgtctgagaagggcaaggcttacaccaactacttcggacggtgcaatgtggccgagcacgaaaagctgatcctgctggcccagctgaagcccgagaaggatagcgacgaagccgtgacatatagcctgggaaagtttgggcagagggccctggatttctacagcattcatgtgaccaaggagtccacccaccccgtgaagcccctggcccagatcgccggaaacagatacgcctccggacctgtgggaaaggccctgagcgacgcatgtatgggcacaatcgcctccttcctgtctaagtaccaggacatcatcatcgaacaccagaaggtggtgaagggcaaccagaagagactggagagcctgcgggagctggccggcaaggaaaacctggaataccctagcgtgaccctgccacctcagcctcacaccaaggagggcgttgatgcctacaacgaagtgatcgcccgggtgcgaatgtgggtgaacctgaacctgtggcagaagctgaagctaagcagagatgatgccaagcctctgctgagactgaagggattcccttcctttcctctggtcgagagacaggccaacgaagtggactggtgggacatggtgtgtaacgtgaagaagctgatcaacgagaaaaaggaggatggcaaggtgttttggcagaatctggctggctacaagagacaggaagccctgagaccatacctgagcagcgaggaagatcggaagaagggaaagaaattcgctcggtaccagctgggcgacctgctgctgcacctggaaaagaagcacggcgaggactggggaaaggtgtacgacgaggcctgggagcggattgacaagaaagtggaaggcctgagcaagcacatcaagctggaagaggaacggagaagcgaggacgcccagagcaaggccgccctgaccgactggctgcgggctaaggccagcttcgtgatcgagggcctgaaggaggccgacaaggacgagttctgcagatgcgagctgaagctgcagaagtggtacggggacctgcggggaaagcccttcgccatcgaagccgagaacagcatcctggacatcagcggcttcagcaagcagtacaactgtgccttcatctggcagaaggacggcgtgaagaagctgaacctgtacctgatcatcaactacttcaagggcggcaagctgcggttcaagaagatcaaacctgaagccttcgaagccaacagattctacaccgtgatcaacaaaaagagcggcgagatcgtgcccatggaggtgaacttcaacttcgacgaccccaacctgatcatcctgcctctggcctttggcaagagacagggcagagaattcatctggaacgacctgctgtccctggaaaccggcagcctgaagctggccaacggaagagtgatcgagaagacactgtacaacagaagaacccggcaggatgagcctgccctgttcgtggccctgaccttcgagcggcgggaggtcctggactcctccaatatcaaaccaatgaacctgatcggcgtggcaagaggcgaaaacatccccgccgtgatcgccctgaccgaccccgagggctgcccactgagccggtttaaggatagcctgggaaacccaacccacatcctgagaatcggcgagagctataaggagaagcagcggaccatccaggccaagaaggaggtggagcagcggagagccggcggctacagccggaagtacgccagcaaagccaagaatctggcagacgatatggtgagaaacaccgctagagatctgctgtactacgccgtgacccaggatgccatgctgatcttcgccaacctgagccggggcttcggccggcagggcaagcggaccttcatggccgagagacagtacacacggatggaggactggctgaccgccaagctggcctacgagggcctgagcaagacctacctgtccaagacactggcccagtacacctccaagacatgcagcaactgtgggtttaccatcaccagcgccgactacgacagggtgctggagaagctgaagaagacagcaacaggctggatgaccacaattaacggcaaggagctgaaggtggagggccagattacctactacaacagatacaagagacagaacgtagtcaaggacctgtccgtcgagctggatagactgagcgaagaatctgtgaacaacgacatctcctcctggacaaagggcagaagcggagaagctctgagcctcctgaagaaaagattctcccatagacccgtgcaggagaagttcgtgtgcctgaactgcggcttcgagacacacgcagccgagcaagccgccctgaacatcgccagatcctggctgttcctgcggagccaggagtacaagaaataccagacaaacaagacaaccggcaacaccgataagagagccttcgtcgagacctggcagtccttttaccggaagaagcttaaggaggtgtggaaacctgccgtgcggtctggcggatctggcggaggctcctgccgagctgcccgtggtgttcgaggacgtggccgtgtacttcaccagggaggagtggggcatgctggacaagaggcagaaggagctgtacagggacgtgatgaggatgaactacgagctgatggccagcctgggccccgccgccgccaagcccgacctgatcagcaagctggagaggagggccgccccctggatcaaggaccccaacggccccaagtggggcaagggcaggccccccggcaacggatctggctccggcagcggccccaagaaaaagagaaaagtctaagctgccttctgcggggcttgccttctggccatgcccttcttctctcccttgcacctgtacctcttggtctttgaataaagcctgagtaggaaggctagcaaaaaaaaaaaaaaaaaaaaaaaaaaaaaaaaaaaaaaaaaaaaaaaaaaaaaaaaaaaaaaaaaaaaaaaaaaaaaaaa

SEQ ID NO: 16266 - RNA, 9485 nt, synthetic construct
  source 1..9485: mol_type = other RNA
aggaaataagagagaaaagaagagtaagaagaaatataagagccaccatggcccctaagaagaagcgtaaagtgagccggatggaacgcctcgtctacgaggtgcggcagaagtgcagaaacatcgaggacatctgcatctcctgcggatctctgaacgtgaccctggagcacccactgttcatcggcggcatgtgccagaactgtaaaaactgttttctggagtgtgcctatcaatacgacgatgacggctaccagagctactgcaccatctgttgcggcggaagagaggtgctgatgtgtggaaataacaactgctgccggtgcttctgcgtggaatgcgtggacctgctggtgggccccggcgccgcccaggccgctattaaggaagatccttggaactgctacatgtgcggccacaagggcacatacggcctgctgagacggagagaggactggcctagcagactgcagatgttcttcgccaataaccacgaccaggagttcgacccccctaaggtgtaccctcccgtccccgccgagaagagaaagcccatccgggtcctgagcctgttcgatggcatcgccaccggtctgctggtgctgaaggacctgggcatccaggtggataggtacattgcctccgaggtgtgcgaggactccatcaccgtgggaatggtgcgtcatcagggcaagatcatgtacgtgggcgacgtgcggagcgtgacacagaagcatatccaggagtggggccctttcgacctggtgatcggcggcagcccttgcaatgacctgagcatcgtgaacccagcccggaagggcctgtacgagggaaccggcagactgttcttcgagttttacagactgctgcacgacgcccggcctaaggaaggcgacgaccggcccttcttttggctgttcgagaatgtggtggccatgggagtcagcgacaagcgggatattagccggttcctggagagcaaccccgtgatgatcgatgccaaggaagtgagcgccgcccaccgggccagatacttctggggcaatctgcctggcatgaacagacccctggccagcaccgtgaacgacaagctggagctgcaggagtgcctggagcacggccggatcgccaagttcagcaaggtgagaaccatcaccacccgaagcaacagcatcaaacaaggcaaggaccagcactttcctgtgttcatgaacgagaaggaggacatcctgtggtgtaccgagatggagagagtgttcgggttcccagtccactacacagatgtcagcaacatgtctagactggccagacagagactgctgggaagaagctggtccgtccctgtgatcagacacctgttcgcccctctgaaggagtacttcgcctgcgtgagcagcggcaacagcaacgccaacagccggggccccagcttctctagcggcctggtgccactgtccctgagagggagccacatgggccccatggagatctacaaaaccgtgagcgcctggaagcggcagcctgtgcgcgtgctgagcctgtttcggaatatcgataaagtcctgaaaagcctgggattcctggagagcggctctggctccggcggtggcaccctgaagtacgtggaggatgtgacaaacgtggtcagacgggatgtggagaagtggggccccttcgatctggtgtacggcagcacccaacccctgggcagctcttgtgaccggtgccctggctggtacatgtttcagttccaccggatcctgcagtacgccctgccgagacaggagtcccagcggccattcttttggattttcatggacaacttgctgctgaccgaggatgaccaggaaactaccactcggttcctgcagaccgaagccgtgaccctgcaggacgtgagaggccgggactaccagaacgccatgcgggtgtggtccaacatccctggactgaaaagcaagcacgcacctctgacccctaaagaagaggagtacctgcaggcccaggtgcggagcagaagcaagctggacgcccctaaggtggatctgctggtgaagaattgcctcctgcccctgagagagtacttcaagtatttcagccagaatagtctgcccctgggaggcagcggcggcggcgccctggtgacatttgaggacgtcgccgtgcggttcacccaggaggaatgggctctgctggatccttctcagaaaatcctgtaccgggacgtgatgagagagacataccggaatctgacctccgtgggcatcaactgggaatgttgggaccttgaagcctgcttcagaagcctgggaagaaacctgagagtgcaggtggtgaagagaaagtgcgagctgaccaacagcggcccctgcgccgagggcggcccaagcagcggcgcccctcctcccagcggcggcagcccagccggctccccaacctctaccgaggagggcacctctgagtccgccacccccgagagcggccctggcacctccaccgagcccagcgagggcagcgcacccggcagccctgccggcagccccacctccacagaggagggaaccagcaccgagcccagcgaaggcagcgccccaggcaccagcaccgagcctagtgagcaggagattaaacggatcaacaagatcagaagaagacttgtgaaagacagcaacaccaagaaggccggcaagacaggccccatgaaaaccctgctggttagagtgatgacacccgatctgagagagcggctggaaaacctgagaaagaagcctgaaaatatcccccagcccatcagcaatacatctagagccaacctgaataagctgctgaccgattacaccgaaatgaagaaggcgatcctgcatgtgtactgggaagagttccagaaggaccctgtgggcctgatgagccgggtggcccagcctgccagcaagaagatcgatcagaacaagctgaaacctgagatggacgagaagggcaacctgaccaccgccggctttgcctgctctcagtgtggccagcccctgttcgtgtacaagctggagcaggtgtctgagaagggcaaggcttacaccaactacttcggacggtgcaatgtggccgagcacgaaaagctgatcctgctggcccagctgaagcccgagaaggatagcgacgaagccgtgacatatagcctgggaaagtttgggcagagggccctggatttctacagcattcatgtgaccaaggagtccacccaccccgtgaagcccctggcccagatcgccggaaacagatacgcctccggacctgtgggaaaggccctgagcgacgcatgtatgggcacaatcgcctccttcctgtctaagtaccaggacatcatcatcgaacaccagaaggtggtgaagggcaaccagaagagactggagagcctgcgggagctggccggcaaggaaaacctggaataccctagcgtgaccctgccacctcagcctcacaccaaggagggcgttgatgcctacaacgaagtgatcgcccgggtgcgaatgtgggtgaacctgaacctgtggcagaagctgaagctaagcagagatgatgccaagcctctgctgagactgaagggattcccttcctttcctctggtcgagagacaggccaacgaagtggactggtgggacatggtgtgtaacgtgaagaagctgatcaacgagaaaaaggaggatggcaaggtgttttggcagaatctggctggctacaagagacaggaagccctgagaccatacctgagcagcgaggaagatcggaagaagggaaagaaattcgctcggtaccagctgggcgacctgctgctgcacctggaaaagaagcacggcgaggactggggaaaggtgtacgacgaggcctgggagcggattgacaagaaagtggaaggcctgagcaagcacatcaagctggaagaggaacggagaagcgaggacgcccagagcaaggccgccctgaccgactggctgcgggctaaggccagcttcgtgatcgagggcctgaaggaggccgacaaggacgagttctgcagatgcgagctgaagctgcagaagtggtacggggacctgcggggaaagcccttcgccatcgaagccgagaacagcatcctggacatcagcggcttcagcaagcagtacaactgtgccttcatctggcagaaggacggcgtgaagaagctgaacctgtacctgatcatcaactacttcaagggcggcaagctgcggttcaagaagatcaaacctgaagccttcgaagccaacagattctacaccgtgatcaacaaaaagagcggcgagatcgtgcccatggaggtgaacttcaacttcgacgaccccaacctgatcatcctgcctctggcctttggcaagagacagggcagagaattcatctggaacgacctgctgtccctggaaaccggcagcctgaagctggccaacggaagagtgatcgagaagacactgtacaacagaagaacccggcaggatgagcctgccctgttcgtggccctgaccttcgagcggcgggaggtcctggactcctccaatatcaaaccaatgaacctgatcggcgtggcaagaggcgaaaacatccccgccgtgatcgccctgaccgaccccgagggctgcccactgagccggtttaaggatagcctgggaaacccaacccacatcctgagaatcggcgagagctataaggagaagcagcggaccatccaggccaagaaggaggtggagcagcggagagccggcggctacagccggaagtacgccagcaaagccaagaatctggcagacgatatggtgagaaacaccgctagagatctgctgtactacgccgtgacccaggatgccatgctgatcttcgccaacctgagccggggcttcggccggcagggcaagcggaccttcatggccgagagacagtacacacggatggaggactggctgaccgccaagctggcctacgagggcctgagcaagacctacctgtccaagacactggcccagtacacctccaagacatgcagcaactgtgggtttaccatcaccagcgccgactacgacagggtgctggagaagctgaagaagacagcaacaggctggatgaccacaattaacggcaaggagctgaaggtggagggccagattacctactacaacagatacaagagacagaacgtagtcaaggacctgtccgtcgagctggatagactgagcgaagaatctgtgaacaacgacatctcctcctggacaaagggcagaagcggagaagctctgagcctcctgaagaaaagattctcccatagacccgtgcaggagaagttcgtgtgcctgaactgcggcttcgagacacacgcagccgagcaagccgccctgaacatcgccagatcctggctgttcctgcggagccaggagtacaagaaataccagacaaacaagacaaccggcaacaccgataagagagccttcgtcgagacctggcagtccttttaccggaagaagcttaaggaggtgtggaaacctgccgtgcggtctggcggatctggcggaggctcctgccaggagcccgtgagcttcgccgaggtggccgtgtacttcagcagggaggagtgggccctgctggaccccgcccagagggccctgtacagggacgtgatgctggagacctaccagtgcgtggcctggctggccagcctgcccgcccccaagcccggcctgatcagcctgctggagggcggcgaggacccctggatccccggcgtgaggagccccgaggccatgcccggcgacctgagccccggcggcccaagcagcggcgcccctcctcccagcggcggcagcccagccggctccccaacctctaccgaggagggcacctctgagtccgccacccccgagagcggccctggcacctccaccgagcccagcgagggcagcgcacccggcagccctgccggcagccccacctccacagaggagggaaccagcaccgagcccagcgaaggcagcgccccaggcaccagcaccgagcctagtgagcaggagattaaacggatcaacaagatcagaagaagacttgtgaaagacagcaacaccaagaaggccggcaagacaggccccatgaaaaccctgctggttagagtgatgacacccgatctgagagagcggctggaaaacctgagaaagaagcctgaaaatatcccccagcccatcagcaatacatctagagccaacctgaataagctgctgaccgattacaccgaaatgaagaaggcgatcctgcatgtgtactgggaagagttccagaaggaccctgtgggcctgatgagccgggtggcccagcctgccagcaagaagatcgatcagaacaagctgaaacctgagatggacgagaagggcaacctgaccaccgccggctttgcctgctctcagtgtggccagcccctgttcgtgtacaagctggagcaggtgtctgagaagggcaaggcttacaccaactacttcggacggtgcaatgtggccgagcacgaaaagctgatcctgctggcccagctgaagcccgagaaggatagcgacgaagccgtgacatatagcctgggaaagtttgggcagagggccctggatttctacagcattcatgtgaccaaggagtccacccaccccgtgaagcccctggcccagatcgccggaaacagatacgcctccggacctgtgggaaaggccctgagcgacgcatgtatgggcacaatcgcctccttcctgtctaagtaccaggacatcatcatcgaacaccagaaggtggtgaagggcaaccagaagagactggagagcctgcgggagctggccggcaaggaaaacctggaataccctagcgtgaccctgccacctcagcctcacaccaaggagggcgttgatgcctacaacgaagtgatcgcccgggtgcgaatgtgggtgaacctgaacctgtggcagaagctgaagctaagcagagatgatgccaagcctctgctgagactgaagggattcccttcctttcctctggtcgagagacaggccaacgaagtggactggtgggacatggtgtgtaacgtgaagaagctgatcaacgagaaaaaggaggatggcaaggtgttttggcagaatctggctggctacaagagacaggaagccctgagaccatacctgagcagcgaggaagatcggaagaagggaaagaaattcgctcggtaccagctgggcgacctgctgctgcacctggaaaagaagcacggcgaggactggggaaaggtgtacgacgaggcctgggagcggattgacaagaaagtggaaggcctgagcaagcacatcaagctggaagaggaacggagaagcgaggacgcccagagcaaggccgccctgaccgactggctgcgggctaaggccagcttcgtgatcgagggcctgaaggaggccgacaaggacgagttctgcagatgcgagctgaagctgcagaagtggtacggggacctgcggggaaagcccttcgccatcgaagccgagaacagcatcctggacatcagcggcttcagcaagcagtacaactgtgccttcatctggcagaaggacggcgtgaagaagctgaacctgtacctgatcatcaactacttcaagggcggcaagctgcggttcaagaagatcaaacctgaagccttcgaagccaacagattctacaccgtgatcaacaaaaagagcggcgagatcgtgcccatggaggtgaacttcaacttcgacgaccccaacctgatcatcctgcctctggcctttggcaagagacagggcagagaattcatctggaacgacctgctgtccctggaaaccggcagcctgaagctggccaacggaagagtgatcgagaagacactgtacaacagaagaacccggcaggatgagcctgccctgttcgtggccctgaccttcgagcggcgggaggtcctggactcctccaatatcaaaccaatgaacctgatcggcgtggcaagaggcgaaaacatccccgccgtgatcgccctgaccgaccccgagggctgcccactgagccggtttaaggatagcctgggaaacccaacccacatcctgagaatcggcgagagctataaggagaagcagcggaccatccaggccaagaaggaggtggagcagcggagagccggcggctacagccggaagtacgccagcaaagccaagaatctggcagacgatatggtgagaaacaccgctagagatctgctgtactacgccgtgacccaggatgccatgctgatcttcgccaacctgagccggggcttcggccggcagggcaagcggaccttcatggccgagagacagtacacacggatggaggactggctgaccgccaagctggcctacgagggcctgagcaagacctacctgtccaagacactggcccagtacacctccaagacatgcagcaactgtgggtttaccatcaccagcgccgactacgacagggtgctggagaagctgaagaagacagcaacaggctggatgaccacaattaacggcaaggagctgaaggtggagggccagattacctactacaacagatacaagagacagaacgtagtcaaggacctgtccgtcgagctggatagactgagcgaagaatctgtgaacaacgacatctcctcctggacaaagggcagaagcggagaagctctgagcctcctgaagaaaagattctcccatagacccgtgcaggagaagttcgtgtgcctgaactgcggcttcgagacacacgcagccgagcaagccgccctgaacatcgccagatcctggctgttcctgcggagccaggagtacaagaaataccagacaaacaagacaaccggcaacaccgataagagagccttcgtcgagacctggcagtccttttaccggaagaagcttaaggaggtgtggaaacctgccgtgcggtctggcggatctggcggaggctccttgccaggagcccgtgagcttcgccgaggtggccgtgtacttcagcagggaggagtgggccctgctggaccccgcccagagggccctgtacagggacgtgatgctggagacctaccagtgcgtggcctggctggccagcctgcccgcccccaagcccggcctgatcagcctgctggagggcggcgaggacccctggatccccggcgtgaggagccccgaggccatgcccggcgacctgagccccggatctggctccggcagcggccccaagaaaaagagaaaagtctaagctgccttctgcggggcttgccttctggccatgcccttcttctctcccttgcacctgtacctcttggtctttgaataaagcctgagtaggaaggctagcaaaaaaaaaaaaaaaaaaaaaaaaaaaaaaaaaaaaaaaaaaaaaaaaaaaaaaaaaaaaaaaaaaaaaaaaaaaaaaaa

SEQ ID NO: 16267 - RNA, 9485 nt, synthetic construct
  source 1..9485: mol_type = other RNA
aggaaataagagagaaaagaagagtaagaagaaatataagagccaccatggcccctaagaagaagcgtaaagtgagccggatggaacgcctcgtctacgaggtgcggcagaagtgcagaaacatcgaggacatctgcatctcctgcggatctctgaacgtgaccctggagcacccactgttcatcggcggcatgtgccagaactgtaaaaactgttttctggagtgtgcctatcaatacgacgatgacggctaccagagctactgcaccatctgttgcggcggaagagaggtgctgatgtgtggaaataacaactgctgccggtgcttctgcgtggaatgcgtggacctgctggtgggccccggcgccgcccaggccgctattaaggaagatccttggaactgctacatgtgcggccacaagggcacatacggcctgctgagacggagagaggactggcctagcagactgcagatgttcttcgccaataaccacgaccaggagttcgacccccctaaggtgtaccctcccgtccccgccgagaagagaaagcccatccgggtcctgagcctgttcgatggcatcgccaccggtctgctggtgctgaaggacctgggcatccaggtggataggtacattgcctccgaggtgtgcgaggactccatcaccgtgggaatggtgcgtcatcagggcaagatcatgtacgtgggcgacgtgcggagcgtgacacagaagcatatccaggagtggggccctttcgacctggtgatcggcggcagcccttgcaatgacctgagcatcgtgaacccagcccggaagggcctgtacgagggaaccggcagactgttcttcgagttttacagactgctgcacgacgcccggcctaaggaaggcgacgaccggcccttcttttggctgttcgagaatgtggtggccatgggagtcagcgacaagcgggatattagccggttcctggagagcaaccccgtgatgatcgatgccaaggaagtgagcgccgcccaccgggccagatacttctggggcaatctgcctggcatgaacagacccctggccagcaccgtgaacgacaagctggagctgcaggagtgcctggagcacggccggatcgccaagttcagcaaggtgagaaccatcaccacccgaagcaacagcatcaaacaaggcaaggaccagcactttcctgtgttcatgaacgagaaggaggacatcctgtggtgtaccgagatggagagagtgttcgggttcccagtccactacacagatgtcagcaacatgtctagactggccagacagagactgctgggaagaagctggtccgtccctgtgatcagacacctgttcgcccctctgaaggagtacttcgcctgcgtgagcagcggcaacagcaacgccaacagccggggccccagcttctctagcggcctggtgccactgtccctgagagggagccacatgggccccatggagatctacaaaaccgtgagcgcctggaagcggcagcctgtgcgcgtgctgagcctgtttcggaatatcgataaagtcctgaaaagcctgggattcctggagagcggctctggctccggcggtggcaccctgaagtacgtggaggatgtgacaaacgtggtcagacgggatgtggagaagtggggccccttcgatctggtgtacggcagcacccaacccctgggcagctcttgtgaccggtgccctggctggtacatgtttcagttccaccggatcctgcagtacgccctgccgagacaggagtcccagcggccattcttttggattttcatggacaacttgctgctgaccgaggatgaccaggaaactaccactcggttcctgcagaccgaagccgtgaccctgcaggacgtgagaggccgggactaccagaacgccatgcgggtgtggtccaacatccctggactgaaaagcaagcacgcacctctgacccctaaagaagaggagtacctgcaggcccaggtgcggagcagaagcaagctggacgcccctaaggtggatctgctggtgaagaattgcctcctgcccctgagagagtacttcaagtatttcagccagaatagtctgcccctgggaggcagcggcggcggcgccctggtgacatttgaggacgtcgccgtgcggttcacccaggaggaatgggctctgctggatccttctcagaaaatcctgtaccgggacgtgatgagagagacataccggaatctgacctccgtgggcatcaactgggaatgttgggaccttgaagcctgcttcagaagcctgggaagaaacctgagagtgcaggtggtgaagagaaagtgcgagctgaccaacagcggcccctgcgccgagggcggcccaagcagcggcgcccctcctcccagcggcggcagcccagccggctccccaacctctaccgaggagggcacctctgagtccgccacccccgagagcggccctggcacctccaccgagcccagcgagggcagcgcacccggcagccctgccggcagccccacctccacagaggagggaaccagcaccgagcccagcgaaggcagcgccccaggcaccagcaccgagcctagtgagcaggagattaaacggatcaacaagatcagaagaagacttgtgaaagacagcaacaccaagaaggccggcaagacaggccccatgaaaaccctgctggttagagtgatgacacccgatctgagagagcggctggaaaacctgagaaagaagcctgaaaatatcccccagcccatcagcaatacatctagagccaacctgaataagctgctgaccgattacaccgaaatgaagaaggcgatcctgcatgtgtactgggaagagttccagaaggaccctgtgggcctgatgagccgggtggcccagcctgccagcaagaagatcgatcagaacaagctgaaacctgagatggacgagaagggcaacctgaccaccgccggctttgcctgctctcagtgtggccagcccctgttcgtgtacaagctggagcaggtgtctgagaagggcaaggcttacaccaactacttcggacggtgcaatgtggccgagcacgaaaagctgatcctgctggcccagctgaagcccgagaaggatagcgacgaagccgtgacatatagcctgggaaagtttgggcagagggccctggatttctacagcattcatgtgaccaaggagtccacccaccccgtgaagcccctggcccagatcgccggaaacagatacgcctccggacctgtgggaaaggccctgagcgacgcatgtatgggcacaatcgcctccttcctgtctaagtaccaggacatcatcatcgaacaccagaaggtggtgaagggcaaccagaagagactggagagcctgcgggagctggccggcaaggaaaacctggaataccctagcgtgaccctgccacctcagcctcacaccaaggagggcgttgatgcctacaacgaagtgatcgcccgggtgcgaatgtgggtgaacctgaacctgtggcagaagctgaagctaagcagagatgatgccaagcctctgctgagactgaagggattcccttcctttcctctggtcgagagacaggccaacgaagtggactggtgggacatggtgtgtaacgtgaagaagctgatcaacgagaaaaaggaggatggcaaggtgttttggcagaatctggctggctacaagagacaggaagccctgagaccatacctgagcagcgaggaagatcggaagaagggaaagaaattcgctcggtaccagctgggcgacctgctgctgcacctggaaaagaagcacggcgaggactggggaaaggtgtacgacgaggcctgggagcggattgacaagaaagtggaaggcctgagcaagcacatcaagctggaagaggaacggagaagcgaggacgcccagagcaaggccgccctgaccgactggctgcgggctaaggccagcttcgtgatcgagggcctgaaggaggccgacaaggacgagttctgcagatgcgagctgaagctgcagaagtggtacggggacctgcggggaaagcccttcgccatcgaagccgagaacagcatcctggacatcagcggcttcagcaagcagtacaactgtgccttcatctggcagaaggacggcgtgaagaagctgaacctgtacctgatcatcaactacttcaagggcggcaagctgcggttcaagaagatcaaacctgaagccttcgaagccaacagattctacaccgtgatcaacaaaaagagcggcgagatcgtgcccatggaggtgaacttcaacttcgacgaccccaacctgatcatcctgcctctggcctttggcaagagacagggcagagaattcatctggaacgacctgctgtccctggaaaccggcagcctgaagctggccaacggaagagtgatcgagaagacactgtacaacagaagaacccggcaggatgagcctgccctgttcgtggccctgaccttcgagcggcgggaggtcctggactcctccaatatcaaaccaatgaacctgatcggcgtggcaagaggcgaaaacatccccgccgtgatcgccctgaccgaccccgagggctgcccactgagccggtttaaggatagcctgggaaacccaacccacatcctgagaatcggcgagagctataaggagaagcagcggaccatccaggccaagaaggaggtggagcagcggagagccggcggctacagccggaagtacgccagcaaagccaagaatctggcagacgatatggtgagaaacaccgctagagatctgctgtactacgccgtgacccaggatgccatgctgatcttcgccaacctgagccggggcttcggccggcagggcaagcggaccttcatggccgagagacagtacacacggatggaggactggctgaccgccaagctggcctacgagggcctgagcaagacctacctgtccaagacactggcccagtacacctccaagacatgcagcaactgtgggtttaccatcaccagcgccgactacgacagggtgctggagaagctgaagaagacagcaacaggctggatgaccacaattaacggcaaggagctgaaggtggagggccagattacctactacaacagatacaagagacagaacgtagtcaaggacctgtccgtcgagctggatagactgagcgaagaatctgtgaacaacgacatctcctcctggacaaagggcagaagcggagaagctctgagcctcctgaagaaaagattctcccatagacccgtgcaggagaagttcgtgtgcctgaactgcggcttcgagacacacgcagccgagcaagccgccctgaacatcgccagatcctggctgttcctgcggagccaggagtacaagaaataccagacaaacaagacaaccggcaacaccgataagagagccttcgtcgagacctggcagtccttttaccggaagaagcttaaggaggtgtggaaacctgccgtgcggtctggcggatctggcggaggctccatgaacgccgtgacctacgaggacgtgcacgtgaacttcacccaggaggagtgggccctgctggaccccagccagaagaagctgtacaaggacgtgatggtggagacctacaggaacctgaacgccatcggcttcaactgggaggcccacaacatcgaggagtactgccagagcagcaggaggcacaggaggtgcgagaggagccagagcgccgagaagcccagcgagtacacccagtgcggcggcggcccaagcagcggcgcccctcctcccagcggcggcagcccagccggctccccaacctctaccgaggagggcacctctgagtccgccacccccgagagcggccctggcacctccaccgagcccagcgagggcagcgcacccggcagccctgccggcagccccacctccacagaggagggaaccagcaccgagcccagcgaaggcagcgccccaggcaccagcaccgagcctagtgagcaggagattaaacggatcaacaagatcagaagaagacttgtgaaagacagcaacaccaagaaggccggcaagacaggccccatgaaaaccctgctggttagagtgatgacacccgatctgagagagcggctggaaaacctgagaaagaagcctgaaaatatcccccagcccatcagcaatacatctagagccaacctgaataagctgctgaccgattacaccgaaatgaagaaggcgatcctgcatgtgtactgggaagagttccagaaggaccctgtgggcctgatgagccgggtggcccagcctgccagcaagaagatcgatcagaacaagctgaaacctgagatggacgagaagggcaacctgaccaccgccggctttgcctgctctcagtgtggccagcccctgttcgtgtacaagctggagcaggtgtctgagaagggcaaggcttacaccaactacttcggacggtgcaatgtggccgagcacgaaaagctgatcctgctggcccagctgaagcccgagaaggatagcgacgaagccgtgacatatagcctgggaaagtttgggcagagggccctggatttctacagcattcatgtgaccaaggagtccacccaccccgtgaagcccctggcccagatcgccggaaacagatacgcctccggacctgtgggaaaggccctgagcgacgcatgtatgggcacaatcgcctccttcctgtctaagtaccaggacatcatcatcgaacaccagaaggtggtgaagggcaaccagaagagactggagagcctgcgggagctggccggcaaggaaaacctggaataccctagcgtgaccctgccacctcagcctcacaccaaggagggcgttgatgcctacaacgaagtgatcgcccgggtgcgaatgtgggtgaacctgaacctgtggcagaagctgaagctaagcagagatgatgccaagcctctgctgagactgaagggattcccttcctttcctctggtcgagagacaggccaacgaagtggactggtgggacatggtgtgtaacgtgaagaagctgatcaacgagaaaaaggaggatggcaaggtgttttggcagaatctggctggctacaagagacaggaagccctgagaccatacctgagcagcgaggaagatcggaagaagggaaagaaattcgctcggtaccagctgggcgacctgctgctgcacctggaaaagaagcacggcgaggactggggaaaggtgtacgacgaggcctgggagcggattgacaagaaagtggaaggcctgagcaagcacatcaagctggaagaggaacggagaagcgaggacgcccagagcaaggccgccctgaccgactggctgcgggctaaggccagcttcgtgatcgagggcctgaaggaggccgacaaggacgagttctgcagatgcgagctgaagctgcagaagtggtacggggacctgcggggaaagcccttcgccatcgaagccgagaacagcatcctggacatcagcggcttcagcaagcagtacaactgtgccttcatctggcagaaggacggcgtgaagaagctgaacctgtacctgatcatcaactacttcaagggcggcaagctgcggttcaagaagatcaaacctgaagccttcgaagccaacagattctacaccgtgatcaacaaaaagagcggcgagatcgtgcccatggaggtgaacttcaacttcgacgaccccaacctgatcatcctgcctctggcctttggcaagagacagggcagagaattcatctggaacgacctgctgtccctggaaaccggcagcctgaagctggccaacggaagagtgatcgagaagacactgtacaacagaagaacccggcaggatgagcctgccctgttcgtggccctgaccttcgagcggcgggaggtcctggactcctccaatatcaaaccaatgaacctgatcggcgtggcaagaggcgaaaacatccccgccgtgatcgccctgaccgaccccgagggctgcccactgagccggtttaaggatagcctgggaaacccaacccacatcctgagaatcggcgagagctataaggagaagcagcggaccatccaggccaagaaggaggtggagcagcggagagccggcggctacagccggaagtacgccagcaaagccaagaatctggcagacgatatggtgagaaacaccgctagagatctgctgtactacgccgtgacccaggatgccatgctgatcttcgccaacctgagccggggcttcggccggcagggcaagcggaccttcatggccgagagacagtacacacggatggaggactggctgaccgccaagctggcctacgagggcctgagcaagacctacctgtccaagacactggcccagtacacctccaagacatgcagcaactgtgggtttaccatcaccagcgccgactacgacagggtgctggagaagctgaagaagacagcaacaggctggatgaccacaattaacggcaaggagctgaaggtggagggccagattacctactacaacagatacaagagacagaacgtagtcaaggacctgtccgtcgagctggatagactgagcgaagaatctgtgaacaacgacatctcctcctggacaaagggcagaagcggagaagctctgagcctcctgaagaaaagattctcccatagacccgtgcaggagaagttcgtgtgcctgaactgcggcttcgagacacacgcagccgagcaagccgccctgaacatcgccagatcctggctgttcctgcggagccaggagtacaagaaataccagacaaacaagacaaccggcaacaccgataagagagccttcgtcgagacctggcagtccttttaccggaagaagcttaaggaggtgtggaaacctgccgtgcggtctggcggatctggcggaggctcctatgaacgccgtgacctacgaggacgtgcacgtgaacttcacccaggaggagtgggccctgctggaccccagccagaagaagctgtacaaggacgtgatggtggagacctacaggaacctgaacgccatcggcttcaactgggaggcccacaacatcgaggagtactgccagagcagcaggaggcacaggaggtgcgagaggagccagagcgccgagaagcccagcgagtacacccagtgcggcggatctggctccggcagcggccccaagaaaaagagaaaagtctaagctgccttctgcggggcttgccttctggccatgcccttcttctctcccttgcacctgtacctcttggtctttgaataaagcctgagtaggaaggctagcaaaaaaaaaaaaaaaaaaaaaaaaaaaaaaaaaaaaaaaaaaaaaaaaaaaaaaaaaaaaaaaaaaaaaaaaaaaaaaaa

SEQ ID NO: 16268 - RNA, 9485 nt, synthetic construct
  source 1..9485: mol_type = other RNA
aggaaataagagagaaaagaagagtaagaagaaatataagagccaccatggcccctaagaagaagcgtaaagtgagccggatggaacgcctcgtctacgaggtgcggcagaagtgcagaaacatcgaggacatctgcatctcctgcggatctctgaacgtgaccctggagcacccactgttcatcggcggcatgtgccagaactgtaaaaactgttttctggagtgtgcctatcaatacgacgatgacggctaccagagctactgcaccatctgttgcggcggaagagaggtgctgatgtgtggaaataacaactgctgccggtgcttctgcgtggaatgcgtggacctgctggtgggccccggcgccgcccaggccgctattaaggaagatccttggaactgctacatgtgcggccacaagggcacatacggcctgctgagacggagagaggactggcctagcagactgcagatgttcttcgccaataaccacgaccaggagttcgacccccctaaggtgtaccctcccgtccccgccgagaagagaaagcccatccgggtcctgagcctgttcgatggcatcgccaccggtctgctggtgctgaaggacctgggcatccaggtggataggtacattgcctccgaggtgtgcgaggactccatcaccgtgggaatggtgcgtcatcagggcaagatcatgtacgtgggcgacgtgcggagcgtgacacagaagcatatccaggagtggggccctttcgacctggtgatcggcggcagcccttgcaatgacctgagcatcgtgaacccagcccggaagggcctgtacgagggaaccggcagactgttcttcgagttttacagactgctgcacgacgcccggcctaaggaaggcgacgaccggcccttcttttggctgttcgagaatgtggtggccatgggagtcagcgacaagcgggatattagccggttcctggagagcaaccccgtgatgatcgatgccaaggaagtgagcgccgcccaccgggccagatacttctggggcaatctgcctggcatgaacagacccctggccagcaccgtgaacgacaagctggagctgcaggagtgcctggagcacggccggatcgccaagttcagcaaggtgagaaccatcaccacccgaagcaacagcatcaaacaaggcaaggaccagcactttcctgtgttcatgaacgagaaggaggacatcctgtggtgtaccgagatggagagagtgttcgggttcccagtccactacacagatgtcagcaacatgtctagactggccagacagagactgctgggaagaagctggtccgtccctgtgatcagacacctgttcgcccctctgaaggagtacttcgcctgcgtgagcagcggcaacagcaacgccaacagccggggccccagcttctctagcggcctggtgccactgtccctgagagggagccacatgggccccatggagatctacaaaaccgtgagcgcctggaagcggcagcctgtgcgcgtgctgagcctgtttcggaatatcgataaagtcctgaaaagcctgggattcctggagagcggctctggctccggcggtggcaccctgaagtacgtggaggatgtgacaaacgtggtcagacgggatgtggagaagtggggccccttcgatctggtgtacggcagcacccaacccctgggcagctcttgtgaccggtgccctggctggtacatgtttcagttccaccggatcctgcagtacgccctgccgagacaggagtcccagcggccattcttttggattttcatggacaacttgctgctgaccgaggatgaccaggaaactaccactcggttcctgcagaccgaagccgtgaccctgcaggacgtgagaggccgggactaccagaacgccatgcgggtgtggtccaacatccctggactgaaaagcaagcacgcacctctgacccctaaagaagaggagtacctgcaggcccaggtgcggagcagaagcaagctggacgcccctaaggtggatctgctggtgaagaattgcctcctgcccctgagagagtacttcaagtatttcagccagaatagtctgcccctgggaggcagcggcggcggcgccctggtgacatttgaggacgtcgccgtgcggttcacccaggaggaatgggctctgctggatccttctcagaaaatcctgtaccgggacgtgatgagagagacataccggaatctgacctccgtgggcatcaactgggaatgttgggaccttgaagcctgcttcagaagcctgggaagaaacctgagagtgcaggtggtgaagagaaagtgcgagctgaccaacagcggcccctgcgccgagggcggcccaagcagcggcgcccctcctcccagcggcggcagcccagccggctccccaacctctaccgaggagggcacctctgagtccgccacccccgagagcggccctggcacctccaccgagcccagcgagggcagcgcacccggcagccctgccggcagccccacctccacagaggagggaaccagcaccgagcccagcgaaggcagcgccccaggcaccagcaccgagcctagtgagcaggagattaaacggatcaacaagatcagaagaagacttgtgaaagacagcaacaccaagaaggccggcaagacaggccccatgaaaaccctgctggttagagtgatgacacccgatctgagagagcggctggaaaacctgagaaagaagcctgaaaatatcccccagcccatcagcaatacatctagagccaacctgaataagctgctgaccgattacaccgaaatgaagaaggcgatcctgcatgtgtactgggaagagttccagaaggaccctgtgggcctgatgagccgggtggcccagcctgccagcaagaagatcgatcagaacaagctgaaacctgagatggacgagaagggcaacctgaccaccgccggctttgcctgctctcagtgtggccagcccctgttcgtgtacaagctggagcaggtgtctgagaagggcaaggcttacaccaactacttcggacggtgcaatgtggccgagcacgaaaagctgatcctgctggcccagctgaagcccgagaaggatagcgacgaagccgtgacatatagcctgggaaagtttgggcagagggccctggatttctacagcattcatgtgaccaaggagtccacccaccccgtgaagcccctggcccagatcgccggaaacagatacgcctccggacctgtgggaaaggccctgagcgacgcatgtatgggcacaatcgcctccttcctgtctaagtaccaggacatcatcatcgaacaccagaaggtggtgaagggcaaccagaagagactggagagcctgcgggagctggccggcaaggaaaacctggaataccctagcgtgaccctgccacctcagcctcacaccaaggagggcgttgatgcctacaacgaagtgatcgcccgggtgcgaatgtgggtgaacctgaacctgtggcagaagctgaagctaagcagagatgatgccaagcctctgctgagactgaagggattcccttcctttcctctggtcgagagacaggccaacgaagtggactggtgggacatggtgtgtaacgtgaagaagctgatcaacgagaaaaaggaggatggcaaggtgttttggcagaatctggctggctacaagagacaggaagccctgagaccatacctgagcagcgaggaagatcggaagaagggaaagaaattcgctcggtaccagctgggcgacctgctgctgcacctggaaaagaagcacggcgaggactggggaaaggtgtacgacgaggcctgggagcggattgacaagaaagtggaaggcctgagcaagcacatcaagctggaagaggaacggagaagcgaggacgcccagagcaaggccgccctgaccgactggctgcgggctaaggccagcttcgtgatcgagggcctgaaggaggccgacaaggacgagttctgcagatgcgagctgaagctgcagaagtggtacggggacctgcggggaaagcccttcgccatcgaagccgagaacagcatcctggacatcagcggcttcagcaagcagtacaactgtgccttcatctggcagaaggacggcgtgaagaagctgaacctgtacctgatcatcaactacttcaagggcggcaagctgcggttcaagaagatcaaacctgaagccttcgaagccaacagattctacaccgtgatcaacaaaaagagcggcgagatcgtgcccatggaggtgaacttcaacttcgacgaccccaacctgatcatcctgcctctggcctttggcaagagacagggcagagaattcatctggaacgacctgctgtccctggaaaccggcagcctgaagctggccaacggaagagtgatcgagaagacactgtacaacagaagaacccggcaggatgagcctgccctgttcgtggccctgaccttcgagcggcgggaggtcctggactcctccaatatcaaaccaatgaacctgatcggcgtggcaagaggcgaaaacatccccgccgtgatcgccctgaccgaccccgagggctgcccactgagccggtttaaggatagcctgggaaacccaacccacatcctgagaatcggcgagagctataaggagaagcagcggaccatccaggccaagaaggaggtggagcagcggagagccggcggctacagccggaagtacgccagcaaagccaagaatctggcagacgatatggtgagaaacaccgctagagatctgctgtactacgccgtgacccaggatgccatgctgatcttcgccaacctgagccggggcttcggccggcagggcaagcggaccttcatggccgagagacagtacacacggatggaggactggctgaccgccaagctggcctacgagggcctgagcaagacctacctgtccaagacactggcccagtacacctccaagacatgcagcaactgtgggtttaccatcaccagcgccgactacgacagggtgctggagaagctgaagaagacagcaacaggctggatgaccacaattaacggcaaggagctgaaggtggagggccagattacctactacaacagatacaagagacagaacgtagtcaaggacctgtccgtcgagctggatagactgagcgaagaatctgtgaacaacgacatctcctcctggacaaagggcagaagcggagaagctctgagcctcctgaagaaaagattctcccatagacccgtgcaggagaagttcgtgtgcctgaactgcggcttcgagacacacgcagccgagcaagccgccctgaacatcgccagatcctggctgttcctgcggagccaggagtacaagaaataccagacaaacaagacaaccggcaacaccgataagagagccttcgtcgagacctggcagtccttttaccggaagaagcttaaggaggtgtggaaacctgccgtgcggtctggcggatctggcggaggctccttccaggaggtggtgaccttcgaggacgtggccgtgcacttcacccaggccgagtgggccggcctgagcagcgcccagagggccctgcacaggagcgtgatgctggagaactacggcaacctgaccagcctgggctacaccgtgcccaacagcgccctgatcagcctgctggagggcagggacctgccctggggcctggaggcccagaacgacccccccgccgagaggagcacccacgtgtgcggcggcccaagcagcggcgcccctcctcccagcggcggcagcccagccggctccccaacctctaccgaggagggcacctctgagtccgccacccccgagagcggccctggcacctccaccgagcccagcgagggcagcgcacccggcagccctgccggcagccccacctccacagaggagggaaccagcaccgagcccagcgaaggcagcgccccaggcaccagcaccgagcctagtgagcaggagattaaacggatcaacaagatcagaagaagacttgtgaaagacagcaacaccaagaaggccggcaagacaggccccatgaaaaccctgctggttagagtgatgacacccgatctgagagagcggctggaaaacctgagaaagaagcctgaaaatatcccccagcccatcagcaatacatctagagccaacctgaataagctgctgaccgattacaccgaaatgaagaaggcgatcctgcatgtgtactgggaagagttccagaaggaccctgtgggcctgatgagccgggtggcccagcctgccagcaagaagatcgatcagaacaagctgaaacctgagatggacgagaagggcaacctgaccaccgccggctttgcctgctctcagtgtggccagcccctgttcgtgtacaagctggagcaggtgtctgagaagggcaaggcttacaccaactacttcggacggtgcaatgtggccgagcacgaaaagctgatcctgctggcccagctgaagcccgagaaggatagcgacgaagccgtgacatatagcctgggaaagtttgggcagagggccctggatttctacagcattcatgtgaccaaggagtccacccaccccgtgaagcccctggcccagatcgccggaaacagatacgcctccggacctgtgggaaaggccctgagcgacgcatgtatgggcacaatcgcctccttcctgtctaagtaccaggacatcatcatcgaacaccagaaggtggtgaagggcaaccagaagagactggagagcctgcgggagctggccggcaaggaaaacctggaataccctagcgtgaccctgccacctcagcctcacaccaaggagggcgttgatgcctacaacgaagtgatcgcccgggtgcgaatgtgggtgaacctgaacctgtggcagaagctgaagctaagcagagatgatgccaagcctctgctgagactgaagggattcccttcctttcctctggtcgagagacaggccaacgaagtggactggtgggacatggtgtgtaacgtgaagaagctgatcaacgagaaaaaggaggatggcaaggtgttttggcagaatctggctggctacaagagacaggaagccctgagaccatacctgagcagcgaggaagatcggaagaagggaaagaaattcgctcggtaccagctgggcgacctgctgctgcacctggaaaagaagcacggcgaggactggggaaaggtgtacgacgaggcctgggagcggattgacaagaaagtggaaggcctgagcaagcacatcaagctggaagaggaacggagaagcgaggacgcccagagcaaggccgccctgaccgactggctgcgggctaaggccagcttcgtgatcgagggcctgaaggaggccgacaaggacgagttctgcagatgcgagctgaagctgcagaagtggtacggggacctgcggggaaagcccttcgccatcgaagccgagaacagcatcctggacatcagcggcttcagcaagcagtacaactgtgccttcatctggcagaaggacggcgtgaagaagctgaacctgtacctgatcatcaactacttcaagggcggcaagctgcggttcaagaagatcaaacctgaagccttcgaagccaacagattctacaccgtgatcaacaaaaagagcggcgagatcgtgcccatggaggtgaacttcaacttcgacgaccccaacctgatcatcctgcctctggcctttggcaagagacagggcagagaattcatctggaacgacctgctgtccctggaaaccggcagcctgaagctggccaacggaagagtgatcgagaagacactgtacaacagaagaacccggcaggatgagcctgccctgttcgtggccctgaccttcgagcggcgggaggtcctggactcctccaatatcaaaccaatgaacctgatcggcgtggcaagaggcgaaaacatccccgccgtgatcgccctgaccgaccccgagggctgcccactgagccggtttaaggatagcctgggaaacccaacccacatcctgagaatcggcgagagctataaggagaagcagcggaccatccaggccaagaaggaggtggagcagcggagagccggcggctacagccggaagtacgccagcaaagccaagaatctggcagacgatatggtgagaaacaccgctagagatctgctgtactacgccgtgacccaggatgccatgctgatcttcgccaacctgagccggggcttcggccggcagggcaagcggaccttcatggccgagagacagtacacacggatggaggactggctgaccgccaagctggcctacgagggcctgagcaagacctacctgtccaagacactggcccagtacacctccaagacatgcagcaactgtgggtttaccatcaccagcgccgactacgacagggtgctggagaagctgaagaagacagcaacaggctggatgaccacaattaacggcaaggagctgaaggtggagggccagattacctactacaacagatacaagagacagaacgtagtcaaggacctgtccgtcgagctggatagactgagcgaagaatctgtgaacaacgacatctcctcctggacaaagggcagaagcggagaagctctgagcctcctgaagaaaagattctcccatagacccgtgcaggagaagttcgtgtgcctgaactgcggcttcgagacacacgcagccgagcaagccgccctgaacatcgccagatcctggctgttcctgcggagccaggagtacaagaaataccagacaaacaagacaaccggcaacaccgataagagagccttcgtcgagacctggcagtccttttaccggaagaagcttaaggaggtgtggaaacctgccgtgcggtctggcggatctggcggaggctcctttccaggaggtggtgaccttcgaggacgtggccgtgcacttcacccaggccgagtgggccggcctgagcagcgcccagagggccctgcacaggagcgtgatgctggagaactacggcaacctgaccagcctgggctacaccgtgcccaacagcgccctgatcagcctgctggagggcagggacctgccctggggcctggaggcccagaacgacccccccgccgagaggagcacccacgtgtgcggatctggctccggcagcggccccaagaaaaagagaaaagtctaagctgccttctgcggggcttgccttctggccatgcccttcttctctcccttgcacctgtacctcttggtctttgaataaagcctgagtaggaaggctagcaaaaaaaaaaaaaaaaaaaaaaaaaaaaaaaaaaaaaaaaaaaaaaaaaaaaaaaaaaaaaaaaaaaaaaaaaaaaaaaa

SEQ ID NO: 16269 - RNA, 9485 nt, synthetic construct
  source 1..9485: mol_type = other RNA
aggaaataagagagaaaagaagagtaagaagaaatataagagccaccatggcccctaagaagaagcgtaaagtgagccggatggaacgcctcgtctacgaggtgcggcagaagtgcagaaacatcgaggacatctgcatctcctgcggatctctgaacgtgaccctggagcacccactgttcatcggcggcatgtgccagaactgtaaaaactgttttctggagtgtgcctatcaatacgacgatgacggctaccagagctactgcaccatctgttgcggcggaagagaggtgctgatgtgtggaaataacaactgctgccggtgcttctgcgtggaatgcgtggacctgctggtgggccccggcgccgcccaggccgctattaaggaagatccttggaactgctacatgtgcggccacaagggcacatacggcctgctgagacggagagaggactggcctagcagactgcagatgttcttcgccaataaccacgaccaggagttcgacccccctaaggtgtaccctcccgtccccgccgagaagagaaagcccatccgggtcctgagcctgttcgatggcatcgccaccggtctgctggtgctgaaggacctgggcatccaggtggataggtacattgcctccgaggtgtgcgaggactccatcaccgtgggaatggtgcgtcatcagggcaagatcatgtacgtgggcgacgtgcggagcgtgacacagaagcatatccaggagtggggccctttcgacctggtgatcggcggcagcccttgcaatgacctgagcatcgtgaacccagcccggaagggcctgtacgagggaaccggcagactgttcttcgagttttacagactgctgcacgacgcccggcctaaggaaggcgacgaccggcccttcttttggctgttcgagaatgtggtggccatgggagtcagcgacaagcgggatattagccggttcctggagagcaaccccgtgatgatcgatgccaaggaagtgagcgccgcccaccgggccagatacttctggggcaatctgcctggcatgaacagacccctggccagcaccgtgaacgacaagctggagctgcaggagtgcctggagcacggccggatcgccaagttcagcaaggtgagaaccatcaccacccgaagcaacagcatcaaacaaggcaaggaccagcactttcctgtgttcatgaacgagaaggaggacatcctgtggtgtaccgagatggagagagtgttcgggttcccagtccactacacagatgtcagcaacatgtctagactggccagacagagactgctgggaagaagctggtccgtccctgtgatcagacacctgttcgcccctctgaaggagtacttcgcctgcgtgagcagcggcaacagcaacgccaacagccggggccccagcttctctagcggcctggtgccactgtccctgagagggagccacatgggccccatggagatctacaaaaccgtgagcgcctggaagcggcagcctgtgcgcgtgctgagcctgtttcggaatatcgataaagtcctgaaaagcctgggattcctggagagcggctctggctccggcggtggcaccctgaagtacgtggaggatgtgacaaacgtggtcagacgggatgtggagaagtggggccccttcgatctggtgtacggcagcacccaacccctgggcagctcttgtgaccggtgccctggctggtacatgtttcagttccaccggatcctgcagtacgccctgccgagacaggagtcccagcggccattcttttggattttcatggacaacttgctgctgaccgaggatgaccaggaaactaccactcggttcctgcagaccgaagccgtgaccctgcaggacgtgagaggccgggactaccagaacgccatgcgggtgtggtccaacatccctggactgaaaagcaagcacgcacctctgacccctaaagaagaggagtacctgcaggcccaggtgcggagcagaagcaagctggacgcccctaaggtggatctgctggtgaagaattgcctcctgcccctgagagagtacttcaagtatttcagccagaatagtctgcccctgggaggcagcggcggcggcgccctggtgacatttgaggacgtcgccgtgcggttcacccaggaggaatgggctctgctggatccttctcagaaaatcctgtaccgggacgtgatgagagagacataccggaatctgacctccgtgggcatcaactgggaatgttgggaccttgaagcctgcttcagaagcctgggaagaaacctgagagtgcaggtggtgaagagaaagtgcgagctgaccaacagcggcccctgcgccgagggcggcccaagcagcggcgcccctcctcccagcggcggcagcccagccggctccccaacctctaccgaggagggcacctctgagtccgccacccccgagagcggccctggcacctccaccgagcccagcgagggcagcgcacccggcagccctgccggcagccccacctccacagaggagggaaccagcaccgagcccagcgaaggcagcgccccaggcaccagcaccgagcctagtgagcaggagattaaacggatcaacaagatcagaagaagacttgtgaaagacagcaacaccaagaaggccggcaagacaggccccatgaaaaccctgctggttagagtgatgacacccgatctgagagagcggctggaaaacctgagaaagaagcctgaaaatatcccccagcccatcagcaatacatctagagccaacctgaataagctgctgaccgattacaccgaaatgaagaaggcgatcctgcatgtgtactgggaagagttccagaaggaccctgtgggcctgatgagccgggtggcccagcctgccagcaagaagatcgatcagaacaagctgaaacctgagatggacgagaagggcaacctgaccaccgccggctttgcctgctctcagtgtggccagcccctgttcgtgtacaagctggagcaggtgtctgagaagggcaaggcttacaccaactacttcggacggtgcaatgtggccgagcacgaaaagctgatcctgctggcccagctgaagcccgagaaggatagcgacgaagccgtgacatatagcctgggaaagtttgggcagagggccctggatttctacagcattcatgtgaccaaggagtccacccaccccgtgaagcccctggcccagatcgccggaaacagatacgcctccggacctgtgggaaaggccctgagcgacgcatgtatgggcacaatcgcctccttcctgtctaagtaccaggacatcatcatcgaacaccagaaggtggtgaagggcaaccagaagagactggagagcctgcgggagctggccggcaaggaaaacctggaataccctagcgtgaccctgccacctcagcctcacaccaaggagggcgttgatgcctacaacgaagtgatcgcccgggtgcgaatgtgggtgaacctgaacctgtggcagaagctgaagctaagcagagatgatgccaagcctctgctgagactgaagggattcccttcctttcctctggtcgagagacaggccaacgaagtggactggtgggacatggtgtgtaacgtgaagaagctgatcaacgagaaaaaggaggatggcaaggtgttttggcagaatctggctggctacaagagacaggaagccctgagaccatacctgagcagcgaggaagatcggaagaagggaaagaaattcgctcggtaccagctgggcgacctgctgctgcacctggaaaagaagcacggcgaggactggggaaaggtgtacgacgaggcctgggagcggattgacaagaaagtggaaggcctgagcaagcacatcaagctggaagaggaacggagaagcgaggacgcccagagcaaggccgccctgaccgactggctgcgggctaaggccagcttcgtgatcgagggcctgaaggaggccgacaaggacgagttctgcagatgcgagctgaagctgcagaagtggtacggggacctgcggggaaagcccttcgccatcgaagccgagaacagcatcctggacatcagcggcttcagcaagcagtacaactgtgccttcatctggcagaaggacggcgtgaagaagctgaacctgtacctgatcatcaactacttcaagggcggcaagctgcggttcaagaagatcaaacctgaagccttcgaagccaacagattctacaccgtgatcaacaaaaagagcggcgagatcgtgcccatggaggtgaacttcaacttcgacgaccccaacctgatcatcctgcctctggcctttggcaagagacagggcagagaattcatctggaacgacctgctgtccctggaaaccggcagcctgaagctggccaacggaagagtgatcgagaagacactgtacaacagaagaacccggcaggatgagcctgccctgttcgtggccctgaccttcgagcggcgggaggtcctggactcctccaatatcaaaccaatgaacctgatcggcgtggcaagaggcgaaaacatccccgccgtgatcgccctgaccgaccccgagggctgcccactgagccggtttaaggatagcctgggaaacccaacccacatcctgagaatcggcgagagctataaggagaagcagcggaccatccaggccaagaaggaggtggagcagcggagagccggcggctacagccggaagtacgccagcaaagccaagaatctggcagacgatatggtgagaaacaccgctagagatctgctgtactacgccgtgacccaggatgccatgctgatcttcgccaacctgagccggggcttcggccggcagggcaagcggaccttcatggccgagagacagtacacacggatggaggactggctgaccgccaagctggcctacgagggcctgagcaagacctacctgtccaagacactggcccagtacacctccaagacatgcagcaactgtgggtttaccatcaccagcgccgactacgacagggtgctggagaagctgaagaagacagcaacaggctggatgaccacaattaacggcaaggagctgaaggtggagggccagattacctactacaacagatacaagagacagaacgtagtcaaggacctgtccgtcgagctggatagactgagcgaagaatctgtgaacaacgacatctcctcctggacaaagggcagaagcggagaagctctgagcctcctgaagaaaagattctcccatagacccgtgcaggagaagttcgtgtgcctgaactgcggcttcgagacacacgcagccgagcaagccgccctgaacatcgccagatcctggctgttcctgcggagccaggagtacaagaaataccagacaaacaagacaaccggcaacaccgataagagagccttcgtcgagacctggcagtccttttaccggaagaagcttaaggaggtgtggaaacctgccgtgcggtctggcggatctggcggaggctccgtgcaggtgcccatcaagttcgaggacgtggccgtgtacttcagcgagcccgagtggaagaacctggaccagtggcagaaggagctgtacaagcacgtgatgaccgccaactacgagatcctgttcagcctggacagcgccatccccaagcccgacctgatcagccacatcgagaggggcgaggagcccttcctgagggaccacggcaacctgatgaagagggacaagaccatcggctacggcggcggcccaagcagcggcgcccctcctcccagcggcggcagcccagccggctccccaacctctaccgaggagggcacctctgagtccgccacccccgagagcggccctggcacctccaccgagcccagcgagggcagcgcacccggcagccctgccggcagccccacctccacagaggagggaaccagcaccgagcccagcgaaggcagcgccccaggcaccagcaccgagcctagtgagcaggagattaaacggatcaacaagatcagaagaagacttgtgaaagacagcaacaccaagaaggccggcaagacaggccccatgaaaaccctgctggttagagtgatgacacccgatctgagagagcggctggaaaacctgagaaagaagcctgaaaatatcccccagcccatcagcaatacatctagagccaacctgaataagctgctgaccgattacaccgaaatgaagaaggcgatcctgcatgtgtactgggaagagttccagaaggaccctgtgggcctgatgagccgggtggcccagcctgccagcaagaagatcgatcagaacaagctgaaacctgagatggacgagaagggcaacctgaccaccgccggctttgcctgctctcagtgtggccagcccctgttcgtgtacaagctggagcaggtgtctgagaagggcaaggcttacaccaactacttcggacggtgcaatgtggccgagcacgaaaagctgatcctgctggcccagctgaagcccgagaaggatagcgacgaagccgtgacatatagcctgggaaagtttgggcagagggccctggatttctacagcattcatgtgaccaaggagtccacccaccccgtgaagcccctggcccagatcgccggaaacagatacgcctccggacctgtgggaaaggccctgagcgacgcatgtatgggcacaatcgcctccttcctgtctaagtaccaggacatcatcatcgaacaccagaaggtggtgaagggcaaccagaagagactggagagcctgcgggagctggccggcaaggaaaacctggaataccctagcgtgaccctgccacctcagcctcacaccaaggagggcgttgatgcctacaacgaagtgatcgcccgggtgcgaatgtgggtgaacctgaacctgtggcagaagctgaagctaagcagagatgatgccaagcctctgctgagactgaagggattcccttcctttcctctggtcgagagacaggccaacgaagtggactggtgggacatggtgtgtaacgtgaagaagctgatcaacgagaaaaaggaggatggcaaggtgttttggcagaatctggctggctacaagagacaggaagccctgagaccatacctgagcagcgaggaagatcggaagaagggaaagaaattcgctcggtaccagctgggcgacctgctgctgcacctggaaaagaagcacggcgaggactggggaaaggtgtacgacgaggcctgggagcggattgacaagaaagtggaaggcctgagcaagcacatcaagctggaagaggaacggagaagcgaggacgcccagagcaaggccgccctgaccgactggctgcgggctaaggccagcttcgtgatcgagggcctgaaggaggccgacaaggacgagttctgcagatgcgagctgaagctgcagaagtggtacggggacctgcggggaaagcccttcgccatcgaagccgagaacagcatcctggacatcagcggcttcagcaagcagtacaactgtgccttcatctggcagaaggacggcgtgaagaagctgaacctgtacctgatcatcaactacttcaagggcggcaagctgcggttcaagaagatcaaacctgaagccttcgaagccaacagattctacaccgtgatcaacaaaaagagcggcgagatcgtgcccatggaggtgaacttcaacttcgacgaccccaacctgatcatcctgcctctggcctttggcaagagacagggcagagaattcatctggaacgacctgctgtccctggaaaccggcagcctgaagctggccaacggaagagtgatcgagaagacactgtacaacagaagaacccggcaggatgagcctgccctgttcgtggccctgaccttcgagcggcgggaggtcctggactcctccaatatcaaaccaatgaacctgatcggcgtggcaagaggcgaaaacatccccgccgtgatcgccctgaccgaccccgagggctgcccactgagccggtttaaggatagcctgggaaacccaacccacatcctgagaatcggcgagagctataaggagaagcagcggaccatccaggccaagaaggaggtggagcagcggagagccggcggctacagccggaagtacgccagcaaagccaagaatctggcagacgatatggtgagaaacaccgctagagatctgctgtactacgccgtgacccaggatgccatgctgatcttcgccaacctgagccggggcttcggccggcagggcaagcggaccttcatggccgagagacagtacacacggatggaggactggctgaccgccaagctggcctacgagggcctgagcaagacctacctgtccaagacactggcccagtacacctccaagacatgcagcaactgtgggtttaccatcaccagcgccgactacgacagggtgctggagaagctgaagaagacagcaacaggctggatgaccacaattaacggcaaggagctgaaggtggagggccagattacctactacaacagatacaagagacagaacgtagtcaaggacctgtccgtcgagctggatagactgagcgaagaatctgtgaacaacgacatctcctcctggacaaagggcagaagcggagaagctctgagcctcctgaagaaaagattctcccatagacccgtgcaggagaagttcgtgtgcctgaactgcggcttcgagacacacgcagccgagcaagccgccctgaacatcgccagatcctggctgttcctgcggagccaggagtacaagaaataccagacaaacaagacaaccggcaacaccgataagagagccttcgtcgagacctggcagtccttttaccggaagaagcttaaggaggtgtggaaacctgccgtgcggtctggcggatctggcggaggctcctgtgcaggtgcccatcaagttcgaggacgtggccgtgtacttcagcgagcccgagtggaagaacctggaccagtggcagaaggagctgtacaagcacgtgatgaccgccaactacgagatcctgttcagcctggacagcgccatccccaagcccgacctgatcagccacatcgagaggggcgaggagcccttcctgagggaccacggcaacctgatgaagagggacaagaccatcggctacggcggatctggctccggcagcggccccaagaaaaagagaaaagtctaagctgccttctgcggggcttgccttctggccatgcccttcttctctcccttgcacctgtacctcttggtctttgaataaagcctgagtaggaaggctagcaaaaaaaaaaaaaaaaaaaaaaaaaaaaaaaaaaaaaaaaaaaaaaaaaaaaaaaaaaaaaaaaaaaaaaaaaaaaaaaa

SEQ ID NO: 16270 - RNA, 9485 nt, synthetic construct
  source 1..9485: mol_type = other RNA
aggaaataagagagaaaagaagagtaagaagaaatataagagccaccatggcccctaagaagaagcgtaaagtgagccggatggaacgcctcgtctacgaggtgcggcagaagtgcagaaacatcgaggacatctgcatctcctgcggatctctgaacgtgaccctggagcacccactgttcatcggcggcatgtgccagaactgtaaaaactgttttctggagtgtgcctatcaatacgacgatgacggctaccagagctactgcaccatctgttgcggcggaagagaggtgctgatgtgtggaaataacaactgctgccggtgcttctgcgtggaatgcgtggacctgctggtgggccccggcgccgcccaggccgctattaaggaagatccttggaactgctacatgtgcggccacaagggcacatacggcctgctgagacggagagaggactggcctagcagactgcagatgttcttcgccaataaccacgaccaggagttcgacccccctaaggtgtaccctcccgtccccgccgagaagagaaagcccatccgggtcctgagcctgttcgatggcatcgccaccggtctgctggtgctgaaggacctgggcatccaggtggataggtacattgcctccgaggtgtgcgaggactccatcaccgtgggaatggtgcgtcatcagggcaagatcatgtacgtgggcgacgtgcggagcgtgacacagaagcatatccaggagtggggccctttcgacctggtgatcggcggcagcccttgcaatgacctgagcatcgtgaacccagcccggaagggcctgtacgagggaaccggcagactgttcttcgagttttacagactgctgcacgacgcccggcctaaggaaggcgacgaccggcccttcttttggctgttcgagaatgtggtggccatgggagtcagcgacaagcgggatattagccggttcctggagagcaaccccgtgatgatcgatgccaaggaagtgagcgccgcccaccgggccagatacttctggggcaatctgcctggcatgaacagacccctggccagcaccgtgaacgacaagctggagctgcaggagtgcctggagcacggccggatcgccaagttcagcaaggtgagaaccatcaccacccgaagcaacagcatcaaacaaggcaaggaccagcactttcctgtgttcatgaacgagaaggaggacatcctgtggtgtaccgagatggagagagtgttcgggttcccagtccactacacagatgtcagcaacatgtctagactggccagacagagactgctgggaagaagctggtccgtccctgtgatcagacacctgttcgcccctctgaaggagtacttcgcctgcgtgagcagcggcaacagcaacgccaacagccggggccccagcttctctagcggcctggtgccactgtccctgagagggagccacatgggccccatggagatctacaaaaccgtgagcgcctggaagcggcagcctgtgcgcgtgctgagcctgtttcggaatatcgataaagtcctgaaaagcctgggattcctggagagcggctctggctccggcggtggcaccctgaagtacgtggaggatgtgacaaacgtggtcagacgggatgtggagaagtggggccccttcgatctggtgtacggcagcacccaacccctgggcagctcttgtgaccggtgccctggctggtacatgtttcagttccaccggatcctgcagtacgccctgccgagacaggagtcccagcggccattcttttggattttcatggacaacttgctgctgaccgaggatgaccaggaaactaccactcggttcctgcagaccgaagccgtgaccctgcaggacgtgagaggccgggactaccagaacgccatgcgggtgtggtccaacatccctggactgaaaagcaagcacgcacctctgacccctaaagaagaggagtacctgcaggcccaggtgcggagcagaagcaagctggacgcccctaaggtggatctgctggtgaagaattgcctcctgcccctgagagagtacttcaagtatttcagccagaatagtctgcccctgggaggcagcggcggcggcgccctggtgacatttgaggacgtcgccgtgcggttcacccaggaggaatgggctctgctggatccttctcagaaaatcctgtaccgggacgtgatgagagagacataccggaatctgacctccgtgggcatcaactgggaatgttgggaccttgaagcctgcttcagaagcctgggaagaaacctgagagtgcaggtggtgaagagaaagtgcgagctgaccaacagcggcccctgcgccgagggcggcccaagcagcggcgcccctcctcccagcggcggcagcccagccggctccccaacctctaccgaggagggcacctctgagtccgccacccccgagagcggccctggcacctccaccgagcccagcgagggcagcgcacccggcagccctgccggcagccccacctccacagaggagggaaccagcaccgagcccagcgaaggcagcgccccaggcaccagcaccgagcctagtgagcaggagattaaacggatcaacaagatcagaagaagacttgtgaaagacagcaacaccaagaaggccggcaagacaggccccatgaaaaccctgctggttagagtgatgacacccgatctgagagagcggctggaaaacctgagaaagaagcctgaaaatatcccccagcccatcagcaatacatctagagccaacctgaataagctgctgaccgattacaccgaaatgaagaaggcgatcctgcatgtgtactgggaagagttccagaaggaccctgtgggcctgatgagccgggtggcccagcctgccagcaagaagatcgatcagaacaagctgaaacctgagatggacgagaagggcaacctgaccaccgccggctttgcctgctctcagtgtggccagcccctgttcgtgtacaagctggagcaggtgtctgagaagggcaaggcttacaccaactacttcggacggtgcaatgtggccgagcacgaaaagctgatcctgctggcccagctgaagcccgagaaggatagcgacgaagccgtgacatatagcctgggaaagtttgggcagagggccctggatttctacagcattcatgtgaccaaggagtccacccaccccgtgaagcccctggcccagatcgccggaaacagatacgcctccggacctgtgggaaaggccctgagcgacgcatgtatgggcacaatcgcctccttcctgtctaagtaccaggacatcatcatcgaacaccagaaggtggtgaagggcaaccagaagagactggagagcctgcgggagctggccggcaaggaaaacctggaataccctagcgtgaccctgccacctcagcctcacaccaaggagggcgttgatgcctacaacgaagtgatcgcccgggtgcgaatgtgggtgaacctgaacctgtggcagaagctgaagctaagcagagatgatgccaagcctctgctgagactgaagggattcccttcctttcctctggtcgagagacaggccaacgaagtggactggtgggacatggtgtgtaacgtgaagaagctgatcaacgagaaaaaggaggatggcaaggtgttttggcagaatctggctggctacaagagacaggaagccctgagaccatacctgagcagcgaggaagatcggaagaagggaaagaaattcgctcggtaccagctgggcgacctgctgctgcacctggaaaagaagcacggcgaggactggggaaaggtgtacgacgaggcctgggagcggattgacaagaaagtggaaggcctgagcaagcacatcaagctggaagaggaacggagaagcgaggacgcccagagcaaggccgccctgaccgactggctgcgggctaaggccagcttcgtgatcgagggcctgaaggaggccgacaaggacgagttctgcagatgcgagctgaagctgcagaagtggtacggggacctgcggggaaagcccttcgccatcgaagccgagaacagcatcctggacatcagcggcttcagcaagcagtacaactgtgccttcatctggcagaaggacggcgtgaagaagctgaacctgtacctgatcatcaactacttcaagggcggcaagctgcggttcaagaagatcaaacctgaagccttcgaagccaacagattctacaccgtgatcaacaaaaagagcggcgagatcgtgcccatggaggtgaacttcaacttcgacgaccccaacctgatcatcctgcctctggcctttggcaagagacagggcagagaattcatctggaacgacctgctgtccctggaaaccggcagcctgaagctggccaacggaagagtgatcgagaagacactgtacaacagaagaacccggcaggatgagcctgccctgttcgtggccctgaccttcgagcggcgggaggtcctggactcctccaatatcaaaccaatgaacctgatcggcgtggcaagaggcgaaaacatccccgccgtgatcgccctgaccgaccccgagggctgcccactgagccggtttaaggatagcctgggaaacccaacccacatcctgagaatcggcgagagctataaggagaagcagcggaccatccaggccaagaaggaggtggagcagcggagagccggcggctacagccggaagtacgccagcaaagccaagaatctggcagacgatatggtgagaaacaccgctagagatctgctgtactacgccgtgacccaggatgccatgctgatcttcgccaacctgagccggggcttcggccggcagggcaagcggaccttcatggccgagagacagtacacacggatggaggactggctgaccgccaagctggcctacgagggcctgagcaagacctacctgtccaagacactggcccagtacacctccaagacatgcagcaactgtgggtttaccatcaccagcgccgactacgacagggtgctggagaagctgaagaagacagcaacaggctggatgaccacaattaacggcaaggagctgaaggtggagggccagattacctactacaacagatacaagagacagaacgtagtcaaggacctgtccgtcgagctggatagactgagcgaagaatctgtgaacaacgacatctcctcctggacaaagggcagaagcggagaagctctgagcctcctgaagaaaagattctcccatagacccgtgcaggagaagttcgtgtgcctgaactgcggcttcgagacacacgcagccgagcaagccgccctgaacatcgccagatcctggctgttcctgcggagccaggagtacaagaaataccagacaaacaagacaaccggcaacaccgataagagagccttcgtcgagacctggcagtccttttaccggaagaagcttaaggaggtgtggaaacctgccgtgcggtctggcggatctggcggaggctccaggcccagggccgtgaagttcggcgacgtggccctgtacttcagcagggaggagtggggctgcctgaggcccgcccagagggccctgtacagggacgtgatgcaggagacctacggccacctgggcgccctgggctgcgccggccccaagcccgccctgatcagctggctggagaggaacaccgacgactgggagcccgccgccctggacccccaggagtgccccaagggcgtggccgtgcagggcggcccaagcagcggcgcccctcctcccagcggcggcagcccagccggctccccaacctctaccgaggagggcacctctgagtccgccacccccgagagcggccctggcacctccaccgagcccagcgagggcagcgcacccggcagccctgccggcagccccacctccacagaggagggaaccagcaccgagcccagcgaaggcagcgccccaggcaccagcaccgagcctagtgagcaggagattaaacggatcaacaagatcagaagaagacttgtgaaagacagcaacaccaagaaggccggcaagacaggccccatgaaaaccctgctggttagagtgatgacacccgatctgagagagcggctggaaaacctgagaaagaagcctgaaaatatcccccagcccatcagcaatacatctagagccaacctgaataagctgctgaccgattacaccgaaatgaagaaggcgatcctgcatgtgtactgggaagagttccagaaggaccctgtgggcctgatgagccgggtggcccagcctgccagcaagaagatcgatcagaacaagctgaaacctgagatggacgagaagggcaacctgaccaccgccggctttgcctgctctcagtgtggccagcccctgttcgtgtacaagctggagcaggtgtctgagaagggcaaggcttacaccaactacttcggacggtgcaatgtggccgagcacgaaaagctgatcctgctggcccagctgaagcccgagaaggatagcgacgaagccgtgacatatagcctgggaaagtttgggcagagggccctggatttctacagcattcatgtgaccaaggagtccacccaccccgtgaagcccctggcccagatcgccggaaacagatacgcctccggacctgtgggaaaggccctgagcgacgcatgtatgggcacaatcgcctccttcctgtctaagtaccaggacatcatcatcgaacaccagaaggtggtgaagggcaaccagaagagactggagagcctgcgggagctggccggcaaggaaaacctggaataccctagcgtgaccctgccacctcagcctcacaccaaggagggcgttgatgcctacaacgaagtgatcgcccgggtgcgaatgtgggtgaacctgaacctgtggcagaagctgaagctaagcagagatgatgccaagcctctgctgagactgaagggattcccttcctttcctctggtcgagagacaggccaacgaagtggactggtgggacatggtgtgtaacgtgaagaagctgatcaacgagaaaaaggaggatggcaaggtgttttggcagaatctggctggctacaagagacaggaagccctgagaccatacctgagcagcgaggaagatcggaagaagggaaagaaattcgctcggtaccagctgggcgacctgctgctgcacctggaaaagaagcacggcgaggactggggaaaggtgtacgacgaggcctgggagcggattgacaagaaagtggaaggcctgagcaagcacatcaagctggaagaggaacggagaagcgaggacgcccagagcaaggccgccctgaccgactggctgcgggctaaggccagcttcgtgatcgagggcctgaaggaggccgacaaggacgagttctgcagatgcgagctgaagctgcagaagtggtacggggacctgcggggaaagcccttcgccatcgaagccgagaacagcatcctggacatcagcggcttcagcaagcagtacaactgtgccttcatctggcagaaggacggcgtgaagaagctgaacctgtacctgatcatcaactacttcaagggcggcaagctgcggttcaagaagatcaaacctgaagccttcgaagccaacagattctacaccgtgatcaacaaaaagagcggcgagatcgtgcccatggaggtgaacttcaacttcgacgaccccaacctgatcatcctgcctctggcctttggcaagagacagggcagagaattcatctggaacgacctgctgtccctggaaaccggcagcctgaagctggccaacggaagagtgatcgagaagacactgtacaacagaagaacccggcaggatgagcctgccctgttcgtggccctgaccttcgagcggcgggaggtcctggactcctccaatatcaaaccaatgaacctgatcggcgtggcaagaggcgaaaacatccccgccgtgatcgccctgaccgaccccgagggctgcccactgagccggtttaaggatagcctgggaaacccaacccacatcctgagaatcggcgagagctataaggagaagcagcggaccatccaggccaagaaggaggtggagcagcggagagccggcggctacagccggaagtacgccagcaaagccaagaatctggcagacgatatggtgagaaacaccgctagagatctgctgtactacgccgtgacccaggatgccatgctgatcttcgccaacctgagccggggcttcggccggcagggcaagcggaccttcatggccgagagacagtacacacggatggaggactggctgaccgccaagctggcctacgagggcctgagcaagacctacctgtccaagacactggcccagtacacctccaagacatgcagcaactgtgggtttaccatcaccagcgccgactacgacagggtgctggagaagctgaagaagacagcaacaggctggatgaccacaattaacggcaaggagctgaaggtggagggccagattacctactacaacagatacaagagacagaacgtagtcaaggacctgtccgtcgagctggatagactgagcgaagaatctgtgaacaacgacatctcctcctggacaaagggcagaagcggagaagctctgagcctcctgaagaaaagattctcccatagacccgtgcaggagaagttcgtgtgcctgaactgcggcttcgagacacacgcagccgagcaagccgccctgaacatcgccagatcctggctgttcctgcggagccaggagtacaagaaataccagacaaacaagacaaccggcaacaccgataagagagccttcgtcgagacctggcagtccttttaccggaagaagcttaaggaggtgtggaaacctgccgtgcggtctggcggatctggcggaggctcctaggcccagggccgtgaagttcggcgacgtggccctgtacttcagcagggaggagtggggctgcctgaggcccgcccagagggccctgtacagggacgtgatgcaggagacctacggccacctgggcgccctgggctgcgccggccccaagcccgccctgatcagctggctggagaggaacaccgacgactgggagcccgccgccctggacccccaggagtgccccaagggcgtggccgtgcagggatctggctccggcagcggccccaagaaaaagagaaaagtctaagctgccttctgcggggcttgccttctggccatgcccttcttctctcccttgcacctgtacctcttggtctttgaataaagcctgagtaggaaggctagcaaaaaaaaaaaaaaaaaaaaaaaaaaaaaaaaaaaaaaaaaaaaaaaaaaaaaaaaaaaaaaaaaaaaaaaaaaaaaaaa

SEQ ID NO: 16271 - RNA, 9485 nt, synthetic construct
  source 1..9485: mol_type = other RNA
aggaaataagagagaaaagaagagtaagaagaaatataagagccaccatggcccctaagaagaagcgtaaagtgagccggatggaacgcctcgtctacgaggtgcggcagaagtgcagaaacatcgaggacatctgcatctcctgcggatctctgaacgtgaccctggagcacccactgttcatcggcggcatgtgccagaactgtaaaaactgttttctggagtgtgcctatcaatacgacgatgacggctaccagagctactgcaccatctgttgcggcggaagagaggtgctgatgtgtggaaataacaactgctgccggtgcttctgcgtggaatgcgtggacctgctggtgggccccggcgccgcccaggccgctattaaggaagatccttggaactgctacatgtgcggccacaagggcacatacggcctgctgagacggagagaggactggcctagcagactgcagatgttcttcgccaataaccacgaccaggagttcgacccccctaaggtgtaccctcccgtccccgccgagaagagaaagcccatccgggtcctgagcctgttcgatggcatcgccaccggtctgctggtgctgaaggacctgggcatccaggtggataggtacattgcctccgaggtgtgcgaggactccatcaccgtgggaatggtgcgtcatcagggcaagatcatgtacgtgggcgacgtgcggagcgtgacacagaagcatatccaggagtggggccctttcgacctggtgatcggcggcagcccttgcaatgacctgagcatcgtgaacccagcccggaagggcctgtacgagggaaccggcagactgttcttcgagttttacagactgctgcacgacgcccggcctaaggaaggcgacgaccggcccttcttttggctgttcgagaatgtggtggccatgggagtcagcgacaagcgggatattagccggttcctggagagcaaccccgtgatgatcgatgccaaggaagtgagcgccgcccaccgggccagatacttctggggcaatctgcctggcatgaacagacccctggccagcaccgtgaacgacaagctggagctgcaggagtgcctggagcacggccggatcgccaagttcagcaaggtgagaaccatcaccacccgaagcaacagcatcaaacaaggcaaggaccagcactttcctgtgttcatgaacgagaaggaggacatcctgtggtgtaccgagatggagagagtgttcgggttcccagtccactacacagatgtcagcaacatgtctagactggccagacagagactgctgggaagaagctggtccgtccctgtgatcagacacctgttcgcccctctgaaggagtacttcgcctgcgtgagcagcggcaacagcaacgccaacagccggggccccagcttctctagcggcctggtgccactgtccctgagagggagccacatgggccccatggagatctacaaaaccgtgagcgcctggaagcggcagcctgtgcgcgtgctgagcctgtttcggaatatcgataaagtcctgaaaagcctgggattcctggagagcggctctggctccggcggtggcaccctgaagtacgtggaggatgtgacaaacgtggtcagacgggatgtggagaagtggggccccttcgatctggtgtacggcagcacccaacccctgggcagctcttgtgaccggtgccctggctggtacatgtttcagttccaccggatcctgcagtacgccctgccgagacaggagtcccagcggccattcttttggattttcatggacaacttgctgctgaccgaggatgaccaggaaactaccactcggttcctgcagaccgaagccgtgaccctgcaggacgtgagaggccgggactaccagaacgccatgcgggtgtggtccaacatccctggactgaaaagcaagcacgcacctctgacccctaaagaagaggagtacctgcaggcccaggtgcggagcagaagcaagctggacgcccctaaggtggatctgctggtgaagaattgcctcctgcccctgagagagtacttcaagtatttcagccagaatagtctgcccctgggaggcagcggcggcggcgccctggtgacatttgaggacgtcgccgtgcggttcacccaggaggaatgggctctgctggatccttctcagaaaatcctgtaccgggacgtgatgagagagacataccggaatctgacctccgtgggcatcaactgggaatgttgggaccttgaagcctgcttcagaagcctgggaagaaacctgagagtgcaggtggtgaagagaaagtgcgagctgaccaacagcggcccctgcgccgagggcggcccaagcagcggcgcccctcctcccagcggcggcagcccagccggctccccaacctctaccgaggagggcacctctgagtccgccacccccgagagcggccctggcacctccaccgagcccagcgagggcagcgcacccggcagccctgccggcagccccacctccacagaggagggaaccagcaccgagcccagcgaaggcagcgccccaggcaccagcaccgagcctagtgagcaggagattaaacggatcaacaagatcagaagaagacttgtgaaagacagcaacaccaagaaggccggcaagacaggccccatgaaaaccctgctggttagagtgatgacacccgatctgagagagcggctggaaaacctgagaaagaagcctgaaaatatcccccagcccatcagcaatacatctagagccaacctgaataagctgctgaccgattacaccgaaatgaagaaggcgatcctgcatgtgtactgggaagagttccagaaggaccctgtgggcctgatgagccgggtggcccagcctgccagcaagaagatcgatcagaacaagctgaaacctgagatggacgagaagggcaacctgaccaccgccggctttgcctgctctcagtgtggccagcccctgttcgtgtacaagctggagcaggtgtctgagaagggcaaggcttacaccaactacttcggacggtgcaatgtggccgagcacgaaaagctgatcctgctggcccagctgaagcccgagaaggatagcgacgaagccgtgacatatagcctgggaaagtttgggcagagggccctggatttctacagcattcatgtgaccaaggagtccacccaccccgtgaagcccctggcccagatcgccggaaacagatacgcctccggacctgtgggaaaggccctgagcgacgcatgtatgggcacaatcgcctccttcctgtctaagtaccaggacatcatcatcgaacaccagaaggtggtgaagggcaaccagaagagactggagagcctgcgggagctggccggcaaggaaaacctggaataccctagcgtgaccctgccacctcagcctcacaccaaggagggcgttgatgcctacaacgaagtgatcgcccgggtgcgaatgtgggtgaacctgaacctgtggcagaagctgaagctaagcagagatgatgccaagcctctgctgagactgaagggattcccttcctttcctctggtcgagagacaggccaacgaagtggactggtgggacatggtgtgtaacgtgaagaagctgatcaacgagaaaaaggaggatggcaaggtgttttggcagaatctggctggctacaagagacaggaagccctgagaccatacctgagcagcgaggaagatcggaagaagggaaagaaattcgctcggtaccagctgggcgacctgctgctgcacctggaaaagaagcacggcgaggactggggaaaggtgtacgacgaggcctgggagcggattgacaagaaagtggaaggcctgagcaagcacatcaagctggaagaggaacggagaagcgaggacgcccagagcaaggccgccctgaccgactggctgcgggctaaggccagcttcgtgatcgagggcctgaaggaggccgacaaggacgagttctgcagatgcgagctgaagctgcagaagtggtacggggacctgcggggaaagcccttcgccatcgaagccgagaacagcatcctggacatcagcggcttcagcaagcagtacaactgtgccttcatctggcagaaggacggcgtgaagaagctgaacctgtacctgatcatcaactacttcaagggcggcaagctgcggttcaagaagatcaaacctgaagccttcgaagccaacagattctacaccgtgatcaacaaaaagagcggcgagatcgtgcccatggaggtgaacttcaacttcgacgaccccaacctgatcatcctgcctctggcctttggcaagagacagggcagagaattcatctggaacgacctgctgtccctggaaaccggcagcctgaagctggccaacggaagagtgatcgagaagacactgtacaacagaagaacccggcaggatgagcctgccctgttcgtggccctgaccttcgagcggcgggaggtcctggactcctccaatatcaaaccaatgaacctgatcggcgtggcaagaggcgaaaacatccccgccgtgatcgccctgaccgaccccgagggctgcccactgagccggtttaaggatagcctgggaaacccaacccacatcctgagaatcggcgagagctataaggagaagcagcggaccatccaggccaagaaggaggtggagcagcggagagccggcggctacagccggaagtacgccagcaaagccaagaatctggcagacgatatggtgagaaacaccgctagagatctgctgtactacgccgtgacccaggatgccatgctgatcttcgccaacctgagccggggcttcggccggcagggcaagcggaccttcatggccgagagacagtacacacggatggaggactggctgaccgccaagctggcctacgagggcctgagcaagacctacctgtccaagacactggcccagtacacctccaagacatgcagcaactgtgggtttaccatcaccagcgccgactacgacagggtgctggagaagctgaagaagacagcaacaggctggatgaccacaattaacggcaaggagctgaaggtggagggccagattacctactacaacagatacaagagacagaacgtagtcaaggacctgtccgtcgagctggatagactgagcgaagaatctgtgaacaacgacatctcctcctggacaaagggcagaagcggagaagctctgagcctcctgaagaaaagattctcccatagacccgtgcaggagaagttcgtgtgcctgaactgcggcttcgagacacacgcagccgagcaagccgccctgaacatcgccagatcctggctgttcctgcggagccaggagtacaagaaataccagacaaacaagacaaccggcaacaccgataagagagccttcgtcgagacctggcagtccttttaccggaagaagcttaaggaggtgtggaaacctgccgtgcggtctggcggatctggcggaggctccccccccaggcaggagagggtgaccttcggcgacgtggccgtggacttcaccctggacgagtgggtgtgcctggacagcgcccagaaggccctgtacagggacgtgatgctggagaactacggccacctggtgtgcctgggcctggccggcgccaagcccgccgtgatccagaggctggagaggggcgaggccgcctggtgccccggcgtgcccggcagcaggctgcccggcctgttcttcttcggcggcccaagcagcggcgcccctcctcccagcggcggcagcccagccggctccccaacctctaccgaggagggcacctctgagtccgccacccccgagagcggccctggcacctccaccgagcccagcgagggcagcgcacccggcagccctgccggcagccccacctccacagaggagggaaccagcaccgagcccagcgaaggcagcgccccaggcaccagcaccgagcctagtgagcaggagattaaacggatcaacaagatcagaagaagacttgtgaaagacagcaacaccaagaaggccggcaagacaggccccatgaaaaccctgctggttagagtgatgacacccgatctgagagagcggctggaaaacctgagaaagaagcctgaaaatatcccccagcccatcagcaatacatctagagccaacctgaataagctgctgaccgattacaccgaaatgaagaaggcgatcctgcatgtgtactgggaagagttccagaaggaccctgtgggcctgatgagccgggtggcccagcctgccagcaagaagatcgatcagaacaagctgaaacctgagatggacgagaagggcaacctgaccaccgccggctttgcctgctctcagtgtggccagcccctgttcgtgtacaagctggagcaggtgtctgagaagggcaaggcttacaccaactacttcggacggtgcaatgtggccgagcacgaaaagctgatcctgctggcccagctgaagcccgagaaggatagcgacgaagccgtgacatatagcctgggaaagtttgggcagagggccctggatttctacagcattcatgtgaccaaggagtccacccaccccgtgaagcccctggcccagatcgccggaaacagatacgcctccggacctgtgggaaaggccctgagcgacgcatgtatgggcacaatcgcctccttcctgtctaagtaccaggacatcatcatcgaacaccagaaggtggtgaagggcaaccagaagagactggagagcctgcgggagctggccggcaaggaaaacctggaataccctagcgtgaccctgccacctcagcctcacaccaaggagggcgttgatgcctacaacgaagtgatcgcccgggtgcgaatgtgggtgaacctgaacctgtggcagaagctgaagctaagcagagatgatgccaagcctctgctgagactgaagggattcccttcctttcctctggtcgagagacaggccaacgaagtggactggtgggacatggtgtgtaacgtgaagaagctgatcaacgagaaaaaggaggatggcaaggtgttttggcagaatctggctggctacaagagacaggaagccctgagaccatacctgagcagcgaggaagatcggaagaagggaaagaaattcgctcggtaccagctgggcgacctgctgctgcacctggaaaagaagcacggcgaggactggggaaaggtgtacgacgaggcctgggagcggattgacaagaaagtggaaggcctgagcaagcacatcaagctggaagaggaacggagaagcgaggacgcccagagcaaggccgccctgaccgactggctgcgggctaaggccagcttcgtgatcgagggcctgaaggaggccgacaaggacgagttctgcagatgcgagctgaagctgcagaagtggtacggggacctgcggggaaagcccttcgccatcgaagccgagaacagcatcctggacatcagcggcttcagcaagcagtacaactgtgccttcatctggcagaaggacggcgtgaagaagctgaacctgtacctgatcatcaactacttcaagggcggcaagctgcggttcaagaagatcaaacctgaagccttcgaagccaacagattctacaccgtgatcaacaaaaagagcggcgagatcgtgcccatggaggtgaacttcaacttcgacgaccccaacctgatcatcctgcctctggcctttggcaagagacagggcagagaattcatctggaacgacctgctgtccctggaaaccggcagcctgaagctggccaacggaagagtgatcgagaagacactgtacaacagaagaacccggcaggatgagcctgccctgttcgtggccctgaccttcgagcggcgggaggtcctggactcctccaatatcaaaccaatgaacctgatcggcgtggcaagaggcgaaaacatccccgccgtgatcgccctgaccgaccccgagggctgcccactgagccggtttaaggatagcctgggaaacccaacccacatcctgagaatcggcgagagctataaggagaagcagcggaccatccaggccaagaaggaggtggagcagcggagagccggcggctacagccggaagtacgccagcaaagccaagaatctggcagacgatatggtgagaaacaccgctagagatctgctgtactacgccgtgacccaggatgccatgctgatcttcgccaacctgagccggggcttcggccggcagggcaagcggaccttcatggccgagagacagtacacacggatggaggactggctgaccgccaagctggcctacgagggcctgagcaagacctacctgtccaagacactggcccagtacacctccaagacatgcagcaactgtgggtttaccatcaccagcgccgactacgacagggtgctggagaagctgaagaagacagcaacaggctggatgaccacaattaacggcaaggagctgaaggtggagggccagattacctactacaacagatacaagagacagaacgtagtcaaggacctgtccgtcgagctggatagactgagcgaagaatctgtgaacaacgacatctcctcctggacaaagggcagaagcggagaagctctgagcctcctgaagaaaagattctcccatagacccgtgcaggagaagttcgtgtgcctgaactgcggcttcgagacacacgcagccgagcaagccgccctgaacatcgccagatcctggctgttcctgcggagccaggagtacaagaaataccagacaaacaagacaaccggcaacaccgataagagagccttcgtcgagacctggcagtccttttaccggaagaagcttaaggaggtgtggaaacctgccgtgcggtctggcggatctggcggaggctcctccccccaggcaggagagggtgaccttcggcgacgtggccgtggacttcaccctggacgagtgggtgtgcctggacagcgcccagaaggccctgtacagggacgtgatgctggagaactacggccacctggtgtgcctgggcctggccggcgccaagcccgccgtgatccagaggctggagaggggcgaggccgcctggtgccccggcgtgcccggcagcaggctgcccggcctgttcttcttcggatctggctccggcagcggccccaagaaaaagagaaaagtctaagctgccttctgcggggcttgccttctggccatgcccttcttctctcccttgcacctgtacctcttggtctttgaataaagcctgagtaggaaggctagcaaaaaaaaaaaaaaaaaaaaaaaaaaaaaaaaaaaaaaaaaaaaaaaaaaaaaaaaaaaaaaaaaaaaaaaaaaaaaaaa

SEQ ID NO: 16272 - RNA, 9485 nt, synthetic construct
  source 1..9485: mol_type = other RNA
aggaaataagagagaaaagaagagtaagaagaaatataagagccaccatggcccctaagaagaagcgtaaagtgagccggatggaacgcctcgtctacgaggtgcggcagaagtgcagaaacatcgaggacatctgcatctcctgcggatctctgaacgtgaccctggagcacccactgttcatcggcggcatgtgccagaactgtaaaaactgttttctggagtgtgcctatcaatacgacgatgacggctaccagagctactgcaccatctgttgcggcggaagagaggtgctgatgtgtggaaataacaactgctgccggtgcttctgcgtggaatgcgtggacctgctggtgggccccggcgccgcccaggccgctattaaggaagatccttggaactgctacatgtgcggccacaagggcacatacggcctgctgagacggagagaggactggcctagcagactgcagatgttcttcgccaataaccacgaccaggagttcgacccccctaaggtgtaccctcccgtccccgccgagaagagaaagcccatccgggtcctgagcctgttcgatggcatcgccaccggtctgctggtgctgaaggacctgggcatccaggtggataggtacattgcctccgaggtgtgcgaggactccatcaccgtgggaatggtgcgtcatcagggcaagatcatgtacgtgggcgacgtgcggagcgtgacacagaagcatatccaggagtggggccctttcgacctggtgatcggcggcagcccttgcaatgacctgagcatcgtgaacccagcccggaagggcctgtacgagggaaccggcagactgttcttcgagttttacagactgctgcacgacgcccggcctaaggaaggcgacgaccggcccttcttttggctgttcgagaatgtggtggccatgggagtcagcgacaagcgggatattagccggttcctggagagcaaccccgtgatgatcgatgccaaggaagtgagcgccgcccaccgggccagatacttctggggcaatctgcctggcatgaacagacccctggccagcaccgtgaacgacaagctggagctgcaggagtgcctggagcacggccggatcgccaagttcagcaaggtgagaaccatcaccacccgaagcaacagcatcaaacaaggcaaggaccagcactttcctgtgttcatgaacgagaaggaggacatcctgtggtgtaccgagatggagagagtgttcgggttcccagtccactacacagatgtcagcaacatgtctagactggccagacagagactgctgggaagaagctggtccgtccctgtgatcagacacctgttcgcccctctgaaggagtacttcgcctgcgtgagcagcggcaacagcaacgccaacagccggggccccagcttctctagcggcctggtgccactgtccctgagagggagccacatgggccccatggagatctacaaaaccgtgagcgcctggaagcggcagcctgtgcgcgtgctgagcctgtttcggaatatcgataaagtcctgaaaagcctgggattcctggagagcggctctggctccggcggtggcaccctgaagtacgtggaggatgtgacaaacgtggtcagacgggatgtggagaagtggggccccttcgatctggtgtacggcagcacccaacccctgggcagctcttgtgaccggtgccctggctggtacatgtttcagttccaccggatcctgcagtacgccctgccgagacaggagtcccagcggccattcttttggattttcatggacaacttgctgctgaccgaggatgaccaggaaactaccactcggttcctgcagaccgaagccgtgaccctgcaggacgtgagaggccgggactaccagaacgccatgcgggtgtggtccaacatccctggactgaaaagcaagcacgcacctctgacccctaaagaagaggagtacctgcaggcccaggtgcggagcagaagcaagctggacgcccctaaggtggatctgctggtgaagaattgcctcctgcccctgagagagtacttcaagtatttcagccagaatagtctgcccctgggaggcagcggcggcggcgccctggtgacatttgaggacgtcgccgtgcggttcacccaggaggaatgggctctgctggatccttctcagaaaatcctgtaccgggacgtgatgagagagacataccggaatctgacctccgtgggcatcaactgggaatgttgggaccttgaagcctgcttcagaagcctgggaagaaacctgagagtgcaggtggtgaagagaaagtgcgagctgaccaacagcggcccctgcgccgagggcggcccaagcagcggcgcccctcctcccagcggcggcagcccagccggctccccaacctctaccgaggagggcacctctgagtccgccacccccgagagcggccctggcacctccaccgagcccagcgagggcagcgcacccggcagccctgccggcagccccacctccacagaggagggaaccagcaccgagcccagcgaaggcagcgccccaggcaccagcaccgagcctagtgagcaggagattaaacggatcaacaagatcagaagaagacttgtgaaagacagcaacaccaagaaggccggcaagacaggccccatgaaaaccctgctggttagagtgatgacacccgatctgagagagcggctggaaaacctgagaaagaagcctgaaaatatcccccagcccatcagcaatacatctagagccaacctgaataagctgctgaccgattacaccgaaatgaagaaggcgatcctgcatgtgtactgggaagagttccagaaggaccctgtgggcctgatgagccgggtggcccagcctgccagcaagaagatcgatcagaacaagctgaaacctgagatggacgagaagggcaacctgaccaccgccggctttgcctgctctcagtgtggccagcccctgttcgtgtacaagctggagcaggtgtctgagaagggcaaggcttacaccaactacttcggacggtgcaatgtggccgagcacgaaaagctgatcctgctggcccagctgaagcccgagaaggatagcgacgaagccgtgacatatagcctgggaaagtttgggcagagggccctggatttctacagcattcatgtgaccaaggagtccacccaccccgtgaagcccctggcccagatcgccggaaacagatacgcctccggacctgtgggaaaggccctgagcgacgcatgtatgggcacaatcgcctccttcctgtctaagtaccaggacatcatcatcgaacaccagaaggtggtgaagggcaaccagaagagactggagagcctgcgggagctggccggcaaggaaaacctggaataccctagcgtgaccctgccacctcagcctcacaccaaggagggcgttgatgcctacaacgaagtgatcgcccgggtgcgaatgtgggtgaacctgaacctgtggcagaagctgaagctaagcagagatgatgccaagcctctgctgagactgaagggattcccttcctttcctctggtcgagagacaggccaacgaagtggactggtgggacatggtgtgtaacgtgaagaagctgatcaacgagaaaaaggaggatggcaaggtgttttggcagaatctggctggctacaagagacaggaagccctgagaccatacctgagcagcgaggaagatcggaagaagggaaagaaattcgctcggtaccagctgggcgacctgctgctgcacctggaaaagaagcacggcgaggactggggaaaggtgtacgacgaggcctgggagcggattgacaagaaagtggaaggcctgagcaagcacatcaagctggaagaggaacggagaagcgaggacgcccagagcaaggccgccctgaccgactggctgcgggctaaggccagcttcgtgatcgagggcctgaaggaggccgacaaggacgagttctgcagatgcgagctgaagctgcagaagtggtacggggacctgcggggaaagcccttcgccatcgaagccgagaacagcatcctggacatcagcggcttcagcaagcagtacaactgtgccttcatctggcagaaggacggcgtgaagaagctgaacctgtacctgatcatcaactacttcaagggcggcaagctgcggttcaagaagatcaaacctgaagccttcgaagccaacagattctacaccgtgatcaacaaaaagagcggcgagatcgtgcccatggaggtgaacttcaacttcgacgaccccaacctgatcatcctgcctctggcctttggcaagagacagggcagagaattcatctggaacgacctgctgtccctggaaaccggcagcctgaagctggccaacggaagagtgatcgagaagacactgtacaacagaagaacccggcaggatgagcctgccctgttcgtggccctgaccttcgagcggcgggaggtcctggactcctccaatatcaaaccaatgaacctgatcggcgtggcaagaggcgaaaacatccccgccgtgatcgccctgaccgaccccgagggctgcccactgagccggtttaaggatagcctgggaaacccaacccacatcctgagaatcggcgagagctataaggagaagcagcggaccatccaggccaagaaggaggtggagcagcggagagccggcggctacagccggaagtacgccagcaaagccaagaatctggcagacgatatggtgagaaacaccgctagagatctgctgtactacgccgtgacccaggatgccatgctgatcttcgccaacctgagccggggcttcggccggcagggcaagcggaccttcatggccgagagacagtacacacggatggaggactggctgaccgccaagctggcctacgagggcctgagcaagacctacctgtccaagacactggcccagtacacctccaagacatgcagcaactgtgggtttaccatcaccagcgccgactacgacagggtgctggagaagctgaagaagacagcaacaggctggatgaccacaattaacggcaaggagctgaaggtggagggccagattacctactacaacagatacaagagacagaacgtagtcaaggacctgtccgtcgagctggatagactgagcgaagaatctgtgaacaacgacatctcctcctggacaaagggcagaagcggagaagctctgagcctcctgaagaaaagattctcccatagacccgtgcaggagaagttcgtgtgcctgaactgcggcttcgagacacacgcagccgagcaagccgccctgaacatcgccagatcctggctgttcctgcggagccaggagtacaagaaataccagacaaacaagacaaccggcaacaccgataagagagccttcgtcgagacctggcagtccttttaccggaagaagcttaaggaggtgtggaaacctgccgtgcggtctggcggatctggcggaggctccatggccgccgccgccctgaggctgcccgcccagggcaccgtgaccttcgaggacgtggccgtgaagttcagccaggaggagtggagcatcctgaccgaggcccagaggtgcctgtaccacgacgtgatgctggagaacctggccctgatcagcagcctgggctgctggtacggcgccaaggacgagacccccagcaagcagaccctgagcatccagcagcagagccccctgaggagccactggggcggcccaagcagcggcgcccctcctcccagcggcggcagcccagccggctccccaacctctaccgaggagggcacctctgagtccgccacccccgagagcggccctggcacctccaccgagcccagcgagggcagcgcacccggcagccctgccggcagccccacctccacagaggagggaaccagcaccgagcccagcgaaggcagcgccccaggcaccagcaccgagcctagtgagcaggagattaaacggatcaacaagatcagaagaagacttgtgaaagacagcaacaccaagaaggccggcaagacaggccccatgaaaaccctgctggttagagtgatgacacccgatctgagagagcggctggaaaacctgagaaagaagcctgaaaatatcccccagcccatcagcaatacatctagagccaacctgaataagctgctgaccgattacaccgaaatgaagaaggcgatcctgcatgtgtactgggaagagttccagaaggaccctgtgggcctgatgagccgggtggcccagcctgccagcaagaagatcgatcagaacaagctgaaacctgagatggacgagaagggcaacctgaccaccgccggctttgcctgctctcagtgtggccagcccctgttcgtgtacaagctggagcaggtgtctgagaagggcaaggcttacaccaactacttcggacggtgcaatgtggccgagcacgaaaagctgatcctgctggcccagctgaagcccgagaaggatagcgacgaagccgtgacatatagcctgggaaagtttgggcagagggccctggatttctacagcattcatgtgaccaaggagtccacccaccccgtgaagcccctggcccagatcgccggaaacagatacgcctccggacctgtgggaaaggccctgagcgacgcatgtatgggcacaatcgcctccttcctgtctaagtaccaggacatcatcatcgaacaccagaaggtggtgaagggcaaccagaagagactggagagcctgcgggagctggccggcaaggaaaacctggaataccctagcgtgaccctgccacctcagcctcacaccaaggagggcgttgatgcctacaacgaagtgatcgcccgggtgcgaatgtgggtgaacctgaacctgtggcagaagctgaagctaagcagagatgatgccaagcctctgctgagactgaagggattcccttcctttcctctggtcgagagacaggccaacgaagtggactggtgggacatggtgtgtaacgtgaagaagctgatcaacgagaaaaaggaggatggcaaggtgttttggcagaatctggctggctacaagagacaggaagccctgagaccatacctgagcagcgaggaagatcggaagaagggaaagaaattcgctcggtaccagctgggcgacctgctgctgcacctggaaaagaagcacggcgaggactggggaaaggtgtacgacgaggcctgggagcggattgacaagaaagtggaaggcctgagcaagcacatcaagctggaagaggaacggagaagcgaggacgcccagagcaaggccgccctgaccgactggctgcgggctaaggccagcttcgtgatcgagggcctgaaggaggccgacaaggacgagttctgcagatgcgagctgaagctgcagaagtggtacggggacctgcggggaaagcccttcgccatcgaagccgagaacagcatcctggacatcagcggcttcagcaagcagtacaactgtgccttcatctggcagaaggacggcgtgaagaagctgaacctgtacctgatcatcaactacttcaagggcggcaagctgcggttcaagaagatcaaacctgaagccttcgaagccaacagattctacaccgtgatcaacaaaaagagcggcgagatcgtgcccatggaggtgaacttcaacttcgacgaccccaacctgatcatcctgcctctggcctttggcaagagacagggcagagaattcatctggaacgacctgctgtccctggaaaccggcagcctgaagctggccaacggaagagtgatcgagaagacactgtacaacagaagaacccggcaggatgagcctgccctgttcgtggccctgaccttcgagcggcgggaggtcctggactcctccaatatcaaaccaatgaacctgatcggcgtggcaagaggcgaaaacatccccgccgtgatcgccctgaccgaccccgagggctgcccactgagccggtttaaggatagcctgggaaacccaacccacatcctgagaatcggcgagagctataaggagaagcagcggaccatccaggccaagaaggaggtggagcagcggagagccggcggctacagccggaagtacgccagcaaagccaagaatctggcagacgatatggtgagaaacaccgctagagatctgctgtactacgccgtgacccaggatgccatgctgatcttcgccaacctgagccggggcttcggccggcagggcaagcggaccttcatggccgagagacagtacacacggatggaggactggctgaccgccaagctggcctacgagggcctgagcaagacctacctgtccaagacactggcccagtacacctccaagacatgcagcaactgtgggtttaccatcaccagcgccgactacgacagggtgctggagaagctgaagaagacagcaacaggctggatgaccacaattaacggcaaggagctgaaggtggagggccagattacctactacaacagatacaagagacagaacgtagtcaaggacctgtccgtcgagctggatagactgagcgaagaatctgtgaacaacgacatctcctcctggacaaagggcagaagcggagaagctctgagcctcctgaagaaaagattctcccatagacccgtgcaggagaagttcgtgtgcctgaactgcggcttcgagacacacgcagccgagcaagccgccctgaacatcgccagatcctggctgttcctgcggagccaggagtacaagaaataccagacaaacaagacaaccggcaacaccgataagagagccttcgtcgagacctggcagtccttttaccggaagaagcttaaggaggtgtggaaacctgccgtgcggtctggcggatctggcggaggctcctatggccgccgccgccctgaggctgcccgcccagggcaccgtgaccttcgaggacgtggccgtgaagttcagccaggaggagtggagcatcctgaccgaggcccagaggtgcctgtaccacgacgtgatgctggagaacctggccctgatcagcagcctgggctgctggtacggcgccaaggacgagacccccagcaagcagaccctgagcatccagcagcagagccccctgaggagccactggggatctggctccggcagcggccccaagaaaaagagaaaagtctaagctgccttctgcggggcttgccttctggccatgcccttcttctctcccttgcacctgtacctcttggtctttgaataaagcctgagtaggaaggctagcaaaaaaaaaaaaaaaaaaaaaaaaaaaaaaaaaaaaaaaaaaaaaaaaaaaaaaaaaaaaaaaaaaaaaaaaaaaaaaaa

SEQ ID NO: 16273 - RNA, 9485 nt, synthetic construct
  source 1..9485: mol_type = other RNA
aggaaataagagagaaaagaagagtaagaagaaatataagagccaccatggcccctaagaagaagcgtaaagtgagccggatggaacgcctcgtctacgaggtgcggcagaagtgcagaaacatcgaggacatctgcatctcctgcggatctctgaacgtgaccctggagcacccactgttcatcggcggcatgtgccagaactgtaaaaactgttttctggagtgtgcctatcaatacgacgatgacggctaccagagctactgcaccatctgttgcggcggaagagaggtgctgatgtgtggaaataacaactgctgccggtgcttctgcgtggaatgcgtggacctgctggtgggccccggcgccgcccaggccgctattaaggaagatccttggaactgctacatgtgcggccacaagggcacatacggcctgctgagacggagagaggactggcctagcagactgcagatgttcttcgccaataaccacgaccaggagttcgacccccctaaggtgtaccctcccgtccccgccgagaagagaaagcccatccgggtcctgagcctgttcgatggcatcgccaccggtctgctggtgctgaaggacctgggcatccaggtggataggtacattgcctccgaggtgtgcgaggactccatcaccgtgggaatggtgcgtcatcagggcaagatcatgtacgtgggcgacgtgcggagcgtgacacagaagcatatccaggagtggggccctttcgacctggtgatcggcggcagcccttgcaatgacctgagcatcgtgaacccagcccggaagggcctgtacgagggaaccggcagactgttcttcgagttttacagactgctgcacgacgcccggcctaaggaaggcgacgaccggcccttcttttggctgttcgagaatgtggtggccatgggagtcagcgacaagcgggatattagccggttcctggagagcaaccccgtgatgatcgatgccaaggaagtgagcgccgcccaccgggccagatacttctggggcaatctgcctggcatgaacagacccctggccagcaccgtgaacgacaagctggagctgcaggagtgcctggagcacggccggatcgccaagttcagcaaggtgagaaccatcaccacccgaagcaacagcatcaaacaaggcaaggaccagcactttcctgtgttcatgaacgagaaggaggacatcctgtggtgtaccgagatggagagagtgttcgggttcccagtccactacacagatgtcagcaacatgtctagactggccagacagagactgctgggaagaagctggtccgtccctgtgatcagacacctgttcgcccctctgaaggagtacttcgcctgcgtgagcagcggcaacagcaacgccaacagccggggccccagcttctctagcggcctggtgccactgtccctgagagggagccacatgggccccatggagatctacaaaaccgtgagcgcctggaagcggcagcctgtgcgcgtgctgagcctgtttcggaatatcgataaagtcctgaaaagcctgggattcctggagagcggctctggctccggcggtggcaccctgaagtacgtggaggatgtgacaaacgtggtcagacgggatgtggagaagtggggccccttcgatctggtgtacggcagcacccaacccctgggcagctcttgtgaccggtgccctggctggtacatgtttcagttccaccggatcctgcagtacgccctgccgagacaggagtcccagcggccattcttttggattttcatggacaacttgctgctgaccgaggatgaccaggaaactaccactcggttcctgcagaccgaagccgtgaccctgcaggacgtgagaggccgggactaccagaacgccatgcgggtgtggtccaacatccctggactgaaaagcaagcacgcacctctgacccctaaagaagaggagtacctgcaggcccaggtgcggagcagaagcaagctggacgcccctaaggtggatctgctggtgaagaattgcctcctgcccctgagagagtacttcaagtatttcagccagaatagtctgcccctgggaggcagcggcggcggcgccctggtgacatttgaggacgtcgccgtgcggttcacccaggaggaatgggctctgctggatccttctcagaaaatcctgtaccgggacgtgatgagagagacataccggaatctgacctccgtgggcatcaactgggaatgttgggaccttgaagcctgcttcagaagcctgggaagaaacctgagagtgcaggtggtgaagagaaagtgcgagctgaccaacagcggcccctgcgccgagggcggcccaagcagcggcgcccctcctcccagcggcggcagcccagccggctccccaacctctaccgaggagggcacctctgagtccgccacccccgagagcggccctggcacctccaccgagcccagcgagggcagcgcacccggcagccctgccggcagccccacctccacagaggagggaaccagcaccgagcccagcgaaggcagcgccccaggcaccagcaccgagcctagtgagcaggagattaaacggatcaacaagatcagaagaagacttgtgaaagacagcaacaccaagaaggccggcaagacaggccccatgaaaaccctgctggttagagtgatgacacccgatctgagagagcggctggaaaacctgagaaagaagcctgaaaatatcccccagcccatcagcaatacatctagagccaacctgaataagctgctgaccgattacaccgaaatgaagaaggcgatcctgcatgtgtactgggaagagttccagaaggaccctgtgggcctgatgagccgggtggcccagcctgccagcaagaagatcgatcagaacaagctgaaacctgagatggacgagaagggcaacctgaccaccgccggctttgcctgctctcagtgtggccagcccctgttcgtgtacaagctggagcaggtgtctgagaagggcaaggcttacaccaactacttcggacggtgcaatgtggccgagcacgaaaagctgatcctgctggcccagctgaagcccgagaaggatagcgacgaagccgtgacatatagcctgggaaagtttgggcagagggccctggatttctacagcattcatgtgaccaaggagtccacccaccccgtgaagcccctggcccagatcgccggaaacagatacgcctccggacctgtgggaaaggccctgagcgacgcatgtatgggcacaatcgcctccttcctgtctaagtaccaggacatcatcatcgaacaccagaaggtggtgaagggcaaccagaagagactggagagcctgcgggagctggccggcaaggaaaacctggaataccctagcgtgaccctgccacctcagcctcacaccaaggagggcgttgatgcctacaacgaagtgatcgcccgggtgcgaatgtgggtgaacctgaacctgtggcagaagctgaagctaagcagagatgatgccaagcctctgctgagactgaagggattcccttcctttcctctggtcgagagacaggccaacgaagtggactggtgggacatggtgtgtaacgtgaagaagctgatcaacgagaaaaaggaggatggcaaggtgttttggcagaatctggctggctacaagagacaggaagccctgagaccatacctgagcagcgaggaagatcggaagaagggaaagaaattcgctcggtaccagctgggcgacctgctgctgcacctggaaaagaagcacggcgaggactggggaaaggtgtacgacgaggcctgggagcggattgacaagaaagtggaaggcctgagcaagcacatcaagctggaagaggaacggagaagcgaggacgcccagagcaaggccgccctgaccgactggctgcgggctaaggccagcttcgtgatcgagggcctgaaggaggccgacaaggacgagttctgcagatgcgagctgaagctgcagaagtggtacggggacctgcggggaaagcccttcgccatcgaagccgagaacagcatcctggacatcagcggcttcagcaagcagtacaactgtgccttcatctggcagaaggacggcgtgaagaagctgaacctgtacctgatcatcaactacttcaagggcggcaagctgcggttcaagaagatcaaacctgaagccttcgaagccaacagattctacaccgtgatcaacaaaaagagcggcgagatcgtgcccatggaggtgaacttcaacttcgacgaccccaacctgatcatcctgcctctggcctttggcaagagacagggcagagaattcatctggaacgacctgctgtccctggaaaccggcagcctgaagctggccaacggaagagtgatcgagaagacactgtacaacagaagaacccggcaggatgagcctgccctgttcgtggccctgaccttcgagcggcgggaggtcctggactcctccaatatcaaaccaatgaacctgatcggcgtggcaagaggcgaaaacatccccgccgtgatcgccctgaccgaccccgagggctgcccactgagccggtttaaggatagcctgggaaacccaacccacatcctgagaatcggcgagagctataaggagaagcagcggaccatccaggccaagaaggaggtggagcagcggagagccggcggctacagccggaagtacgccagcaaagccaagaatctggcagacgatatggtgagaaacaccgctagagatctgctgtactacgccgtgacccaggatgccatgctgatcttcgccaacctgagccggggcttcggccggcagggcaagcggaccttcatggccgagagacagtacacacggatggaggactggctgaccgccaagctggcctacgagggcctgagcaagacctacctgtccaagacactggcccagtacacctccaagacatgcagcaactgtgggtttaccatcaccagcgccgactacgacagggtgctggagaagctgaagaagacagcaacaggctggatgaccacaattaacggcaaggagctgaaggtggagggccagattacctactacaacagatacaagagacagaacgtagtcaaggacctgtccgtcgagctggatagactgagcgaagaatctgtgaacaacgacatctcctcctggacaaagggcagaagcggagaagctctgagcctcctgaagaaaagattctcccatagacccgtgcaggagaagttcgtgtgcctgaactgcggcttcgagacacacgcagccgagcaagccgccctgaacatcgccagatcctggctgttcctgcggagccaggagtacaagaaataccagacaaacaagacaaccggcaacaccgataagagagccttcgtcgagacctggcagtccttttaccggaagaagcttaaggaggtgtggaaacctgccgtgcggtctggcggatctggcggaggctccatggcccacatggccttcagggacgtggccgtggacttcacccaggacgagtggaggctgctgagccccgcccagaggaccctgtacagggaggtgatgctggagaactacagcaacctggtgagcctgggcatcagcttcagcaagcccgagatcatcacccagctggagcagggcaaggagacctggagggaggagaagaagtgcccccccgccacctgccccgaccccgagcccgagctgggcggcccaagcagcggcgcccctcctcccagcggcggcagcccagccggctccccaacctctaccgaggagggcacctctgagtccgccacccccgagagcggccctggcacctccaccgagcccagcgagggcagcgcacccggcagccctgccggcagccccacctccacagaggagggaaccagcaccgagcccagcgaaggcagcgccccaggcaccagcaccgagcctagtgagcaggagattaaacggatcaacaagatcagaagaagacttgtgaaagacagcaacaccaagaaggccggcaagacaggccccatgaaaaccctgctggttagagtgatgacacccgatctgagagagcggctggaaaacctgagaaagaagcctgaaaatatcccccagcccatcagcaatacatctagagccaacctgaataagctgctgaccgattacaccgaaatgaagaaggcgatcctgcatgtgtactgggaagagttccagaaggaccctgtgggcctgatgagccgggtggcccagcctgccagcaagaagatcgatcagaacaagctgaaacctgagatggacgagaagggcaacctgaccaccgccggctttgcctgctctcagtgtggccagcccctgttcgtgtacaagctggagcaggtgtctgagaagggcaaggcttacaccaactacttcggacggtgcaatgtggccgagcacgaaaagctgatcctgctggcccagctgaagcccgagaaggatagcgacgaagccgtgacatatagcctgggaaagtttgggcagagggccctggatttctacagcattcatgtgaccaaggagtccacccaccccgtgaagcccctggcccagatcgccggaaacagatacgcctccggacctgtgggaaaggccctgagcgacgcatgtatgggcacaatcgcctccttcctgtctaagtaccaggacatcatcatcgaacaccagaaggtggtgaagggcaaccagaagagactggagagcctgcgggagctggccggcaaggaaaacctggaataccctagcgtgaccctgccacctcagcctcacaccaaggagggcgttgatgcctacaacgaagtgatcgcccgggtgcgaatgtgggtgaacctgaacctgtggcagaagctgaagctaagcagagatgatgccaagcctctgctgagactgaagggattcccttcctttcctctggtcgagagacaggccaacgaagtggactggtgggacatggtgtgtaacgtgaagaagctgatcaacgagaaaaaggaggatggcaaggtgttttggcagaatctggctggctacaagagacaggaagccctgagaccatacctgagcagcgaggaagatcggaagaagggaaagaaattcgctcggtaccagctgggcgacctgctgctgcacctggaaaagaagcacggcgaggactggggaaaggtgtacgacgaggcctgggagcggattgacaagaaagtggaaggcctgagcaagcacatcaagctggaagaggaacggagaagcgaggacgcccagagcaaggccgccctgaccgactggctgcgggctaaggccagcttcgtgatcgagggcctgaaggaggccgacaaggacgagttctgcagatgcgagctgaagctgcagaagtggtacggggacctgcggggaaagcccttcgccatcgaagccgagaacagcatcctggacatcagcggcttcagcaagcagtacaactgtgccttcatctggcagaaggacggcgtgaagaagctgaacctgtacctgatcatcaactacttcaagggcggcaagctgcggttcaagaagatcaaacctgaagccttcgaagccaacagattctacaccgtgatcaacaaaaagagcggcgagatcgtgcccatggaggtgaacttcaacttcgacgaccccaacctgatcatcctgcctctggcctttggcaagagacagggcagagaattcatctggaacgacctgctgtccctggaaaccggcagcctgaagctggccaacggaagagtgatcgagaagacactgtacaacagaagaacccggcaggatgagcctgccctgttcgtggccctgaccttcgagcggcgggaggtcctggactcctccaatatcaaaccaatgaacctgatcggcgtggcaagaggcgaaaacatccccgccgtgatcgccctgaccgaccccgagggctgcccactgagccggtttaaggatagcctgggaaacccaacccacatcctgagaatcggcgagagctataaggagaagcagcggaccatccaggccaagaaggaggtggagcagcggagagccggcggctacagccggaagtacgccagcaaagccaagaatctggcagacgatatggtgagaaacaccgctagagatctgctgtactacgccgtgacccaggatgccatgctgatcttcgccaacctgagccggggcttcggccggcagggcaagcggaccttcatggccgagagacagtacacacggatggaggactggctgaccgccaagctggcctacgagggcctgagcaagacctacctgtccaagacactggcccagtacacctccaagacatgcagcaactgtgggtttaccatcaccagcgccgactacgacagggtgctggagaagctgaagaagacagcaacaggctggatgaccacaattaacggcaaggagctgaaggtggagggccagattacctactacaacagatacaagagacagaacgtagtcaaggacctgtccgtcgagctggatagactgagcgaagaatctgtgaacaacgacatctcctcctggacaaagggcagaagcggagaagctctgagcctcctgaagaaaagattctcccatagacccgtgcaggagaagttcgtgtgcctgaactgcggcttcgagacacacgcagccgagcaagccgccctgaacatcgccagatcctggctgttcctgcggagccaggagtacaagaaataccagacaaacaagacaaccggcaacaccgataagagagccttcgtcgagacctggcagtccttttaccggaagaagcttaaggaggtgtggaaacctgccgtgcggtctggcggatctggcggaggctcctatggcccacatggccttcagggacgtggccgtggacttcacccaggacgagtggaggctgctgagccccgcccagaggaccctgtacagggaggtgatgctggagaactacagcaacctggtgagcctgggcatcagcttcagcaagcccgagatcatcacccagctggagcagggcaaggagacctggagggaggagaagaagtgcccccccgccacctgccccgaccccgagcccgagctgggatctggctccggcagcggccccaagaaaaagagaaaagtctaagctgccttctgcggggcttgccttctggccatgcccttcttctctcccttgcacctgtacctcttggtctttgaataaagcctgagtaggaaggctagcaaaaaaaaaaaaaaaaaaaaaaaaaaaaaaaaaaaaaaaaaaaaaaaaaaaaaaaaaaaaaaaaaaaaaaaaaaaaaaaa

SEQ ID NO: 16274 - RNA, 9485 nt, synthetic construct
  source 1..9485: mol_type = other RNA
aggaaataagagagaaaagaagagtaagaagaaatataagagccaccatggcccctaagaagaagcgtaaagtgagccggatggaacgcctcgtctacgaggtgcggcagaagtgcagaaacatcgaggacatctgcatctcctgcggatctctgaacgtgaccctggagcacccactgttcatcggcggcatgtgccagaactgtaaaaactgttttctggagtgtgcctatcaatacgacgatgacggctaccagagctactgcaccatctgttgcggcggaagagaggtgctgatgtgtggaaataacaactgctgccggtgcttctgcgtggaatgcgtggacctgctggtgggccccggcgccgcccaggccgctattaaggaagatccttggaactgctacatgtgcggccacaagggcacatacggcctgctgagacggagagaggactggcctagcagactgcagatgttcttcgccaataaccacgaccaggagttcgacccccctaaggtgtaccctcccgtccccgccgagaagagaaagcccatccgggtcctgagcctgttcgatggcatcgccaccggtctgctggtgctgaaggacctgggcatccaggtggataggtacattgcctccgaggtgtgcgaggactccatcaccgtgggaatggtgcgtcatcagggcaagatcatgtacgtgggcgacgtgcggagcgtgacacagaagcatatccaggagtggggccctttcgacctggtgatcggcggcagcccttgcaatgacctgagcatcgtgaacccagcccggaagggcctgtacgagggaaccggcagactgttcttcgagttttacagactgctgcacgacgcccggcctaaggaaggcgacgaccggcccttcttttggctgttcgagaatgtggtggccatgggagtcagcgacaagcgggatattagccggttcctggagagcaaccccgtgatgatcgatgccaaggaagtgagcgccgcccaccgggccagatacttctggggcaatctgcctggcatgaacagacccctggccagcaccgtgaacgacaagctggagctgcaggagtgcctggagcacggccggatcgccaagttcagcaaggtgagaaccatcaccacccgaagcaacagcatcaaacaaggcaaggaccagcactttcctgtgttcatgaacgagaaggaggacatcctgtggtgtaccgagatggagagagtgttcgggttcccagtccactacacagatgtcagcaacatgtctagactggccagacagagactgctgggaagaagctggtccgtccctgtgatcagacacctgttcgcccctctgaaggagtacttcgcctgcgtgagcagcggcaacagcaacgccaacagccggggccccagcttctctagcggcctggtgccactgtccctgagagggagccacatgggccccatggagatctacaaaaccgtgagcgcctggaagcggcagcctgtgcgcgtgctgagcctgtttcggaatatcgataaagtcctgaaaagcctgggattcctggagagcggctctggctccggcggtggcaccctgaagtacgtggaggatgtgacaaacgtggtcagacgggatgtggagaagtggggccccttcgatctggtgtacggcagcacccaacccctgggcagctcttgtgaccggtgccctggctggtacatgtttcagttccaccggatcctgcagtacgccctgccgagacaggagtcccagcggccattcttttggattttcatggacaacttgctgctgaccgaggatgaccaggaaactaccactcggttcctgcagaccgaagccgtgaccctgcaggacgtgagaggccgggactaccagaacgccatgcgggtgtggtccaacatccctggactgaaaagcaagcacgcacctctgacccctaaagaagaggagtacctgcaggcccaggtgcggagcagaagcaagctggacgcccctaaggtggatctgctggtgaagaattgcctcctgcccctgagagagtacttcaagtatttcagccagaatagtctgcccctgggaggcagcggcggcggcgccctggtgacatttgaggacgtcgccgtgcggttcacccaggaggaatgggctctgctggatccttctcagaaaatcctgtaccgggacgtgatgagagagacataccggaatctgacctccgtgggcatcaactgggaatgttgggaccttgaagcctgcttcagaagcctgggaagaaacctgagagtgcaggtggtgaagagaaagtgcgagctgaccaacagcggcccctgcgccgagggcggcccaagcagcggcgcccctcctcccagcggcggcagcccagccggctccccaacctctaccgaggagggcacctctgagtccgccacccccgagagcggccctggcacctccaccgagcccagcgagggcagcgcacccggcagccctgccggcagccccacctccacagaggagggaaccagcaccgagcccagcgaaggcagcgccccaggcaccagcaccgagcctagtgagcaggagattaaacggatcaacaagatcagaagaagacttgtgaaagacagcaacaccaagaaggccggcaagacaggccccatgaaaaccctgctggttagagtgatgacacccgatctgagagagcggctggaaaacctgagaaagaagcctgaaaatatcccccagcccatcagcaatacatctagagccaacctgaataagctgctgaccgattacaccgaaatgaagaaggcgatcctgcatgtgtactgggaagagttccagaaggaccctgtgggcctgatgagccgggtggcccagcctgccagcaagaagatcgatcagaacaagctgaaacctgagatggacgagaagggcaacctgaccaccgccggctttgcctgctctcagtgtggccagcccctgttcgtgtacaagctggagcaggtgtctgagaagggcaaggcttacaccaactacttcggacggtgcaatgtggccgagcacgaaaagctgatcctgctggcccagctgaagcccgagaaggatagcgacgaagccgtgacatatagcctgggaaagtttgggcagagggccctggatttctacagcattcatgtgaccaaggagtccacccaccccgtgaagcccctggcccagatcgccggaaacagatacgcctccggacctgtgggaaaggccctgagcgacgcatgtatgggcacaatcgcctccttcctgtctaagtaccaggacatcatcatcgaacaccagaaggtggtgaagggcaaccagaagagactggagagcctgcgggagctggccggcaaggaaaacctggaataccctagcgtgaccctgccacctcagcctcacaccaaggagggcgttgatgcctacaacgaagtgatcgcccgggtgcgaatgtgggtgaacctgaacctgtggcagaagctgaagctaagcagagatgatgccaagcctctgctgagactgaagggattcccttcctttcctctggtcgagagacaggccaacgaagtggactggtgggacatggtgtgtaacgtgaagaagctgatcaacgagaaaaaggaggatggcaaggtgttttggcagaatctggctggctacaagagacaggaagccctgagaccatacctgagcagcgaggaagatcggaagaagggaaagaaattcgctcggtaccagctgggcgacctgctgctgcacctggaaaagaagcacggcgaggactggggaaaggtgtacgacgaggcctgggagcggattgacaagaaagtggaaggcctgagcaagcacatcaagctggaagaggaacggagaagcgaggacgcccagagcaaggccgccctgaccgactggctgcgggctaaggccagcttcgtgatcgagggcctgaaggaggccgacaaggacgagttctgcagatgcgagctgaagctgcagaagtggtacggggacctgcggggaaagcccttcgccatcgaagccgagaacagcatcctggacatcagcggcttcagcaagcagtacaactgtgccttcatctggcagaaggacggcgtgaagaagctgaacctgtacctgatcatcaactacttcaagggcggcaagctgcggttcaagaagatcaaacctgaagccttcgaagccaacagattctacaccgtgatcaacaaaaagagcggcgagatcgtgcccatggaggtgaacttcaacttcgacgaccccaacctgatcatcctgcctctggcctttggcaagagacagggcagagaattcatctggaacgacctgctgtccctggaaaccggcagcctgaagctggccaacggaagagtgatcgagaagacactgtacaacagaagaacccggcaggatgagcctgccctgttcgtggccctgaccttcgagcggcgggaggtcctggactcctccaatatcaaaccaatgaacctgatcggcgtggcaagaggcgaaaacatccccgccgtgatcgccctgaccgaccccgagggctgcccactgagccggtttaaggatagcctgggaaacccaacccacatcctgagaatcggcgagagctataaggagaagcagcggaccatccaggccaagaaggaggtggagcagcggagagccggcggctacagccggaagtacgccagcaaagccaagaatctggcagacgatatggtgagaaacaccgctagagatctgctgtactacgccgtgacccaggatgccatgctgatcttcgccaacctgagccggggcttcggccggcagggcaagcggaccttcatggccgagagacagtacacacggatggaggactggctgaccgccaagctggcctacgagggcctgagcaagacctacctgtccaagacactggcccagtacacctccaagacatgcagcaactgtgggtttaccatcaccagcgccgactacgacagggtgctggagaagctgaagaagacagcaacaggctggatgaccacaattaacggcaaggagctgaaggtggagggccagattacctactacaacagatacaagagacagaacgtagtcaaggacctgtccgtcgagctggatagactgagcgaagaatctgtgaacaacgacatctcctcctggacaaagggcagaagcggagaagctctgagcctcctgaagaaaagattctcccatagacccgtgcaggagaagttcgtgtgcctgaactgcggcttcgagacacacgcagccgagcaagccgccctgaacatcgccagatcctggctgttcctgcggagccaggagtacaagaaataccagacaaacaagacaaccggcaacaccgataagagagccttcgtcgagacctggcagtccttttaccggaagaagcttaaggaggtgtggaaacctgccgtgcggtctggcggatctggcggaggctcccaggccgaggtgaccttcgaggacgtggccgtgctgctgagcagggaggagtggggcaggctgggccccgtgcagaagggcctgtacagggacgtgatgctggagacctacaggaacctggtgagcctgggcgccggccccgccggccccaagcccgaggtgatcacccagctggagaggggcgacgagccctgggtgcccgacgtgcagggcagggagaggcccaacatcgacggcagcgccggcggcccaagcagcggcgcccctcctcccagcggcggcagcccagccggctccccaacctctaccgaggagggcacctctgagtccgccacccccgagagcggccctggcacctccaccgagcccagcgagggcagcgcacccggcagccctgccggcagccccacctccacagaggagggaaccagcaccgagcccagcgaaggcagcgccccaggcaccagcaccgagcctagtgagcaggagattaaacggatcaacaagatcagaagaagacttgtgaaagacagcaacaccaagaaggccggcaagacaggccccatgaaaaccctgctggttagagtgatgacacccgatctgagagagcggctggaaaacctgagaaagaagcctgaaaatatcccccagcccatcagcaatacatctagagccaacctgaataagctgctgaccgattacaccgaaatgaagaaggcgatcctgcatgtgtactgggaagagttccagaaggaccctgtgggcctgatgagccgggtggcccagcctgccagcaagaagatcgatcagaacaagctgaaacctgagatggacgagaagggcaacctgaccaccgccggctttgcctgctctcagtgtggccagcccctgttcgtgtacaagctggagcaggtgtctgagaagggcaaggcttacaccaactacttcggacggtgcaatgtggccgagcacgaaaagctgatcctgctggcccagctgaagcccgagaaggatagcgacgaagccgtgacatatagcctgggaaagtttgggcagagggccctggatttctacagcattcatgtgaccaaggagtccacccaccccgtgaagcccctggcccagatcgccggaaacagatacgcctccggacctgtgggaaaggccctgagcgacgcatgtatgggcacaatcgcctccttcctgtctaagtaccaggacatcatcatcgaacaccagaaggtggtgaagggcaaccagaagagactggagagcctgcgggagctggccggcaaggaaaacctggaataccctagcgtgaccctgccacctcagcctcacaccaaggagggcgttgatgcctacaacgaagtgatcgcccgggtgcgaatgtgggtgaacctgaacctgtggcagaagctgaagctaagcagagatgatgccaagcctctgctgagactgaagggattcccttcctttcctctggtcgagagacaggccaacgaagtggactggtgggacatggtgtgtaacgtgaagaagctgatcaacgagaaaaaggaggatggcaaggtgttttggcagaatctggctggctacaagagacaggaagccctgagaccatacctgagcagcgaggaagatcggaagaagggaaagaaattcgctcggtaccagctgggcgacctgctgctgcacctggaaaagaagcacggcgaggactggggaaaggtgtacgacgaggcctgggagcggattgacaagaaagtggaaggcctgagcaagcacatcaagctggaagaggaacggagaagcgaggacgcccagagcaaggccgccctgaccgactggctgcgggctaaggccagcttcgtgatcgagggcctgaaggaggccgacaaggacgagttctgcagatgcgagctgaagctgcagaagtggtacggggacctgcggggaaagcccttcgccatcgaagccgagaacagcatcctggacatcagcggcttcagcaagcagtacaactgtgccttcatctggcagaaggacggcgtgaagaagctgaacctgtacctgatcatcaactacttcaagggcggcaagctgcggttcaagaagatcaaacctgaagccttcgaagccaacagattctacaccgtgatcaacaaaaagagcggcgagatcgtgcccatggaggtgaacttcaacttcgacgaccccaacctgatcatcctgcctctggcctttggcaagagacagggcagagaattcatctggaacgacctgctgtccctggaaaccggcagcctgaagctggccaacggaagagtgatcgagaagacactgtacaacagaagaacccggcaggatgagcctgccctgttcgtggccctgaccttcgagcggcgggaggtcctggactcctccaatatcaaaccaatgaacctgatcggcgtggcaagaggcgaaaacatccccgccgtgatcgccctgaccgaccccgagggctgcccactgagccggtttaaggatagcctgggaaacccaacccacatcctgagaatcggcgagagctataaggagaagcagcggaccatccaggccaagaaggaggtggagcagcggagagccggcggctacagccggaagtacgccagcaaagccaagaatctggcagacgatatggtgagaaacaccgctagagatctgctgtactacgccgtgacccaggatgccatgctgatcttcgccaacctgagccggggcttcggccggcagggcaagcggaccttcatggccgagagacagtacacacggatggaggactggctgaccgccaagctggcctacgagggcctgagcaagacctacctgtccaagacactggcccagtacacctccaagacatgcagcaactgtgggtttaccatcaccagcgccgactacgacagggtgctggagaagctgaagaagacagcaacaggctggatgaccacaattaacggcaaggagctgaaggtggagggccagattacctactacaacagatacaagagacagaacgtagtcaaggacctgtccgtcgagctggatagactgagcgaagaatctgtgaacaacgacatctcctcctggacaaagggcagaagcggagaagctctgagcctcctgaagaaaagattctcccatagacccgtgcaggagaagttcgtgtgcctgaactgcggcttcgagacacacgcagccgagcaagccgccctgaacatcgccagatcctggctgttcctgcggagccaggagtacaagaaataccagacaaacaagacaaccggcaacaccgataagagagccttcgtcgagacctggcagtccttttaccggaagaagcttaaggaggtgtggaaacctgccgtgcggtctggcggatctggcggaggctcctcaggccgaggtgaccttcgaggacgtggccgtgctgctgagcagggaggagtggggcaggctgggccccgtgcagaagggcctgtacagggacgtgatgctggagacctacaggaacctggtgagcctgggcgccggccccgccggccccaagcccgaggtgatcacccagctggagaggggcgacgagccctgggtgcccgacgtgcagggcagggagaggcccaacatcgacggcagcgccggatctggctccggcagcggccccaagaaaaagagaaaagtctaagctgccttctgcggggcttgccttctggccatgcccttcttctctcccttgcacctgtacctcttggtctttgaataaagcctgagtaggaaggctagcaaaaaaaaaaaaaaaaaaaaaaaaaaaaaaaaaaaaaaaaaaaaaaaaaaaaaaaaaaaaaaaaaaaaaaaaaaaaaaaa

SEQ ID NO: 16275 - RNA, 9485 nt, synthetic construct
  source 1..9485: mol_type = other RNA
aggaaataagagagaaaagaagagtaagaagaaatataagagccaccatggcccctaagaagaagcgtaaagtgagccggatggaacgcctcgtctacgaggtgcggcagaagtgcagaaacatcgaggacatctgcatctcctgcggatctctgaacgtgaccctggagcacccactgttcatcggcggcatgtgccagaactgtaaaaactgttttctggagtgtgcctatcaatacgacgatgacggctaccagagctactgcaccatctgttgcggcggaagagaggtgctgatgtgtggaaataacaactgctgccggtgcttctgcgtggaatgcgtggacctgctggtgggccccggcgccgcccaggccgctattaaggaagatccttggaactgctacatgtgcggccacaagggcacatacggcctgctgagacggagagaggactggcctagcagactgcagatgttcttcgccaataaccacgaccaggagttcgacccccctaaggtgtaccctcccgtccccgccgagaagagaaagcccatccgggtcctgagcctgttcgatggcatcgccaccggtctgctggtgctgaaggacctgggcatccaggtggataggtacattgcctccgaggtgtgcgaggactccatcaccgtgggaatggtgcgtcatcagggcaagatcatgtacgtgggcgacgtgcggagcgtgacacagaagcatatccaggagtggggccctttcgacctggtgatcggcggcagcccttgcaatgacctgagcatcgtgaacccagcccggaagggcctgtacgagggaaccggcagactgttcttcgagttttacagactgctgcacgacgcccggcctaaggaaggcgacgaccggcccttcttttggctgttcgagaatgtggtggccatgggagtcagcgacaagcgggatattagccggttcctggagagcaaccccgtgatgatcgatgccaaggaagtgagcgccgcccaccgggccagatacttctggggcaatctgcctggcatgaacagacccctggccagcaccgtgaacgacaagctggagctgcaggagtgcctggagcacggccggatcgccaagttcagcaaggtgagaaccatcaccacccgaagcaacagcatcaaacaaggcaaggaccagcactttcctgtgttcatgaacgagaaggaggacatcctgtggtgtaccgagatggagagagtgttcgggttcccagtccactacacagatgtcagcaacatgtctagactggccagacagagactgctgggaagaagctggtccgtccctgtgatcagacacctgttcgcccctctgaaggagtacttcgcctgcgtgagcagcggcaacagcaacgccaacagccggggccccagcttctctagcggcctggtgccactgtccctgagagggagccacatgggccccatggagatctacaaaaccgtgagcgcctggaagcggcagcctgtgcgcgtgctgagcctgtttcggaatatcgataaagtcctgaaaagcctgggattcctggagagcggctctggctccggcggtggcaccctgaagtacgtggaggatgtgacaaacgtggtcagacgggatgtggagaagtggggccccttcgatctggtgtacggcagcacccaacccctgggcagctcttgtgaccggtgccctggctggtacatgtttcagttccaccggatcctgcagtacgccctgccgagacaggagtcccagcggccattcttttggattttcatggacaacttgctgctgaccgaggatgaccaggaaactaccactcggttcctgcagaccgaagccgtgaccctgcaggacgtgagaggccgggactaccagaacgccatgcgggtgtggtccaacatccctggactgaaaagcaagcacgcacctctgacccctaaagaagaggagtacctgcaggcccaggtgcggagcagaagcaagctggacgcccctaaggtggatctgctggtgaagaattgcctcctgcccctgagagagtacttcaagtatttcagccagaatagtctgcccctgggaggcagcggcggcggcgccctggtgacatttgaggacgtcgccgtgcggttcacccaggaggaatgggctctgctggatccttctcagaaaatcctgtaccgggacgtgatgagagagacataccggaatctgacctccgtgggcatcaactgggaatgttgggaccttgaagcctgcttcagaagcctgggaagaaacctgagagtgcaggtggtgaagagaaagtgcgagctgaccaacagcggcccctgcgccgagggcggcccaagcagcggcgcccctcctcccagcggcggcagcccagccggctccccaacctctaccgaggagggcacctctgagtccgccacccccgagagcggccctggcacctccaccgagcccagcgagggcagcgcacccggcagccctgccggcagccccacctccacagaggagggaaccagcaccgagcccagcgaaggcagcgccccaggcaccagcaccgagcctagtgagcaggagattaaacggatcaacaagatcagaagaagacttgtgaaagacagcaacaccaagaaggccggcaagacaggccccatgaaaaccctgctggttagagtgatgacacccgatctgagagagcggctggaaaacctgagaaagaagcctgaaaatatcccccagcccatcagcaatacatctagagccaacctgaataagctgctgaccgattacaccgaaatgaagaaggcgatcctgcatgtgtactgggaagagttccagaaggaccctgtgggcctgatgagccgggtggcccagcctgccagcaagaagatcgatcagaacaagctgaaacctgagatggacgagaagggcaacctgaccaccgccggctttgcctgctctcagtgtggccagcccctgttcgtgtacaagctggagcaggtgtctgagaagggcaaggcttacaccaactacttcggacggtgcaatgtggccgagcacgaaaagctgatcctgctggcccagctgaagcccgagaaggatagcgacgaagccgtgacatatagcctgggaaagtttgggcagagggccctggatttctacagcattcatgtgaccaaggagtccacccaccccgtgaagcccctggcccagatcgccggaaacagatacgcctccggacctgtgggaaaggccctgagcgacgcatgtatgggcacaatcgcctccttcctgtctaagtaccaggacatcatcatcgaacaccagaaggtggtgaagggcaaccagaagagactggagagcctgcgggagctggccggcaaggaaaacctggaataccctagcgtgaccctgccacctcagcctcacaccaaggagggcgttgatgcctacaacgaagtgatcgcccgggtgcgaatgtgggtgaacctgaacctgtggcagaagctgaagctaagcagagatgatgccaagcctctgctgagactgaagggattcccttcctttcctctggtcgagagacaggccaacgaagtggactggtgggacatggtgtgtaacgtgaagaagctgatcaacgagaaaaaggaggatggcaaggtgttttggcagaatctggctggctacaagagacaggaagccctgagaccatacctgagcagcgaggaagatcggaagaagggaaagaaattcgctcggtaccagctgggcgacctgctgctgcacctggaaaagaagcacggcgaggactggggaaaggtgtacgacgaggcctgggagcggattgacaagaaagtggaaggcctgagcaagcacatcaagctggaagaggaacggagaagcgaggacgcccagagcaaggccgccctgaccgactggctgcgggctaaggccagcttcgtgatcgagggcctgaaggaggccgacaaggacgagttctgcagatgcgagctgaagctgcagaagtggtacggggacctgcggggaaagcccttcgccatcgaagccgagaacagcatcctggacatcagcggcttcagcaagcagtacaactgtgccttcatctggcagaaggacggcgtgaagaagctgaacctgtacctgatcatcaactacttcaagggcggcaagctgcggttcaagaagatcaaacctgaagccttcgaagccaacagattctacaccgtgatcaacaaaaagagcggcgagatcgtgcccatggaggtgaacttcaacttcgacgaccccaacctgatcatcctgcctctggcctttggcaagagacagggcagagaattcatctggaacgacctgctgtccctggaaaccggcagcctgaagctggccaacggaagagtgatcgagaagacactgtacaacagaagaacccggcaggatgagcctgccctgttcgtggccctgaccttcgagcggcgggaggtcctggactcctccaatatcaaaccaatgaacctgatcggcgtggcaagaggcgaaaacatccccgccgtgatcgccctgaccgaccccgagggctgcccactgagccggtttaaggatagcctgggaaacccaacccacatcctgagaatcggcgagagctataaggagaagcagcggaccatccaggccaagaaggaggtggagcagcggagagccggcggctacagccggaagtacgccagcaaagccaagaatctggcagacgatatggtgagaaacaccgctagagatctgctgtactacgccgtgacccaggatgccatgctgatcttcgccaacctgagccggggcttcggccggcagggcaagcggaccttcatggccgagagacagtacacacggatggaggactggctgaccgccaagctggcctacgagggcctgagcaagacctacctgtccaagacactggcccagtacacctccaagacatgcagcaactgtgggtttaccatcaccagcgccgactacgacagggtgctggagaagctgaagaagacagcaacaggctggatgaccacaattaacggcaaggagctgaaggtggagggccagattacctactacaacagatacaagagacagaacgtagtcaaggacctgtccgtcgagctggatagactgagcgaagaatctgtgaacaacgacatctcctcctggacaaagggcagaagcggagaagctctgagcctcctgaagaaaagattctcccatagacccgtgcaggagaagttcgtgtgcctgaactgcggcttcgagacacacgcagccgagcaagccgccctgaacatcgccagatcctggctgttcctgcggagccaggagtacaagaaataccagacaaacaagacaaccggcaacaccgataagagagccttcgtcgagacctggcagtccttttaccggaagaagcttaaggaggtgtggaaacctgccgtgcggtctggcggatctggcggaggctccctgagggacctggtgaccttcgaggacgtggccgtggacttcacccaggaggagtgggccctgctggacgccagccagaggagcctgtacagggaggtgatgctggagaactgcaggaacctggccagcctgggctgccacgtggacaagcccagcctgatcagccagctggagcaggaggaccaggccatgaccgaggagaggggcaacctgcccggcacctgccccgacctggagaccgtgggcggcccaagcagcggcgcccctcctcccagcggcggcagcccagccggctccccaacctctaccgaggagggcacctctgagtccgccacccccgagagcggccctggcacctccaccgagcccagcgagggcagcgcacccggcagccctgccggcagccccacctccacagaggagggaaccagcaccgagcccagcgaaggcagcgccccaggcaccagcaccgagcctagtgagcaggagattaaacggatcaacaagatcagaagaagacttgtgaaagacagcaacaccaagaaggccggcaagacaggccccatgaaaaccctgctggttagagtgatgacacccgatctgagagagcggctggaaaacctgagaaagaagcctgaaaatatcccccagcccatcagcaatacatctagagccaacctgaataagctgctgaccgattacaccgaaatgaagaaggcgatcctgcatgtgtactgggaagagttccagaaggaccctgtgggcctgatgagccgggtggcccagcctgccagcaagaagatcgatcagaacaagctgaaacctgagatggacgagaagggcaacctgaccaccgccggctttgcctgctctcagtgtggccagcccctgttcgtgtacaagctggagcaggtgtctgagaagggcaaggcttacaccaactacttcggacggtgcaatgtggccgagcacgaaaagctgatcctgctggcccagctgaagcccgagaaggatagcgacgaagccgtgacatatagcctgggaaagtttgggcagagggccctggatttctacagcattcatgtgaccaaggagtccacccaccccgtgaagcccctggcccagatcgccggaaacagatacgcctccggacctgtgggaaaggccctgagcgacgcatgtatgggcacaatcgcctccttcctgtctaagtaccaggacatcatcatcgaacaccagaaggtggtgaagggcaaccagaagagactggagagcctgcgggagctggccggcaaggaaaacctggaataccctagcgtgaccctgccacctcagcctcacaccaaggagggcgttgatgcctacaacgaagtgatcgcccgggtgcgaatgtgggtgaacctgaacctgtggcagaagctgaagctaagcagagatgatgccaagcctctgctgagactgaagggattcccttcctttcctctggtcgagagacaggccaacgaagtggactggtgggacatggtgtgtaacgtgaagaagctgatcaacgagaaaaaggaggatggcaaggtgttttggcagaatctggctggctacaagagacaggaagccctgagaccatacctgagcagcgaggaagatcggaagaagggaaagaaattcgctcggtaccagctgggcgacctgctgctgcacctggaaaagaagcacggcgaggactggggaaaggtgtacgacgaggcctgggagcggattgacaagaaagtggaaggcctgagcaagcacatcaagctggaagaggaacggagaagcgaggacgcccagagcaaggccgccctgaccgactggctgcgggctaaggccagcttcgtgatcgagggcctgaaggaggccgacaaggacgagttctgcagatgcgagctgaagctgcagaagtggtacggggacctgcggggaaagcccttcgccatcgaagccgagaacagcatcctggacatcagcggcttcagcaagcagtacaactgtgccttcatctggcagaaggacggcgtgaagaagctgaacctgtacctgatcatcaactacttcaagggcggcaagctgcggttcaagaagatcaaacctgaagccttcgaagccaacagattctacaccgtgatcaacaaaaagagcggcgagatcgtgcccatggaggtgaacttcaacttcgacgaccccaacctgatcatcctgcctctggcctttggcaagagacagggcagagaattcatctggaacgacctgctgtccctggaaaccggcagcctgaagctggccaacggaagagtgatcgagaagacactgtacaacagaagaacccggcaggatgagcctgccctgttcgtggccctgaccttcgagcggcgggaggtcctggactcctccaatatcaaaccaatgaacctgatcggcgtggcaagaggcgaaaacatccccgccgtgatcgccctgaccgaccccgagggctgcccactgagccggtttaaggatagcctgggaaacccaacccacatcctgagaatcggcgagagctataaggagaagcagcggaccatccaggccaagaaggaggtggagcagcggagagccggcggctacagccggaagtacgccagcaaagccaagaatctggcagacgatatggtgagaaacaccgctagagatctgctgtactacgccgtgacccaggatgccatgctgatcttcgccaacctgagccggggcttcggccggcagggcaagcggaccttcatggccgagagacagtacacacggatggaggactggctgaccgccaagctggcctacgagggcctgagcaagacctacctgtccaagacactggcccagtacacctccaagacatgcagcaactgtgggtttaccatcaccagcgccgactacgacagggtgctggagaagctgaagaagacagcaacaggctggatgaccacaattaacggcaaggagctgaaggtggagggccagattacctactacaacagatacaagagacagaacgtagtcaaggacctgtccgtcgagctggatagactgagcgaagaatctgtgaacaacgacatctcctcctggacaaagggcagaagcggagaagctctgagcctcctgaagaaaagattctcccatagacccgtgcaggagaagttcgtgtgcctgaactgcggcttcgagacacacgcagccgagcaagccgccctgaacatcgccagatcctggctgttcctgcggagccaggagtacaagaaataccagacaaacaagacaaccggcaacaccgataagagagccttcgtcgagacctggcagtccttttaccggaagaagcttaaggaggtgtggaaacctgccgtgcggtctggcggatctggcggaggctcctctgagggacctggtgaccttcgaggacgtggccgtggacttcacccaggaggagtgggccctgctggacgccagccagaggagcctgtacagggaggtgatgctggagaactgcaggaacctggccagcctgggctgccacgtggacaagcccagcctgatcagccagctggagcaggaggaccaggccatgaccgaggagaggggcaacctgcccggcacctgccccgacctggagaccgtgggatctggctccggcagcggccccaagaaaaagagaaaagtctaagctgccttctgcggggcttgccttctggccatgcccttcttctctcccttgcacctgtacctcttggtctttgaataaagcctgagtaggaaggctagcaaaaaaaaaaaaaaaaaaaaaaaaaaaaaaaaaaaaaaaaaaaaaaaaaaaaaaaaaaaaaaaaaaaaaaaaaaaaaaaa

SEQ ID NO: 16276 - RNA, 9485 nt, synthetic construct
  source 1..9485: mol_type = other RNA
aggaaataagagagaaaagaagagtaagaagaaatataagagccaccatggcccctaagaagaagcgtaaagtgagccggatggaacgcctcgtctacgaggtgcggcagaagtgcagaaacatcgaggacatctgcatctcctgcggatctctgaacgtgaccctggagcacccactgttcatcggcggcatgtgccagaactgtaaaaactgttttctggagtgtgcctatcaatacgacgatgacggctaccagagctactgcaccatctgttgcggcggaagagaggtgctgatgtgtggaaataacaactgctgccggtgcttctgcgtggaatgcgtggacctgctggtgggccccggcgccgcccaggccgctattaaggaagatccttggaactgctacatgtgcggccacaagggcacatacggcctgctgagacggagagaggactggcctagcagactgcagatgttcttcgccaataaccacgaccaggagttcgacccccctaaggtgtaccctcccgtccccgccgagaagagaaagcccatccgggtcctgagcctgttcgatggcatcgccaccggtctgctggtgctgaaggacctgggcatccaggtggataggtacattgcctccgaggtgtgcgaggactccatcaccgtgggaatggtgcgtcatcagggcaagatcatgtacgtgggcgacgtgcggagcgtgacacagaagcatatccaggagtggggccctttcgacctggtgatcggcggcagcccttgcaatgacctgagcatcgtgaacccagcccggaagggcctgtacgagggaaccggcagactgttcttcgagttttacagactgctgcacgacgcccggcctaaggaaggcgacgaccggcccttcttttggctgttcgagaatgtggtggccatgggagtcagcgacaagcgggatattagccggttcctggagagcaaccccgtgatgatcgatgccaaggaagtgagcgccgcccaccgggccagatacttctggggcaatctgcctggcatgaacagacccctggccagcaccgtgaacgacaagctggagctgcaggagtgcctggagcacggccggatcgccaagttcagcaaggtgagaaccatcaccacccgaagcaacagcatcaaacaaggcaaggaccagcactttcctgtgttcatgaacgagaaggaggacatcctgtggtgtaccgagatggagagagtgttcgggttcccagtccactacacagatgtcagcaacatgtctagactggccagacagagactgctgggaagaagctggtccgtccctgtgatcagacacctgttcgcccctctgaaggagtacttcgcctgcgtgagcagcggcaacagcaacgccaacagccggggccccagcttctctagcggcctggtgccactgtccctgagagggagccacatgggccccatggagatctacaaaaccgtgagcgcctggaagcggcagcctgtgcgcgtgctgagcctgtttcggaatatcgataaagtcctgaaaagcctgggattcctggagagcggctctggctccggcggtggcaccctgaagtacgtggaggatgtgacaaacgtggtcagacgggatgtggagaagtggggccccttcgatctggtgtacggcagcacccaacccctgggcagctcttgtgaccggtgccctggctggtacatgtttcagttccaccggatcctgcagtacgccctgccgagacaggagtcccagcggccattcttttggattttcatggacaacttgctgctgaccgaggatgaccaggaaactaccactcggttcctgcagaccgaagccgtgaccctgcaggacgtgagaggccgggactaccagaacgccatgcgggtgtggtccaacatccctggactgaaaagcaagcacgcacctctgacccctaaagaagaggagtacctgcaggcccaggtgcggagcagaagcaagctggacgcccctaaggtggatctgctggtgaagaattgcctcctgcccctgagagagtacttcaagtatttcagccagaatagtctgcccctgggaggcagcggcggcggcgccctggtgacatttgaggacgtcgccgtgcggttcacccaggaggaatgggctctgctggatccttctcagaaaatcctgtaccgggacgtgatgagagagacataccggaatctgacctccgtgggcatcaactgggaatgttgggaccttgaagcctgcttcagaagcctgggaagaaacctgagagtgcaggtggtgaagagaaagtgcgagctgaccaacagcggcccctgcgccgagggcggcccaagcagcggcgcccctcctcccagcggcggcagcccagccggctccccaacctctaccgaggagggcacctctgagtccgccacccccgagagcggccctggcacctccaccgagcccagcgagggcagcgcacccggcagccctgccggcagccccacctccacagaggagggaaccagcaccgagcccagcgaaggcagcgccccaggcaccagcaccgagcctagtgagcaggagattaaacggatcaacaagatcagaagaagacttgtgaaagacagcaacaccaagaaggccggcaagacaggccccatgaaaaccctgctggttagagtgatgacacccgatctgagagagcggctggaaaacctgagaaagaagcctgaaaatatcccccagcccatcagcaatacatctagagccaacctgaataagctgctgaccgattacaccgaaatgaagaaggcgatcctgcatgtgtactgggaagagttccagaaggaccctgtgggcctgatgagccgggtggcccagcctgccagcaagaagatcgatcagaacaagctgaaacctgagatggacgagaagggcaacctgaccaccgccggctttgcctgctctcagtgtggccagcccctgttcgtgtacaagctggagcaggtgtctgagaagggcaaggcttacaccaactacttcggacggtgcaatgtggccgagcacgaaaagctgatcctgctggcccagctgaagcccgagaaggatagcgacgaagccgtgacatatagcctgggaaagtttgggcagagggccctggatttctacagcattcatgtgaccaaggagtccacccaccccgtgaagcccctggcccagatcgccggaaacagatacgcctccggacctgtgggaaaggccctgagcgacgcatgtatgggcacaatcgcctccttcctgtctaagtaccaggacatcatcatcgaacaccagaaggtggtgaagggcaaccagaagagactggagagcctgcgggagctggccggcaaggaaaacctggaataccctagcgtgaccctgccacctcagcctcacaccaaggagggcgttgatgcctacaacgaagtgatcgcccgggtgcgaatgtgggtgaacctgaacctgtggcagaagctgaagctaagcagagatgatgccaagcctctgctgagactgaagggattcccttcctttcctctggtcgagagacaggccaacgaagtggactggtgggacatggtgtgtaacgtgaagaagctgatcaacgagaaaaaggaggatggcaaggtgttttggcagaatctggctggctacaagagacaggaagccctgagaccatacctgagcagcgaggaagatcggaagaagggaaagaaattcgctcggtaccagctgggcgacctgctgctgcacctggaaaagaagcacggcgaggactggggaaaggtgtacgacgaggcctgggagcggattgacaagaaagtggaaggcctgagcaagcacatcaagctggaagaggaacggagaagcgaggacgcccagagcaaggccgccctgaccgactggctgcgggctaaggccagcttcgtgatcgagggcctgaaggaggccgacaaggacgagttctgcagatgcgagctgaagctgcagaagtggtacggggacctgcggggaaagcccttcgccatcgaagccgagaacagcatcctggacatcagcggcttcagcaagcagtacaactgtgccttcatctggcagaaggacggcgtgaagaagctgaacctgtacctgatcatcaactacttcaagggcggcaagctgcggttcaagaagatcaaacctgaagccttcgaagccaacagattctacaccgtgatcaacaaaaagagcggcgagatcgtgcccatggaggtgaacttcaacttcgacgaccccaacctgatcatcctgcctctggcctttggcaagagacagggcagagaattcatctggaacgacctgctgtccctggaaaccggcagcctgaagctggccaacggaagagtgatcgagaagacactgtacaacagaagaacccggcaggatgagcctgccctgttcgtggccctgaccttcgagcggcgggaggtcctggactcctccaatatcaaaccaatgaacctgatcggcgtggcaagaggcgaaaacatccccgccgtgatcgccctgaccgaccccgagggctgcccactgagccggtttaaggatagcctgggaaacccaacccacatcctgagaatcggcgagagctataaggagaagcagcggaccatccaggccaagaaggaggtggagcagcggagagccggcggctacagccggaagtacgccagcaaagccaagaatctggcagacgatatggtgagaaacaccgctagagatctgctgtactacgccgtgacccaggatgccatgctgatcttcgccaacctgagccggggcttcggccggcagggcaagcggaccttcatggccgagagacagtacacacggatggaggactggctgaccgccaagctggcctacgagggcctgagcaagacctacctgtccaagacactggcccagtacacctccaagacatgcagcaactgtgggtttaccatcaccagcgccgactacgacagggtgctggagaagctgaagaagacagcaacaggctggatgaccacaattaacggcaaggagctgaaggtggagggccagattacctactacaacagatacaagagacagaacgtagtcaaggacctgtccgtcgagctggatagactgagcgaagaatctgtgaacaacgacatctcctcctggacaaagggcagaagcggagaagctctgagcctcctgaagaaaagattctcccatagacccgtgcaggagaagttcgtgtgcctgaactgcggcttcgagacacacgcagccgagcaagccgccctgaacatcgccagatcctggctgttcctgcggagccaggagtacaagaaataccagacaaacaagacaaccggcaacaccgataagagagccttcgtcgagacctggcagtccttttaccggaagaagcttaaggaggtgtggaaacctgccgtgcggtctggcggatctggcggaggctccgcccagaggcccgtgaccttcgaggacgtggccgtgtacttcagcgaggcccagggcaccctgctggaccccgaccagaaggccctgtacagggaggtgatgatggagaactacgagaacgtggccagcctgggcagcctgacccccaagcccgagctgatcatcaggctggagaggggcgaggagccctgggtgagcgaccccggcgacgcccccgtgagcggcgacttcaggaagagccacggcggcccaagcagcggcgcccctcctcccagcggcggcagcccagccggctccccaacctctaccgaggagggcacctctgagtccgccacccccgagagcggccctggcacctccaccgagcccagcgagggcagcgcacccggcagccctgccggcagccccacctccacagaggagggaaccagcaccgagcccagcgaaggcagcgccccaggcaccagcaccgagcctagtgagcaggagattaaacggatcaacaagatcagaagaagacttgtgaaagacagcaacaccaagaaggccggcaagacaggccccatgaaaaccctgctggttagagtgatgacacccgatctgagagagcggctggaaaacctgagaaagaagcctgaaaatatcccccagcccatcagcaatacatctagagccaacctgaataagctgctgaccgattacaccgaaatgaagaaggcgatcctgcatgtgtactgggaagagttccagaaggaccctgtgggcctgatgagccgggtggcccagcctgccagcaagaagatcgatcagaacaagctgaaacctgagatggacgagaagggcaacctgaccaccgccggctttgcctgctctcagtgtggccagcccctgttcgtgtacaagctggagcaggtgtctgagaagggcaaggcttacaccaactacttcggacggtgcaatgtggccgagcacgaaaagctgatcctgctggcccagctgaagcccgagaaggatagcgacgaagccgtgacatatagcctgggaaagtttgggcagagggccctggatttctacagcattcatgtgaccaaggagtccacccaccccgtgaagcccctggcccagatcgccggaaacagatacgcctccggacctgtgggaaaggccctgagcgacgcatgtatgggcacaatcgcctccttcctgtctaagtaccaggacatcatcatcgaacaccagaaggtggtgaagggcaaccagaagagactggagagcctgcgggagctggccggcaaggaaaacctggaataccctagcgtgaccctgccacctcagcctcacaccaaggagggcgttgatgcctacaacgaagtgatcgcccgggtgcgaatgtgggtgaacctgaacctgtggcagaagctgaagctaagcagagatgatgccaagcctctgctgagactgaagggattcccttcctttcctctggtcgagagacaggccaacgaagtggactggtgggacatggtgtgtaacgtgaagaagctgatcaacgagaaaaaggaggatggcaaggtgttttggcagaatctggctggctacaagagacaggaagccctgagaccatacctgagcagcgaggaagatcggaagaagggaaagaaattcgctcggtaccagctgggcgacctgctgctgcacctggaaaagaagcacggcgaggactggggaaaggtgtacgacgaggcctgggagcggattgacaagaaagtggaaggcctgagcaagcacatcaagctggaagaggaacggagaagcgaggacgcccagagcaaggccgccctgaccgactggctgcgggctaaggccagcttcgtgatcgagggcctgaaggaggccgacaaggacgagttctgcagatgcgagctgaagctgcagaagtggtacggggacctgcggggaaagcccttcgccatcgaagccgagaacagcatcctggacatcagcggcttcagcaagcagtacaactgtgccttcatctggcagaaggacggcgtgaagaagctgaacctgtacctgatcatcaactacttcaagggcggcaagctgcggttcaagaagatcaaacctgaagccttcgaagccaacagattctacaccgtgatcaacaaaaagagcggcgagatcgtgcccatggaggtgaacttcaacttcgacgaccccaacctgatcatcctgcctctggcctttggcaagagacagggcagagaattcatctggaacgacctgctgtccctggaaaccggcagcctgaagctggccaacggaagagtgatcgagaagacactgtacaacagaagaacccggcaggatgagcctgccctgttcgtggccctgaccttcgagcggcgggaggtcctggactcctccaatatcaaaccaatgaacctgatcggcgtggcaagaggcgaaaacatccccgccgtgatcgccctgaccgaccccgagggctgcccactgagccggtttaaggatagcctgggaaacccaacccacatcctgagaatcggcgagagctataaggagaagcagcggaccatccaggccaagaaggaggtggagcagcggagagccggcggctacagccggaagtacgccagcaaagccaagaatctggcagacgatatggtgagaaacaccgctagagatctgctgtactacgccgtgacccaggatgccatgctgatcttcgccaacctgagccggggcttcggccggcagggcaagcggaccttcatggccgagagacagtacacacggatggaggactggctgaccgccaagctggcctacgagggcctgagcaagacctacctgtccaagacactggcccagtacacctccaagacatgcagcaactgtgggtttaccatcaccagcgccgactacgacagggtgctggagaagctgaagaagacagcaacaggctggatgaccacaattaacggcaaggagctgaaggtggagggccagattacctactacaacagatacaagagacagaacgtagtcaaggacctgtccgtcgagctggatagactgagcgaagaatctgtgaacaacgacatctcctcctggacaaagggcagaagcggagaagctctgagcctcctgaagaaaagattctcccatagacccgtgcaggagaagttcgtgtgcctgaactgcggcttcgagacacacgcagccgagcaagccgccctgaacatcgccagatcctggctgttcctgcggagccaggagtacaagaaataccagacaaacaagacaaccggcaacaccgataagagagccttcgtcgagacctggcagtccttttaccggaagaagcttaaggaggtgtggaaacctgccgtgcggtctggcggatctggcggaggctcctgcccagaggcccgtgaccttcgaggacgtggccgtgtacttcagcgaggcccagggcaccctgctggaccccgaccagaaggccctgtacagggaggtgatgatggagaactacgagaacgtggccagcctgggcagcctgacccccaagcccgagctgatcatcaggctggagaggggcgaggagccctgggtgagcgaccccggcgacgcccccgtgagcggcgacttcaggaagagccacggatctggctccggcagcggccccaagaaaaagagaaaagtctaagctgccttctgcggggcttgccttctggccatgcccttcttctctcccttgcacctgtacctcttggtctttgaataaagcctgagtaggaaggctagcaaaaaaaaaaaaaaaaaaaaaaaaaaaaaaaaaaaaaaaaaaaaaaaaaaaaaaaaaaaaaaaaaaaaaaaaaaaaaaaa

SEQ ID NO: 16277 - RNA, 9485 nt, synthetic construct
  source 1..9485: mol_type = other RNA
aggaaataagagagaaaagaagagtaagaagaaatataagagccaccatggcccctaagaagaagcgtaaagtgagccggatggaacgcctcgtctacgaggtgcggcagaagtgcagaaacatcgaggacatctgcatctcctgcggatctctgaacgtgaccctggagcacccactgttcatcggcggcatgtgccagaactgtaaaaactgttttctggagtgtgcctatcaatacgacgatgacggctaccagagctactgcaccatctgttgcggcggaagagaggtgctgatgtgtggaaataacaactgctgccggtgcttctgcgtggaatgcgtggacctgctggtgggccccggcgccgcccaggccgctattaaggaagatccttggaactgctacatgtgcggccacaagggcacatacggcctgctgagacggagagaggactggcctagcagactgcagatgttcttcgccaataaccacgaccaggagttcgacccccctaaggtgtaccctcccgtccccgccgagaagagaaagcccatccgggtcctgagcctgttcgatggcatcgccaccggtctgctggtgctgaaggacctgggcatccaggtggataggtacattgcctccgaggtgtgcgaggactccatcaccgtgggaatggtgcgtcatcagggcaagatcatgtacgtgggcgacgtgcggagcgtgacacagaagcatatccaggagtggggccctttcgacctggtgatcggcggcagcccttgcaatgacctgagcatcgtgaacccagcccggaagggcctgtacgagggaaccggcagactgttcttcgagttttacagactgctgcacgacgcccggcctaaggaaggcgacgaccggcccttcttttggctgttcgagaatgtggtggccatgggagtcagcgacaagcgggatattagccggttcctggagagcaaccccgtgatgatcgatgccaaggaagtgagcgccgcccaccgggccagatacttctggggcaatctgcctggcatgaacagacccctggccagcaccgtgaacgacaagctggagctgcaggagtgcctggagcacggccggatcgccaagttcagcaaggtgagaaccatcaccacccgaagcaacagcatcaaacaaggcaaggaccagcactttcctgtgttcatgaacgagaaggaggacatcctgtggtgtaccgagatggagagagtgttcgggttcccagtccactacacagatgtcagcaacatgtctagactggccagacagagactgctgggaagaagctggtccgtccctgtgatcagacacctgttcgcccctctgaaggagtacttcgcctgcgtgagcagcggcaacagcaacgccaacagccggggccccagcttctctagcggcctggtgccactgtccctgagagggagccacatgggccccatggagatctacaaaaccgtgagcgcctggaagcggcagcctgtgcgcgtgctgagcctgtttcggaatatcgataaagtcctgaaaagcctgggattcctggagagcggctctggctccggcggtggcaccctgaagtacgtggaggatgtgacaaacgtggtcagacgggatgtggagaagtggggccccttcgatctggtgtacggcagcacccaacccctgggcagctcttgtgaccggtgccctggctggtacatgtttcagttccaccggatcctgcagtacgccctgccgagacaggagtcccagcggccattcttttggattttcatggacaacttgctgctgaccgaggatgaccaggaaactaccactcggttcctgcagaccgaagccgtgaccctgcaggacgtgagaggccgggactaccagaacgccatgcgggtgtggtccaacatccctggactgaaaagcaagcacgcacctctgacccctaaagaagaggagtacctgcaggcccaggtgcggagcagaagcaagctggacgcccctaaggtggatctgctggtgaagaattgcctcctgcccctgagagagtacttcaagtatttcagccagaatagtctgcccctgggaggcagcggcggcggcgccctggtgacatttgaggacgtcgccgtgcggttcacccaggaggaatgggctctgctggatccttctcagaaaatcctgtaccgggacgtgatgagagagacataccggaatctgacctccgtgggcatcaactgggaatgttgggaccttgaagcctgcttcagaagcctgggaagaaacctgagagtgcaggtggtgaagagaaagtgcgagctgaccaacagcggcccctgcgccgagggcggcccaagcagcggcgcccctcctcccagcggcggcagcccagccggctccccaacctctaccgaggagggcacctctgagtccgccacccccgagagcggccctggcacctccaccgagcccagcgagggcagcgcacccggcagccctgccggcagccccacctccacagaggagggaaccagcaccgagcccagcgaaggcagcgccccaggcaccagcaccgagcctagtgagcaggagattaaacggatcaacaagatcagaagaagacttgtgaaagacagcaacaccaagaaggccggcaagacaggccccatgaaaaccctgctggttagagtgatgacacccgatctgagagagcggctggaaaacctgagaaagaagcctgaaaatatcccccagcccatcagcaatacatctagagccaacctgaataagctgctgaccgattacaccgaaatgaagaaggcgatcctgcatgtgtactgggaagagttccagaaggaccctgtgggcctgatgagccgggtggcccagcctgccagcaagaagatcgatcagaacaagctgaaacctgagatggacgagaagggcaacctgaccaccgccggctttgcctgctctcagtgtggccagcccctgttcgtgtacaagctggagcaggtgtctgagaagggcaaggcttacaccaactacttcggacggtgcaatgtggccgagcacgaaaagctgatcctgctggcccagctgaagcccgagaaggatagcgacgaagccgtgacatatagcctgggaaagtttgggcagagggccctggatttctacagcattcatgtgaccaaggagtccacccaccccgtgaagcccctggcccagatcgccggaaacagatacgcctccggacctgtgggaaaggccctgagcgacgcatgtatgggcacaatcgcctccttcctgtctaagtaccaggacatcatcatcgaacaccagaaggtggtgaagggcaaccagaagagactggagagcctgcgggagctggccggcaaggaaaacctggaataccctagcgtgaccctgccacctcagcctcacaccaaggagggcgttgatgcctacaacgaagtgatcgcccgggtgcgaatgtgggtgaacctgaacctgtggcagaagctgaagctaagcagagatgatgccaagcctctgctgagactgaagggattcccttcctttcctctggtcgagagacaggccaacgaagtggactggtgggacatggtgtgtaacgtgaagaagctgatcaacgagaaaaaggaggatggcaaggtgttttggcagaatctggctggctacaagagacaggaagccctgagaccatacctgagcagcgaggaagatcggaagaagggaaagaaattcgctcggtaccagctgggcgacctgctgctgcacctggaaaagaagcacggcgaggactggggaaaggtgtacgacgaggcctgggagcggattgacaagaaagtggaaggcctgagcaagcacatcaagctggaagaggaacggagaagcgaggacgcccagagcaaggccgccctgaccgactggctgcgggctaaggccagcttcgtgatcgagggcctgaaggaggccgacaaggacgagttctgcagatgcgagctgaagctgcagaagtggtacggggacctgcggggaaagcccttcgccatcgaagccgagaacagcatcctggacatcagcggcttcagcaagcagtacaactgtgccttcatctggcagaaggacggcgtgaagaagctgaacctgtacctgatcatcaactacttcaagggcggcaagctgcggttcaagaagatcaaacctgaagccttcgaagccaacagattctacaccgtgatcaacaaaaagagcggcgagatcgtgcccatggaggtgaacttcaacttcgacgaccccaacctgatcatcctgcctctggcctttggcaagagacagggcagagaattcatctggaacgacctgctgtccctggaaaccggcagcctgaagctggccaacggaagagtgatcgagaagacactgtacaacagaagaacccggcaggatgagcctgccctgttcgtggccctgaccttcgagcggcgggaggtcctggactcctccaatatcaaaccaatgaacctgatcggcgtggcaagaggcgaaaacatccccgccgtgatcgccctgaccgaccccgagggctgcccactgagccggtttaaggatagcctgggaaacccaacccacatcctgagaatcggcgagagctataaggagaagcagcggaccatccaggccaagaaggaggtggagcagcggagagccggcggctacagccggaagtacgccagcaaagccaagaatctggcagacgatatggtgagaaacaccgctagagatctgctgtactacgccgtgacccaggatgccatgctgatcttcgccaacctgagccggggcttcggccggcagggcaagcggaccttcatggccgagagacagtacacacggatggaggactggctgaccgccaagctggcctacgagggcctgagcaagacctacctgtccaagacactggcccagtacacctccaagacatgcagcaactgtgggtttaccatcaccagcgccgactacgacagggtgctggagaagctgaagaagacagcaacaggctggatgaccacaattaacggcaaggagctgaaggtggagggccagattacctactacaacagatacaagagacagaacgtagtcaaggacctgtccgtcgagctggatagactgagcgaagaatctgtgaacaacgacatctcctcctggacaaagggcagaagcggagaagctctgagcctcctgaagaaaagattctcccatagacccgtgcaggagaagttcgtgtgcctgaactgcggcttcgagacacacgcagccgagcaagccgccctgaacatcgccagatcctggctgttcctgcggagccaggagtacaagaaataccagacaaacaagacaaccggcaacaccgataagagagccttcgtcgagacctggcagtccttttaccggaagaagcttaaggaggtgtggaaacctgccgtgcggtctggcggatctggcggaggctccgcccaggtgcccgtgaccttcgaggaggtggccgtgtacttcaccgccggccagggcgccctgctgggccccaaccagagggccctgtacagggacgtgatgcaggagaactacgagaccgtggccagcctgggcttcagcatccccaagcccgacctgatcacccagctggagaggggcgaggagccctgggtgcccgacctgcagcccagcaaggagatggagttcctgaggggcacctgcggcggcccaagcagcggcgcccctcctcccagcggcggcagcccagccggctccccaacctctaccgaggagggcacctctgagtccgccacccccgagagcggccctggcacctccaccgagcccagcgagggcagcgcacccggcagccctgccggcagccccacctccacagaggagggaaccagcaccgagcccagcgaaggcagcgccccaggcaccagcaccgagcctagtgagcaggagattaaacggatcaacaagatcagaagaagacttgtgaaagacagcaacaccaagaaggccggcaagacaggccccatgaaaaccctgctggttagagtgatgacacccgatctgagagagcggctggaaaacctgagaaagaagcctgaaaatatcccccagcccatcagcaatacatctagagccaacctgaataagctgctgaccgattacaccgaaatgaagaaggcgatcctgcatgtgtactgggaagagttccagaaggaccctgtgggcctgatgagccgggtggcccagcctgccagcaagaagatcgatcagaacaagctgaaacctgagatggacgagaagggcaacctgaccaccgccggctttgcctgctctcagtgtggccagcccctgttcgtgtacaagctggagcaggtgtctgagaagggcaaggcttacaccaactacttcggacggtgcaatgtggccgagcacgaaaagctgatcctgctggcccagctgaagcccgagaaggatagcgacgaagccgtgacatatagcctgggaaagtttgggcagagggccctggatttctacagcattcatgtgaccaaggagtccacccaccccgtgaagcccctggcccagatcgccggaaacagatacgcctccggacctgtgggaaaggccctgagcgacgcatgtatgggcacaatcgcctccttcctgtctaagtaccaggacatcatcatcgaacaccagaaggtggtgaagggcaaccagaagagactggagagcctgcgggagctggccggcaaggaaaacctggaataccctagcgtgaccctgccacctcagcctcacaccaaggagggcgttgatgcctacaacgaagtgatcgcccgggtgcgaatgtgggtgaacctgaacctgtggcagaagctgaagctaagcagagatgatgccaagcctctgctgagactgaagggattcccttcctttcctctggtcgagagacaggccaacgaagtggactggtgggacatggtgtgtaacgtgaagaagctgatcaacgagaaaaaggaggatggcaaggtgttttggcagaatctggctggctacaagagacaggaagccctgagaccatacctgagcagcgaggaagatcggaagaagggaaagaaattcgctcggtaccagctgggcgacctgctgctgcacctggaaaagaagcacggcgaggactggggaaaggtgtacgacgaggcctgggagcggattgacaagaaagtggaaggcctgagcaagcacatcaagctggaagaggaacggagaagcgaggacgcccagagcaaggccgccctgaccgactggctgcgggctaaggccagcttcgtgatcgagggcctgaaggaggccgacaaggacgagttctgcagatgcgagctgaagctgcagaagtggtacggggacctgcggggaaagcccttcgccatcgaagccgagaacagcatcctggacatcagcggcttcagcaagcagtacaactgtgccttcatctggcagaaggacggcgtgaagaagctgaacctgtacctgatcatcaactacttcaagggcggcaagctgcggttcaagaagatcaaacctgaagccttcgaagccaacagattctacaccgtgatcaacaaaaagagcggcgagatcgtgcccatggaggtgaacttcaacttcgacgaccccaacctgatcatcctgcctctggcctttggcaagagacagggcagagaattcatctggaacgacctgctgtccctggaaaccggcagcctgaagctggccaacggaagagtgatcgagaagacactgtacaacagaagaacccggcaggatgagcctgccctgttcgtggccctgaccttcgagcggcgggaggtcctggactcctccaatatcaaaccaatgaacctgatcggcgtggcaagaggcgaaaacatccccgccgtgatcgccctgaccgaccccgagggctgcccactgagccggtttaaggatagcctgggaaacccaacccacatcctgagaatcggcgagagctataaggagaagcagcggaccatccaggccaagaaggaggtggagcagcggagagccggcggctacagccggaagtacgccagcaaagccaagaatctggcagacgatatggtgagaaacaccgctagagatctgctgtactacgccgtgacccaggatgccatgctgatcttcgccaacctgagccggggcttcggccggcagggcaagcggaccttcatggccgagagacagtacacacggatggaggactggctgaccgccaagctggcctacgagggcctgagcaagacctacctgtccaagacactggcccagtacacctccaagacatgcagcaactgtgggtttaccatcaccagcgccgactacgacagggtgctggagaagctgaagaagacagcaacaggctggatgaccacaattaacggcaaggagctgaaggtggagggccagattacctactacaacagatacaagagacagaacgtagtcaaggacctgtccgtcgagctggatagactgagcgaagaatctgtgaacaacgacatctcctcctggacaaagggcagaagcggagaagctctgagcctcctgaagaaaagattctcccatagacccgtgcaggagaagttcgtgtgcctgaactgcggcttcgagacacacgcagccgagcaagccgccctgaacatcgccagatcctggctgttcctgcggagccaggagtacaagaaataccagacaaacaagacaaccggcaacaccgataagagagccttcgtcgagacctggcagtccttttaccggaagaagcttaaggaggtgtggaaacctgccgtgcggtctggcggatctggcggaggctcctgcccaggtgcccgtgaccttcgaggaggtggccgtgtacttcaccgccggccagggcgccctgctgggccccaaccagagggccctgtacagggacgtgatgcaggagaactacgagaccgtggccagcctgggcttcagcatccccaagcccgacctgatcacccagctggagaggggcgaggagccctgggtgcccgacctgcagcccagcaaggagatggagttcctgaggggcacctgcggatctggctccggcagcggccccaagaaaaagagaaaagtctaagctgccttctgcggggcttgccttctggccatgcccttcttctctcccttgcacctgtacctcttggtctttgaataaagcctgagtaggaaggctagcaaaaaaaaaaaaaaaaaaaaaaaaaaaaaaaaaaaaaaaaaaaaaaaaaaaaaaaaaaaaaaaaaaaaaaaaaaaaaaaa

SEQ ID NO: 16278 - RNA, 9485 nt, synthetic construct
  source 1..9485: mol_type = other RNA
aggaaataagagagaaaagaagagtaagaagaaatataagagccaccatggcccctaagaagaagcgtaaagtgagccggatggaacgcctcgtctacgaggtgcggcagaagtgcagaaacatcgaggacatctgcatctcctgcggatctctgaacgtgaccctggagcacccactgttcatcggcggcatgtgccagaactgtaaaaactgttttctggagtgtgcctatcaatacgacgatgacggctaccagagctactgcaccatctgttgcggcggaagagaggtgctgatgtgtggaaataacaactgctgccggtgcttctgcgtggaatgcgtggacctgctggtgggccccggcgccgcccaggccgctattaaggaagatccttggaactgctacatgtgcggccacaagggcacatacggcctgctgagacggagagaggactggcctagcagactgcagatgttcttcgccaataaccacgaccaggagttcgacccccctaaggtgtaccctcccgtccccgccgagaagagaaagcccatccgggtcctgagcctgttcgatggcatcgccaccggtctgctggtgctgaaggacctgggcatccaggtggataggtacattgcctccgaggtgtgcgaggactccatcaccgtgggaatggtgcgtcatcagggcaagatcatgtacgtgggcgacgtgcggagcgtgacacagaagcatatccaggagtggggccctttcgacctggtgatcggcggcagcccttgcaatgacctgagcatcgtgaacccagcccggaagggcctgtacgagggaaccggcagactgttcttcgagttttacagactgctgcacgacgcccggcctaaggaaggcgacgaccggcccttcttttggctgttcgagaatgtggtggccatgggagtcagcgacaagcgggatattagccggttcctggagagcaaccccgtgatgatcgatgccaaggaagtgagcgccgcccaccgggccagatacttctggggcaatctgcctggcatgaacagacccctggccagcaccgtgaacgacaagctggagctgcaggagtgcctggagcacggccggatcgccaagttcagcaaggtgagaaccatcaccacccgaagcaacagcatcaaacaaggcaaggaccagcactttcctgtgttcatgaacgagaaggaggacatcctgtggtgtaccgagatggagagagtgttcgggttcccagtccactacacagatgtcagcaacatgtctagactggccagacagagactgctgggaagaagctggtccgtccctgtgatcagacacctgttcgcccctctgaaggagtacttcgcctgcgtgagcagcggcaacagcaacgccaacagccggggccccagcttctctagcggcctggtgccactgtccctgagagggagccacatgggccccatggagatctacaaaaccgtgagcgcctggaagcggcagcctgtgcgcgtgctgagcctgtttcggaatatcgataaagtcctgaaaagcctgggattcctggagagcggctctggctccggcggtggcaccctgaagtacgtggaggatgtgacaaacgtggtcagacgggatgtggagaagtggggccccttcgatctggtgtacggcagcacccaacccctgggcagctcttgtgaccggtgccctggctggtacatgtttcagttccaccggatcctgcagtacgccctgccgagacaggagtcccagcggccattcttttggattttcatggacaacttgctgctgaccgaggatgaccaggaaactaccactcggttcctgcagaccgaagccgtgaccctgcaggacgtgagaggccgggactaccagaacgccatgcgggtgtggtccaacatccctggactgaaaagcaagcacgcacctctgacccctaaagaagaggagtacctgcaggcccaggtgcggagcagaagcaagctggacgcccctaaggtggatctgctggtgaagaattgcctcctgcccctgagagagtacttcaagtatttcagccagaatagtctgcccctgggaggcagcggcggcggcgccctggtgacatttgaggacgtcgccgtgcggttcacccaggaggaatgggctctgctggatccttctcagaaaatcctgtaccgggacgtgatgagagagacataccggaatctgacctccgtgggcatcaactgggaatgttgggaccttgaagcctgcttcagaagcctgggaagaaacctgagagtgcaggtggtgaagagaaagtgcgagctgaccaacagcggcccctgcgccgagggcggcccaagcagcggcgcccctcctcccagcggcggcagcccagccggctccccaacctctaccgaggagggcacctctgagtccgccacccccgagagcggccctggcacctccaccgagcccagcgagggcagcgcacccggcagccctgccggcagccccacctccacagaggagggaaccagcaccgagcccagcgaaggcagcgccccaggcaccagcaccgagcctagtgagcaggagattaaacggatcaacaagatcagaagaagacttgtgaaagacagcaacaccaagaaggccggcaagacaggccccatgaaaaccctgctggttagagtgatgacacccgatctgagagagcggctggaaaacctgagaaagaagcctgaaaatatcccccagcccatcagcaatacatctagagccaacctgaataagctgctgaccgattacaccgaaatgaagaaggcgatcctgcatgtgtactgggaagagttccagaaggaccctgtgggcctgatgagccgggtggcccagcctgccagcaagaagatcgatcagaacaagctgaaacctgagatggacgagaagggcaacctgaccaccgccggctttgcctgctctcagtgtggccagcccctgttcgtgtacaagctggagcaggtgtctgagaagggcaaggcttacaccaactacttcggacggtgcaatgtggccgagcacgaaaagctgatcctgctggcccagctgaagcccgagaaggatagcgacgaagccgtgacatatagcctgggaaagtttgggcagagggccctggatttctacagcattcatgtgaccaaggagtccacccaccccgtgaagcccctggcccagatcgccggaaacagatacgcctccggacctgtgggaaaggccctgagcgacgcatgtatgggcacaatcgcctccttcctgtctaagtaccaggacatcatcatcgaacaccagaaggtggtgaagggcaaccagaagagactggagagcctgcgggagctggccggcaaggaaaacctggaataccctagcgtgaccctgccacctcagcctcacaccaaggagggcgttgatgcctacaacgaagtgatcgcccgggtgcgaatgtgggtgaacctgaacctgtggcagaagctgaagctaagcagagatgatgccaagcctctgctgagactgaagggattcccttcctttcctctggtcgagagacaggccaacgaagtggactggtgggacatggtgtgtaacgtgaagaagctgatcaacgagaaaaaggaggatggcaaggtgttttggcagaatctggctggctacaagagacaggaagccctgagaccatacctgagcagcgaggaagatcggaagaagggaaagaaattcgctcggtaccagctgggcgacctgctgctgcacctggaaaagaagcacggcgaggactggggaaaggtgtacgacgaggcctgggagcggattgacaagaaagtggaaggcctgagcaagcacatcaagctggaagaggaacggagaagcgaggacgcccagagcaaggccgccctgaccgactggctgcgggctaaggccagcttcgtgatcgagggcctgaaggaggccgacaaggacgagttctgcagatgcgagctgaagctgcagaagtggtacggggacctgcggggaaagcccttcgccatcgaagccgagaacagcatcctggacatcagcggcttcagcaagcagtacaactgtgccttcatctggcagaaggacggcgtgaagaagctgaacctgtacctgatcatcaactacttcaagggcggcaagctgcggttcaagaagatcaaacctgaagccttcgaagccaacagattctacaccgtgatcaacaaaaagagcggcgagatcgtgcccatggaggtgaacttcaacttcgacgaccccaacctgatcatcctgcctctggcctttggcaagagacagggcagagaattcatctggaacgacctgctgtccctggaaaccggcagcctgaagctggccaacggaagagtgatcgagaagacactgtacaacagaagaacccggcaggatgagcctgccctgttcgtggccctgaccttcgagcggcgggaggtcctggactcctccaatatcaaaccaatgaacctgatcggcgtggcaagaggcgaaaacatccccgccgtgatcgccctgaccgaccccgagggctgcccactgagccggtttaaggatagcctgggaaacccaacccacatcctgagaatcggcgagagctataaggagaagcagcggaccatccaggccaagaaggaggtggagcagcggagagccggcggctacagccggaagtacgccagcaaagccaagaatctggcagacgatatggtgagaaacaccgctagagatctgctgtactacgccgtgacccaggatgccatgctgatcttcgccaacctgagccggggcttcggccggcagggcaagcggaccttcatggccgagagacagtacacacggatggaggactggctgaccgccaagctggcctacgagggcctgagcaagacctacctgtccaagacactggcccagtacacctccaagacatgcagcaactgtgggtttaccatcaccagcgccgactacgacagggtgctggagaagctgaagaagacagcaacaggctggatgaccacaattaacggcaaggagctgaaggtggagggccagattacctactacaacagatacaagagacagaacgtagtcaaggacctgtccgtcgagctggatagactgagcgaagaatctgtgaacaacgacatctcctcctggacaaagggcagaagcggagaagctctgagcctcctgaagaaaagattctcccatagacccgtgcaggagaagttcgtgtgcctgaactgcggcttcgagacacacgcagccgagcaagccgccctgaacatcgccagatcctggctgttcctgcggagccaggagtacaagaaataccagacaaacaagacaaccggcaacaccgataagagagccttcgtcgagacctggcagtccttttaccggaagaagcttaaggaggtgtggaaacctgccgtgcggtctggcggatctggcggaggctcccccaacgccctggtgaccttccaggacgtgttcgtggacttcagccccgaggagctggccagcctgagcgccgcccagaggaggctgcacagggaggtgaccctggagaactacaggaacctggtgagcctgggctaccagttccccaggcccgacatcatcacccagctggaggaggaggagagcagcgccatggaggaggacagcaacaccaagaccggccccgactgggagaccggccccggcggcccaagcagcggcgcccctcctcccagcggcggcagcccagccggctccccaacctctaccgaggagggcacctctgagtccgccacccccgagagcggccctggcacctccaccgagcccagcgagggcagcgcacccggcagccctgccggcagccccacctccacagaggagggaaccagcaccgagcccagcgaaggcagcgccccaggcaccagcaccgagcctagtgagcaggagattaaacggatcaacaagatcagaagaagacttgtgaaagacagcaacaccaagaaggccggcaagacaggccccatgaaaaccctgctggttagagtgatgacacccgatctgagagagcggctggaaaacctgagaaagaagcctgaaaatatcccccagcccatcagcaatacatctagagccaacctgaataagctgctgaccgattacaccgaaatgaagaaggcgatcctgcatgtgtactgggaagagttccagaaggaccctgtgggcctgatgagccgggtggcccagcctgccagcaagaagatcgatcagaacaagctgaaacctgagatggacgagaagggcaacctgaccaccgccggctttgcctgctctcagtgtggccagcccctgttcgtgtacaagctggagcaggtgtctgagaagggcaaggcttacaccaactacttcggacggtgcaatgtggccgagcacgaaaagctgatcctgctggcccagctgaagcccgagaaggatagcgacgaagccgtgacatatagcctgggaaagtttgggcagagggccctggatttctacagcattcatgtgaccaaggagtccacccaccccgtgaagcccctggcccagatcgccggaaacagatacgcctccggacctgtgggaaaggccctgagcgacgcatgtatgggcacaatcgcctccttcctgtctaagtaccaggacatcatcatcgaacaccagaaggtggtgaagggcaaccagaagagactggagagcctgcgggagctggccggcaaggaaaacctggaataccctagcgtgaccctgccacctcagcctcacaccaaggagggcgttgatgcctacaacgaagtgatcgcccgggtgcgaatgtgggtgaacctgaacctgtggcagaagctgaagctaagcagagatgatgccaagcctctgctgagactgaagggattcccttcctttcctctggtcgagagacaggccaacgaagtggactggtgggacatggtgtgtaacgtgaagaagctgatcaacgagaaaaaggaggatggcaaggtgttttggcagaatctggctggctacaagagacaggaagccctgagaccatacctgagcagcgaggaagatcggaagaagggaaagaaattcgctcggtaccagctgggcgacctgctgctgcacctggaaaagaagcacggcgaggactggggaaaggtgtacgacgaggcctgggagcggattgacaagaaagtggaaggcctgagcaagcacatcaagctggaagaggaacggagaagcgaggacgcccagagcaaggccgccctgaccgactggctgcgggctaaggccagcttcgtgatcgagggcctgaaggaggccgacaaggacgagttctgcagatgcgagctgaagctgcagaagtggtacggggacctgcggggaaagcccttcgccatcgaagccgagaacagcatcctggacatcagcggcttcagcaagcagtacaactgtgccttcatctggcagaaggacggcgtgaagaagctgaacctgtacctgatcatcaactacttcaagggcggcaagctgcggttcaagaagatcaaacctgaagccttcgaagccaacagattctacaccgtgatcaacaaaaagagcggcgagatcgtgcccatggaggtgaacttcaacttcgacgaccccaacctgatcatcctgcctctggcctttggcaagagacagggcagagaattcatctggaacgacctgctgtccctggaaaccggcagcctgaagctggccaacggaagagtgatcgagaagacactgtacaacagaagaacccggcaggatgagcctgccctgttcgtggccctgaccttcgagcggcgggaggtcctggactcctccaatatcaaaccaatgaacctgatcggcgtggcaagaggcgaaaacatccccgccgtgatcgccctgaccgaccccgagggctgcccactgagccggtttaaggatagcctgggaaacccaacccacatcctgagaatcggcgagagctataaggagaagcagcggaccatccaggccaagaaggaggtggagcagcggagagccggcggctacagccggaagtacgccagcaaagccaagaatctggcagacgatatggtgagaaacaccgctagagatctgctgtactacgccgtgacccaggatgccatgctgatcttcgccaacctgagccggggcttcggccggcagggcaagcggaccttcatggccgagagacagtacacacggatggaggactggctgaccgccaagctggcctacgagggcctgagcaagacctacctgtccaagacactggcccagtacacctccaagacatgcagcaactgtgggtttaccatcaccagcgccgactacgacagggtgctggagaagctgaagaagacagcaacaggctggatgaccacaattaacggcaaggagctgaaggtggagggccagattacctactacaacagatacaagagacagaacgtagtcaaggacctgtccgtcgagctggatagactgagcgaagaatctgtgaacaacgacatctcctcctggacaaagggcagaagcggagaagctctgagcctcctgaagaaaagattctcccatagacccgtgcaggagaagttcgtgtgcctgaactgcggcttcgagacacacgcagccgagcaagccgccctgaacatcgccagatcctggctgttcctgcggagccaggagtacaagaaataccagacaaacaagacaaccggcaacaccgataagagagccttcgtcgagacctggcagtccttttaccggaagaagcttaaggaggtgtggaaacctgccgtgcggtctggcggatctggcggaggctcctcccaacgccctggtgaccttccaggacgtgttcgtggacttcagccccgaggagctggccagcctgagcgccgcccagaggaggctgcacagggaggtgaccctggagaactacaggaacctggtgagcctgggctaccagttccccaggcccgacatcatcacccagctggaggaggaggagagcagcgccatggaggaggacagcaacaccaagaccggccccgactgggagaccggccccggatctggctccggcagcggccccaagaaaaagagaaaagtctaagctgccttctgcggggcttgccttctggccatgcccttcttctctcccttgcacctgtacctcttggtctttgaataaagcctgagtaggaaggctagcaaaaaaaaaaaaaaaaaaaaaaaaaaaaaaaaaaaaaaaaaaaaaaaaaaaaaaaaaaaaaaaaaaaaaaaaaaaaaaaa

SEQ ID NO: 16279 - RNA, 9485 nt, synthetic construct
  source 1..9485: mol_type = other RNA
aggaaataagagagaaaagaagagtaagaagaaatataagagccaccatggcccctaagaagaagcgtaaagtgagccggatggaacgcctcgtctacgaggtgcggcagaagtgcagaaacatcgaggacatctgcatctcctgcggatctctgaacgtgaccctggagcacccactgttcatcggcggcatgtgccagaactgtaaaaactgttttctggagtgtgcctatcaatacgacgatgacggctaccagagctactgcaccatctgttgcggcggaagagaggtgctgatgtgtggaaataacaactgctgccggtgcttctgcgtggaatgcgtggacctgctggtgggccccggcgccgcccaggccgctattaaggaagatccttggaactgctacatgtgcggccacaagggcacatacggcctgctgagacggagagaggactggcctagcagactgcagatgttcttcgccaataaccacgaccaggagttcgacccccctaaggtgtaccctcccgtccccgccgagaagagaaagcccatccgggtcctgagcctgttcgatggcatcgccaccggtctgctggtgctgaaggacctgggcatccaggtggataggtacattgcctccgaggtgtgcgaggactccatcaccgtgggaatggtgcgtcatcagggcaagatcatgtacgtgggcgacgtgcggagcgtgacacagaagcatatccaggagtggggccctttcgacctggtgatcggcggcagcccttgcaatgacctgagcatcgtgaacccagcccggaagggcctgtacgagggaaccggcagactgttcttcgagttttacagactgctgcacgacgcccggcctaaggaaggcgacgaccggcccttcttttggctgttcgagaatgtggtggccatgggagtcagcgacaagcgggatattagccggttcctggagagcaaccccgtgatgatcgatgccaaggaagtgagcgccgcccaccgggccagatacttctggggcaatctgcctggcatgaacagacccctggccagcaccgtgaacgacaagctggagctgcaggagtgcctggagcacggccggatcgccaagttcagcaaggtgagaaccatcaccacccgaagcaacagcatcaaacaaggcaaggaccagcactttcctgtgttcatgaacgagaaggaggacatcctgtggtgtaccgagatggagagagtgttcgggttcccagtccactacacagatgtcagcaacatgtctagactggccagacagagactgctgggaagaagctggtccgtccctgtgatcagacacctgttcgcccctctgaaggagtacttcgcctgcgtgagcagcggcaacagcaacgccaacagccggggccccagcttctctagcggcctggtgccactgtccctgagagggagccacatgggccccatggagatctacaaaaccgtgagcgcctggaagcggcagcctgtgcgcgtgctgagcctgtttcggaatatcgataaagtcctgaaaagcctgggattcctggagagcggctctggctccggcggtggcaccctgaagtacgtggaggatgtgacaaacgtggtcagacgggatgtggagaagtggggccccttcgatctggtgtacggcagcacccaacccctgggcagctcttgtgaccggtgccctggctggtacatgtttcagttccaccggatcctgcagtacgccctgccgagacaggagtcccagcggccattcttttggattttcatggacaacttgctgctgaccgaggatgaccaggaaactaccactcggttcctgcagaccgaagccgtgaccctgcaggacgtgagaggccgggactaccagaacgccatgcgggtgtggtccaacatccctggactgaaaagcaagcacgcacctctgacccctaaagaagaggagtacctgcaggcccaggtgcggagcagaagcaagctggacgcccctaaggtggatctgctggtgaagaattgcctcctgcccctgagagagtacttcaagtatttcagccagaatagtctgcccctgggaggcagcggcggcggcgccctggtgacatttgaggacgtcgccgtgcggttcacccaggaggaatgggctctgctggatccttctcagaaaatcctgtaccgggacgtgatgagagagacataccggaatctgacctccgtgggcatcaactgggaatgttgggaccttgaagcctgcttcagaagcctgggaagaaacctgagagtgcaggtggtgaagagaaagtgcgagctgaccaacagcggcccctgcgccgagggcggcccaagcagcggcgcccctcctcccagcggcggcagcccagccggctccccaacctctaccgaggagggcacctctgagtccgccacccccgagagcggccctggcacctccaccgagcccagcgagggcagcgcacccggcagccctgccggcagccccacctccacagaggagggaaccagcaccgagcccagcgaaggcagcgccccaggcaccagcaccgagcctagtgagcaggagattaaacggatcaacaagatcagaagaagacttgtgaaagacagcaacaccaagaaggccggcaagacaggccccatgaaaaccctgctggttagagtgatgacacccgatctgagagagcggctggaaaacctgagaaagaagcctgaaaatatcccccagcccatcagcaatacatctagagccaacctgaataagctgctgaccgattacaccgaaatgaagaaggcgatcctgcatgtgtactgggaagagttccagaaggaccctgtgggcctgatgagccgggtggcccagcctgccagcaagaagatcgatcagaacaagctgaaacctgagatggacgagaagggcaacctgaccaccgccggctttgcctgctctcagtgtggccagcccctgttcgtgtacaagctggagcaggtgtctgagaagggcaaggcttacaccaactacttcggacggtgcaatgtggccgagcacgaaaagctgatcctgctggcccagctgaagcccgagaaggatagcgacgaagccgtgacatatagcctgggaaagtttgggcagagggccctggatttctacagcattcatgtgaccaaggagtccacccaccccgtgaagcccctggcccagatcgccggaaacagatacgcctccggacctgtgggaaaggccctgagcgacgcatgtatgggcacaatcgcctccttcctgtctaagtaccaggacatcatcatcgaacaccagaaggtggtgaagggcaaccagaagagactggagagcctgcgggagctggccggcaaggaaaacctggaataccctagcgtgaccctgccacctcagcctcacaccaaggagggcgttgatgcctacaacgaagtgatcgcccgggtgcgaatgtgggtgaacctgaacctgtggcagaagctgaagctaagcagagatgatgccaagcctctgctgagactgaagggattcccttcctttcctctggtcgagagacaggccaacgaagtggactggtgggacatggtgtgtaacgtgaagaagctgatcaacgagaaaaaggaggatggcaaggtgttttggcagaatctggctggctacaagagacaggaagccctgagaccatacctgagcagcgaggaagatcggaagaagggaaagaaattcgctcggtaccagctgggcgacctgctgctgcacctggaaaagaagcacggcgaggactggggaaaggtgtacgacgaggcctgggagcggattgacaagaaagtggaaggcctgagcaagcacatcaagctggaagaggaacggagaagcgaggacgcccagagcaaggccgccctgaccgactggctgcgggctaaggccagcttcgtgatcgagggcctgaaggaggccgacaaggacgagttctgcagatgcgagctgaagctgcagaagtggtacggggacctgcggggaaagcccttcgccatcgaagccgagaacagcatcctggacatcagcggcttcagcaagcagtacaactgtgccttcatctggcagaaggacggcgtgaagaagctgaacctgtacctgatcatcaactacttcaagggcggcaagctgcggttcaagaagatcaaacctgaagccttcgaagccaacagattctacaccgtgatcaacaaaaagagcggcgagatcgtgcccatggaggtgaacttcaacttcgacgaccccaacctgatcatcctgcctctggcctttggcaagagacagggcagagaattcatctggaacgacctgctgtccctggaaaccggcagcctgaagctggccaacggaagagtgatcgagaagacactgtacaacagaagaacccggcaggatgagcctgccctgttcgtggccctgaccttcgagcggcgggaggtcctggactcctccaatatcaaaccaatgaacctgatcggcgtggcaagaggcgaaaacatccccgccgtgatcgccctgaccgaccccgagggctgcccactgagccggtttaaggatagcctgggaaacccaacccacatcctgagaatcggcgagagctataaggagaagcagcggaccatccaggccaagaaggaggtggagcagcggagagccggcggctacagccggaagtacgccagcaaagccaagaatctggcagacgatatggtgagaaacaccgctagagatctgctgtactacgccgtgacccaggatgccatgctgatcttcgccaacctgagccggggcttcggccggcagggcaagcggaccttcatggccgagagacagtacacacggatggaggactggctgaccgccaagctggcctacgagggcctgagcaagacctacctgtccaagacactggcccagtacacctccaagacatgcagcaactgtgggtttaccatcaccagcgccgactacgacagggtgctggagaagctgaagaagacagcaacaggctggatgaccacaattaacggcaaggagctgaaggtggagggccagattacctactacaacagatacaagagacagaacgtagtcaaggacctgtccgtcgagctggatagactgagcgaagaatctgtgaacaacgacatctcctcctggacaaagggcagaagcggagaagctctgagcctcctgaagaaaagattctcccatagacccgtgcaggagaagttcgtgtgcctgaactgcggcttcgagacacacgcagccgagcaagccgccctgaacatcgccagatcctggctgttcctgcggagccaggagtacaagaaataccagacaaacaagacaaccggcaacaccgataagagagccttcgtcgagacctggcagtccttttaccggaagaagcttaaggaggtgtggaaacctgccgtgcggtctggcggatctggcggaggctccgcccaggagagcgtgatgttcagcgacgtgagcatcgacttcagccaggaggagtgggagtgcctgaacgacgaccagagggacctgtacagggacgtgatgctggagaactacagcaacctggtgagcatgggccacagcatcagcaagcccaacgtgatcagctacctggagcagggcaaggagccctggctggtggacagggagctgaccaggggccagtggcccgtgctggagagcaggggcggcccaagcagcggcgcccctcctcccagcggcggcagcccagccggctccccaacctctaccgaggagggcacctctgagtccgccacccccgagagcggccctggcacctccaccgagcccagcgagggcagcgcacccggcagccctgccggcagccccacctccacagaggagggaaccagcaccgagcccagcgaaggcagcgccccaggcaccagcaccgagcctagtgagcaggagattaaacggatcaacaagatcagaagaagacttgtgaaagacagcaacaccaagaaggccggcaagacaggccccatgaaaaccctgctggttagagtgatgacacccgatctgagagagcggctggaaaacctgagaaagaagcctgaaaatatcccccagcccatcagcaatacatctagagccaacctgaataagctgctgaccgattacaccgaaatgaagaaggcgatcctgcatgtgtactgggaagagttccagaaggaccctgtgggcctgatgagccgggtggcccagcctgccagcaagaagatcgatcagaacaagctgaaacctgagatggacgagaagggcaacctgaccaccgccggctttgcctgctctcagtgtggccagcccctgttcgtgtacaagctggagcaggtgtctgagaagggcaaggcttacaccaactacttcggacggtgcaatgtggccgagcacgaaaagctgatcctgctggcccagctgaagcccgagaaggatagcgacgaagccgtgacatatagcctgggaaagtttgggcagagggccctggatttctacagcattcatgtgaccaaggagtccacccaccccgtgaagcccctggcccagatcgccggaaacagatacgcctccggacctgtgggaaaggccctgagcgacgcatgtatgggcacaatcgcctccttcctgtctaagtaccaggacatcatcatcgaacaccagaaggtggtgaagggcaaccagaagagactggagagcctgcgggagctggccggcaaggaaaacctggaataccctagcgtgaccctgccacctcagcctcacaccaaggagggcgttgatgcctacaacgaagtgatcgcccgggtgcgaatgtgggtgaacctgaacctgtggcagaagctgaagctaagcagagatgatgccaagcctctgctgagactgaagggattcccttcctttcctctggtcgagagacaggccaacgaagtggactggtgggacatggtgtgtaacgtgaagaagctgatcaacgagaaaaaggaggatggcaaggtgttttggcagaatctggctggctacaagagacaggaagccctgagaccatacctgagcagcgaggaagatcggaagaagggaaagaaattcgctcggtaccagctgggcgacctgctgctgcacctggaaaagaagcacggcgaggactggggaaaggtgtacgacgaggcctgggagcggattgacaagaaagtggaaggcctgagcaagcacatcaagctggaagaggaacggagaagcgaggacgcccagagcaaggccgccctgaccgactggctgcgggctaaggccagcttcgtgatcgagggcctgaaggaggccgacaaggacgagttctgcagatgcgagctgaagctgcagaagtggtacggggacctgcggggaaagcccttcgccatcgaagccgagaacagcatcctggacatcagcggcttcagcaagcagtacaactgtgccttcatctggcagaaggacggcgtgaagaagctgaacctgtacctgatcatcaactacttcaagggcggcaagctgcggttcaagaagatcaaacctgaagccttcgaagccaacagattctacaccgtgatcaacaaaaagagcggcgagatcgtgcccatggaggtgaacttcaacttcgacgaccccaacctgatcatcctgcctctggcctttggcaagagacagggcagagaattcatctggaacgacctgctgtccctggaaaccggcagcctgaagctggccaacggaagagtgatcgagaagacactgtacaacagaagaacccggcaggatgagcctgccctgttcgtggccctgaccttcgagcggcgggaggtcctggactcctccaatatcaaaccaatgaacctgatcggcgtggcaagaggcgaaaacatccccgccgtgatcgccctgaccgaccccgagggctgcccactgagccggtttaaggatagcctgggaaacccaacccacatcctgagaatcggcgagagctataaggagaagcagcggaccatccaggccaagaaggaggtggagcagcggagagccggcggctacagccggaagtacgccagcaaagccaagaatctggcagacgatatggtgagaaacaccgctagagatctgctgtactacgccgtgacccaggatgccatgctgatcttcgccaacctgagccggggcttcggccggcagggcaagcggaccttcatggccgagagacagtacacacggatggaggactggctgaccgccaagctggcctacgagggcctgagcaagacctacctgtccaagacactggcccagtacacctccaagacatgcagcaactgtgggtttaccatcaccagcgccgactacgacagggtgctggagaagctgaagaagacagcaacaggctggatgaccacaattaacggcaaggagctgaaggtggagggccagattacctactacaacagatacaagagacagaacgtagtcaaggacctgtccgtcgagctggatagactgagcgaagaatctgtgaacaacgacatctcctcctggacaaagggcagaagcggagaagctctgagcctcctgaagaaaagattctcccatagacccgtgcaggagaagttcgtgtgcctgaactgcggcttcgagacacacgcagccgagcaagccgccctgaacatcgccagatcctggctgttcctgcggagccaggagtacaagaaataccagacaaacaagacaaccggcaacaccgataagagagccttcgtcgagacctggcagtccttttaccggaagaagcttaaggaggtgtggaaacctgccgtgcggtctggcggatctggcggaggctcctgcccaggagagcgtgatgttcagcgacgtgagcatcgacttcagccaggaggagtgggagtgcctgaacgacgaccagagggacctgtacagggacgtgatgctggagaactacagcaacctggtgagcatgggccacagcatcagcaagcccaacgtgatcagctacctggagcagggcaaggagccctggctggtggacagggagctgaccaggggccagtggcccgtgctggagagcaggggatctggctccggcagcggccccaagaaaaagagaaaagtctaagctgccttctgcggggcttgccttctggccatgcccttcttctctcccttgcacctgtacctcttggtctttgaataaagcctgagtaggaaggctagcaaaaaaaaaaaaaaaaaaaaaaaaaaaaaaaaaaaaaaaaaaaaaaaaaaaaaaaaaaaaaaaaaaaaaaaaaaaaaaaa

SEQ ID NO: 16280 - RNA, 9485 nt, synthetic construct
  source 1..9485: mol_type = other RNA
aggaaataagagagaaaagaagagtaagaagaaatataagagccaccatggcccctaagaagaagcgtaaagtgagccggatggaacgcctcgtctacgaggtgcggcagaagtgcagaaacatcgaggacatctgcatctcctgcggatctctgaacgtgaccctggagcacccactgttcatcggcggcatgtgccagaactgtaaaaactgttttctggagtgtgcctatcaatacgacgatgacggctaccagagctactgcaccatctgttgcggcggaagagaggtgctgatgtgtggaaataacaactgctgccggtgcttctgcgtggaatgcgtggacctgctggtgggccccggcgccgcccaggccgctattaaggaagatccttggaactgctacatgtgcggccacaagggcacatacggcctgctgagacggagagaggactggcctagcagactgcagatgttcttcgccaataaccacgaccaggagttcgacccccctaaggtgtaccctcccgtccccgccgagaagagaaagcccatccgggtcctgagcctgttcgatggcatcgccaccggtctgctggtgctgaaggacctgggcatccaggtggataggtacattgcctccgaggtgtgcgaggactccatcaccgtgggaatggtgcgtcatcagggcaagatcatgtacgtgggcgacgtgcggagcgtgacacagaagcatatccaggagtggggccctttcgacctggtgatcggcggcagcccttgcaatgacctgagcatcgtgaacccagcccggaagggcctgtacgagggaaccggcagactgttcttcgagttttacagactgctgcacgacgcccggcctaaggaaggcgacgaccggcccttcttttggctgttcgagaatgtggtggccatgggagtcagcgacaagcgggatattagccggttcctggagagcaaccccgtgatgatcgatgccaaggaagtgagcgccgcccaccgggccagatacttctggggcaatctgcctggcatgaacagacccctggccagcaccgtgaacgacaagctggagctgcaggagtgcctggagcacggccggatcgccaagttcagcaaggtgagaaccatcaccacccgaagcaacagcatcaaacaaggcaaggaccagcactttcctgtgttcatgaacgagaaggaggacatcctgtggtgtaccgagatggagagagtgttcgggttcccagtccactacacagatgtcagcaacatgtctagactggccagacagagactgctgggaagaagctggtccgtccctgtgatcagacacctgttcgcccctctgaaggagtacttcgcctgcgtgagcagcggcaacagcaacgccaacagccggggccccagcttctctagcggcctggtgccactgtccctgagagggagccacatgggccccatggagatctacaaaaccgtgagcgcctggaagcggcagcctgtgcgcgtgctgagcctgtttcggaatatcgataaagtcctgaaaagcctgggattcctggagagcggctctggctccggcggtggcaccctgaagtacgtggaggatgtgacaaacgtggtcagacgggatgtggagaagtggggccccttcgatctggtgtacggcagcacccaacccctgggcagctcttgtgaccggtgccctggctggtacatgtttcagttccaccggatcctgcagtacgccctgccgagacaggagtcccagcggccattcttttggattttcatggacaacttgctgctgaccgaggatgaccaggaaactaccactcggttcctgcagaccgaagccgtgaccctgcaggacgtgagaggccgggactaccagaacgccatgcgggtgtggtccaacatccctggactgaaaagcaagcacgcacctctgacccctaaagaagaggagtacctgcaggcccaggtgcggagcagaagcaagctggacgcccctaaggtggatctgctggtgaagaattgcctcctgcccctgagagagtacttcaagtatttcagccagaatagtctgcccctgggaggcagcggcggcggcgccctggtgacatttgaggacgtcgccgtgcggttcacccaggaggaatgggctctgctggatccttctcagaaaatcctgtaccgggacgtgatgagagagacataccggaatctgacctccgtgggcatcaactgggaatgttgggaccttgaagcctgcttcagaagcctgggaagaaacctgagagtgcaggtggtgaagagaaagtgcgagctgaccaacagcggcccctgcgccgagggcggcccaagcagcggcgcccctcctcccagcggcggcagcccagccggctccccaacctctaccgaggagggcacctctgagtccgccacccccgagagcggccctggcacctccaccgagcccagcgagggcagcgcacccggcagccctgccggcagccccacctccacagaggagggaaccagcaccgagcccagcgaaggcagcgccccaggcaccagcaccgagcctagtgagcaggagattaaacggatcaacaagatcagaagaagacttgtgaaagacagcaacaccaagaaggccggcaagacaggccccatgaaaaccctgctggttagagtgatgacacccgatctgagagagcggctggaaaacctgagaaagaagcctgaaaatatcccccagcccatcagcaatacatctagagccaacctgaataagctgctgaccgattacaccgaaatgaagaaggcgatcctgcatgtgtactgggaagagttccagaaggaccctgtgggcctgatgagccgggtggcccagcctgccagcaagaagatcgatcagaacaagctgaaacctgagatggacgagaagggcaacctgaccaccgccggctttgcctgctctcagtgtggccagcccctgttcgtgtacaagctggagcaggtgtctgagaagggcaaggcttacaccaactacttcggacggtgcaatgtggccgagcacgaaaagctgatcctgctggcccagctgaagcccgagaaggatagcgacgaagccgtgacatatagcctgggaaagtttgggcagagggccctggatttctacagcattcatgtgaccaaggagtccacccaccccgtgaagcccctggcccagatcgccggaaacagatacgcctccggacctgtgggaaaggccctgagcgacgcatgtatgggcacaatcgcctccttcctgtctaagtaccaggacatcatcatcgaacaccagaaggtggtgaagggcaaccagaagagactggagagcctgcgggagctggccggcaaggaaaacctggaataccctagcgtgaccctgccacctcagcctcacaccaaggagggcgttgatgcctacaacgaagtgatcgcccgggtgcgaatgtgggtgaacctgaacctgtggcagaagctgaagctaagcagagatgatgccaagcctctgctgagactgaagggattcccttcctttcctctggtcgagagacaggccaacgaagtggactggtgggacatggtgtgtaacgtgaagaagctgatcaacgagaaaaaggaggatggcaaggtgttttggcagaatctggctggctacaagagacaggaagccctgagaccatacctgagcagcgaggaagatcggaagaagggaaagaaattcgctcggtaccagctgggcgacctgctgctgcacctggaaaagaagcacggcgaggactggggaaaggtgtacgacgaggcctgggagcggattgacaagaaagtggaaggcctgagcaagcacatcaagctggaagaggaacggagaagcgaggacgcccagagcaaggccgccctgaccgactggctgcgggctaaggccagcttcgtgatcgagggcctgaaggaggccgacaaggacgagttctgcagatgcgagctgaagctgcagaagtggtacggggacctgcggggaaagcccttcgccatcgaagccgagaacagcatcctggacatcagcggcttcagcaagcagtacaactgtgccttcatctggcagaaggacggcgtgaagaagctgaacctgtacctgatcatcaactacttcaagggcggcaagctgcggttcaagaagatcaaacctgaagccttcgaagccaacagattctacaccgtgatcaacaaaaagagcggcgagatcgtgcccatggaggtgaacttcaacttcgacgaccccaacctgatcatcctgcctctggcctttggcaagagacagggcagagaattcatctggaacgacctgctgtccctggaaaccggcagcctgaagctggccaacggaagagtgatcgagaagacactgtacaacagaagaacccggcaggatgagcctgccctgttcgtggccctgaccttcgagcggcgggaggtcctggactcctccaatatcaaaccaatgaacctgatcggcgtggcaagaggcgaaaacatccccgccgtgatcgccctgaccgaccccgagggctgcccactgagccggtttaaggatagcctgggaaacccaacccacatcctgagaatcggcgagagctataaggagaagcagcggaccatccaggccaagaaggaggtggagcagcggagagccggcggctacagccggaagtacgccagcaaagccaagaatctggcagacgatatggtgagaaacaccgctagagatctgctgtactacgccgtgacccaggatgccatgctgatcttcgccaacctgagccggggcttcggccggcagggcaagcggaccttcatggccgagagacagtacacacggatggaggactggctgaccgccaagctggcctacgagggcctgagcaagacctacctgtccaagacactggcccagtacacctccaagacatgcagcaactgtgggtttaccatcaccagcgccgactacgacagggtgctggagaagctgaagaagacagcaacaggctggatgaccacaattaacggcaaggagctgaaggtggagggccagattacctactacaacagatacaagagacagaacgtagtcaaggacctgtccgtcgagctggatagactgagcgaagaatctgtgaacaacgacatctcctcctggacaaagggcagaagcggagaagctctgagcctcctgaagaaaagattctcccatagacccgtgcaggagaagttcgtgtgcctgaactgcggcttcgagacacacgcagccgagcaagccgccctgaacatcgccagatcctggctgttcctgcggagccaggagtacaagaaataccagacaaacaagacaaccggcaacaccgataagagagccttcgtcgagacctggcagtccttttaccggaagaagcttaaggaggtgtggaaacctgccgtgcggtctggcggatctggcggaggctccaccatgagctgcagcagggccggcggcatcaccggctgcatcaagtacagcaccgccagcgtggccttcagggacgtggccgtggacttcacccaggaggagtggaggctgctgagccccgcccagaggaccctgcacagggaggtgatgctggagacctacaaccacctggtgagcctggagatccccagcagcaagcccaagctgatcgcccagctggagaggggcgaggagccctggaggggcggcccaagcagcggcgcccctcctcccagcggcggcagcccagccggctccccaacctctaccgaggagggcacctctgagtccgccacccccgagagcggccctggcacctccaccgagcccagcgagggcagcgcacccggcagccctgccggcagccccacctccacagaggagggaaccagcaccgagcccagcgaaggcagcgccccaggcaccagcaccgagcctagtgagcaggagattaaacggatcaacaagatcagaagaagacttgtgaaagacagcaacaccaagaaggccggcaagacaggccccatgaaaaccctgctggttagagtgatgacacccgatctgagagagcggctggaaaacctgagaaagaagcctgaaaatatcccccagcccatcagcaatacatctagagccaacctgaataagctgctgaccgattacaccgaaatgaagaaggcgatcctgcatgtgtactgggaagagttccagaaggaccctgtgggcctgatgagccgggtggcccagcctgccagcaagaagatcgatcagaacaagctgaaacctgagatggacgagaagggcaacctgaccaccgccggctttgcctgctctcagtgtggccagcccctgttcgtgtacaagctggagcaggtgtctgagaagggcaaggcttacaccaactacttcggacggtgcaatgtggccgagcacgaaaagctgatcctgctggcccagctgaagcccgagaaggatagcgacgaagccgtgacatatagcctgggaaagtttgggcagagggccctggatttctacagcattcatgtgaccaaggagtccacccaccccgtgaagcccctggcccagatcgccggaaacagatacgcctccggacctgtgggaaaggccctgagcgacgcatgtatgggcacaatcgcctccttcctgtctaagtaccaggacatcatcatcgaacaccagaaggtggtgaagggcaaccagaagagactggagagcctgcgggagctggccggcaaggaaaacctggaataccctagcgtgaccctgccacctcagcctcacaccaaggagggcgttgatgcctacaacgaagtgatcgcccgggtgcgaatgtgggtgaacctgaacctgtggcagaagctgaagctaagcagagatgatgccaagcctctgctgagactgaagggattcccttcctttcctctggtcgagagacaggccaacgaagtggactggtgggacatggtgtgtaacgtgaagaagctgatcaacgagaaaaaggaggatggcaaggtgttttggcagaatctggctggctacaagagacaggaagccctgagaccatacctgagcagcgaggaagatcggaagaagggaaagaaattcgctcggtaccagctgggcgacctgctgctgcacctggaaaagaagcacggcgaggactggggaaaggtgtacgacgaggcctgggagcggattgacaagaaagtggaaggcctgagcaagcacatcaagctggaagaggaacggagaagcgaggacgcccagagcaaggccgccctgaccgactggctgcgggctaaggccagcttcgtgatcgagggcctgaaggaggccgacaaggacgagttctgcagatgcgagctgaagctgcagaagtggtacggggacctgcggggaaagcccttcgccatcgaagccgagaacagcatcctggacatcagcggcttcagcaagcagtacaactgtgccttcatctggcagaaggacggcgtgaagaagctgaacctgtacctgatcatcaactacttcaagggcggcaagctgcggttcaagaagatcaaacctgaagccttcgaagccaacagattctacaccgtgatcaacaaaaagagcggcgagatcgtgcccatggaggtgaacttcaacttcgacgaccccaacctgatcatcctgcctctggcctttggcaagagacagggcagagaattcatctggaacgacctgctgtccctggaaaccggcagcctgaagctggccaacggaagagtgatcgagaagacactgtacaacagaagaacccggcaggatgagcctgccctgttcgtggccctgaccttcgagcggcgggaggtcctggactcctccaatatcaaaccaatgaacctgatcggcgtggcaagaggcgaaaacatccccgccgtgatcgccctgaccgaccccgagggctgcccactgagccggtttaaggatagcctgggaaacccaacccacatcctgagaatcggcgagagctataaggagaagcagcggaccatccaggccaagaaggaggtggagcagcggagagccggcggctacagccggaagtacgccagcaaagccaagaatctggcagacgatatggtgagaaacaccgctagagatctgctgtactacgccgtgacccaggatgccatgctgatcttcgccaacctgagccggggcttcggccggcagggcaagcggaccttcatggccgagagacagtacacacggatggaggactggctgaccgccaagctggcctacgagggcctgagcaagacctacctgtccaagacactggcccagtacacctccaagacatgcagcaactgtgggtttaccatcaccagcgccgactacgacagggtgctggagaagctgaagaagacagcaacaggctggatgaccacaattaacggcaaggagctgaaggtggagggccagattacctactacaacagatacaagagacagaacgtagtcaaggacctgtccgtcgagctggatagactgagcgaagaatctgtgaacaacgacatctcctcctggacaaagggcagaagcggagaagctctgagcctcctgaagaaaagattctcccatagacccgtgcaggagaagttcgtgtgcctgaactgcggcttcgagacacacgcagccgagcaagccgccctgaacatcgccagatcctggctgttcctgcggagccaggagtacaagaaataccagacaaacaagacaaccggcaacaccgataagagagccttcgtcgagacctggcagtccttttaccggaagaagcttaaggaggtgtggaaacctgccgtgcggtctggcggatctggcggaggctcctaccatgagctgcagcagggccggcggcatcaccggctgcatcaagtacagcaccgccagcgtggccttcagggacgtggccgtggacttcacccaggaggagtggaggctgctgagccccgcccagaggaccctgcacagggaggtgatgctggagacctacaaccacctggtgagcctggagatccccagcagcaagcccaagctgatcgcccagctggagaggggcgaggagccctggaggggatctggctccggcagcggccccaagaaaaagagaaaagtctaagctgccttctgcggggcttgccttctggccatgcccttcttctctcccttgcacctgtacctcttggtctttgaataaagcctgagtaggaaggctagcaaaaaaaaaaaaaaaaaaaaaaaaaaaaaaaaaaaaaaaaaaaaaaaaaaaaaaaaaaaaaaaaaaaaaaaaaaaaaaaa

SEQ ID NO: 16281 - RNA, 9485 nt, synthetic construct
  source 1..9485: mol_type = other RNA
aggaaataagagagaaaagaagagtaagaagaaatataagagccaccatggcccctaagaagaagcgtaaagtgagccggatggaacgcctcgtctacgaggtgcggcagaagtgcagaaacatcgaggacatctgcatctcctgcggatctctgaacgtgaccctggagcacccactgttcatcggcggcatgtgccagaactgtaaaaactgttttctggagtgtgcctatcaatacgacgatgacggctaccagagctactgcaccatctgttgcggcggaagagaggtgctgatgtgtggaaataacaactgctgccggtgcttctgcgtggaatgcgtggacctgctggtgggccccggcgccgcccaggccgctattaaggaagatccttggaactgctacatgtgcggccacaagggcacatacggcctgctgagacggagagaggactggcctagcagactgcagatgttcttcgccaataaccacgaccaggagttcgacccccctaaggtgtaccctcccgtccccgccgagaagagaaagcccatccgggtcctgagcctgttcgatggcatcgccaccggtctgctggtgctgaaggacctgggcatccaggtggataggtacattgcctccgaggtgtgcgaggactccatcaccgtgggaatggtgcgtcatcagggcaagatcatgtacgtgggcgacgtgcggagcgtgacacagaagcatatccaggagtggggccctttcgacctggtgatcggcggcagcccttgcaatgacctgagcatcgtgaacccagcccggaagggcctgtacgagggaaccggcagactgttcttcgagttttacagactgctgcacgacgcccggcctaaggaaggcgacgaccggcccttcttttggctgttcgagaatgtggtggccatgggagtcagcgacaagcgggatattagccggttcctggagagcaaccccgtgatgatcgatgccaaggaagtgagcgccgcccaccgggccagatacttctggggcaatctgcctggcatgaacagacccctggccagcaccgtgaacgacaagctggagctgcaggagtgcctggagcacggccggatcgccaagttcagcaaggtgagaaccatcaccacccgaagcaacagcatcaaacaaggcaaggaccagcactttcctgtgttcatgaacgagaaggaggacatcctgtggtgtaccgagatggagagagtgttcgggttcccagtccactacacagatgtcagcaacatgtctagactggccagacagagactgctgggaagaagctggtccgtccctgtgatcagacacctgttcgcccctctgaaggagtacttcgcctgcgtgagcagcggcaacagcaacgccaacagccggggccccagcttctctagcggcctggtgccactgtccctgagagggagccacatgggccccatggagatctacaaaaccgtgagcgcctggaagcggcagcctgtgcgcgtgctgagcctgtttcggaatatcgataaagtcctgaaaagcctgggattcctggagagcggctctggctccggcggtggcaccctgaagtacgtggaggatgtgacaaacgtggtcagacgggatgtggagaagtggggccccttcgatctggtgtacggcagcacccaacccctgggcagctcttgtgaccggtgccctggctggtacatgtttcagttccaccggatcctgcagtacgccctgccgagacaggagtcccagcggccattcttttggattttcatggacaacttgctgctgaccgaggatgaccaggaaactaccactcggttcctgcagaccgaagccgtgaccctgcaggacgtgagaggccgggactaccagaacgccatgcgggtgtggtccaacatccctggactgaaaagcaagcacgcacctctgacccctaaagaagaggagtacctgcaggcccaggtgcggagcagaagcaagctggacgcccctaaggtggatctgctggtgaagaattgcctcctgcccctgagagagtacttcaagtatttcagccagaatagtctgcccctgggaggcagcggcggcggcgccctggtgacatttgaggacgtcgccgtgcggttcacccaggaggaatgggctctgctggatccttctcagaaaatcctgtaccgggacgtgatgagagagacataccggaatctgacctccgtgggcatcaactgggaatgttgggaccttgaagcctgcttcagaagcctgggaagaaacctgagagtgcaggtggtgaagagaaagtgcgagctgaccaacagcggcccctgcgccgagggcggcccaagcagcggcgcccctcctcccagcggcggcagcccagccggctccccaacctctaccgaggagggcacctctgagtccgccacccccgagagcggccctggcacctccaccgagcccagcgagggcagcgcacccggcagccctgccggcagccccacctccacagaggagggaaccagcaccgagcccagcgaaggcagcgccccaggcaccagcaccgagcctagtgagcaggagattaaacggatcaacaagatcagaagaagacttgtgaaagacagcaacaccaagaaggccggcaagacaggccccatgaaaaccctgctggttagagtgatgacacccgatctgagagagcggctggaaaacctgagaaagaagcctgaaaatatcccccagcccatcagcaatacatctagagccaacctgaataagctgctgaccgattacaccgaaatgaagaaggcgatcctgcatgtgtactgggaagagttccagaaggaccctgtgggcctgatgagccgggtggcccagcctgccagcaagaagatcgatcagaacaagctgaaacctgagatggacgagaagggcaacctgaccaccgccggctttgcctgctctcagtgtggccagcccctgttcgtgtacaagctggagcaggtgtctgagaagggcaaggcttacaccaactacttcggacggtgcaatgtggccgagcacgaaaagctgatcctgctggcccagctgaagcccgagaaggatagcgacgaagccgtgacatatagcctgggaaagtttgggcagagggccctggatttctacagcattcatgtgaccaaggagtccacccaccccgtgaagcccctggcccagatcgccggaaacagatacgcctccggacctgtgggaaaggccctgagcgacgcatgtatgggcacaatcgcctccttcctgtctaagtaccaggacatcatcatcgaacaccagaaggtggtgaagggcaaccagaagagactggagagcctgcgggagctggccggcaaggaaaacctggaataccctagcgtgaccctgccacctcagcctcacaccaaggagggcgttgatgcctacaacgaagtgatcgcccgggtgcgaatgtgggtgaacctgaacctgtggcagaagctgaagctaagcagagatgatgccaagcctctgctgagactgaagggattcccttcctttcctctggtcgagagacaggccaacgaagtggactggtgggacatggtgtgtaacgtgaagaagctgatcaacgagaaaaaggaggatggcaaggtgttttggcagaatctggctggctacaagagacaggaagccctgagaccatacctgagcagcgaggaagatcggaagaagggaaagaaattcgctcggtaccagctgggcgacctgctgctgcacctggaaaagaagcacggcgaggactggggaaaggtgtacgacgaggcctgggagcggattgacaagaaagtggaaggcctgagcaagcacatcaagctggaagaggaacggagaagcgaggacgcccagagcaaggccgccctgaccgactggctgcgggctaaggccagcttcgtgatcgagggcctgaaggaggccgacaaggacgagttctgcagatgcgagctgaagctgcagaagtggtacggggacctgcggggaaagcccttcgccatcgaagccgagaacagcatcctggacatcagcggcttcagcaagcagtacaactgtgccttcatctggcagaaggacggcgtgaagaagctgaacctgtacctgatcatcaactacttcaagggcggcaagctgcggttcaagaagatcaaacctgaagccttcgaagccaacagattctacaccgtgatcaacaaaaagagcggcgagatcgtgcccatggaggtgaacttcaacttcgacgaccccaacctgatcatcctgcctctggcctttggcaagagacagggcagagaattcatctggaacgacctgctgtccctggaaaccggcagcctgaagctggccaacggaagagtgatcgagaagacactgtacaacagaagaacccggcaggatgagcctgccctgttcgtggccctgaccttcgagcggcgggaggtcctggactcctccaatatcaaaccaatgaacctgatcggcgtggcaagaggcgaaaacatccccgccgtgatcgccctgaccgaccccgagggctgcccactgagccggtttaaggatagcctgggaaacccaacccacatcctgagaatcggcgagagctataaggagaagcagcggaccatccaggccaagaaggaggtggagcagcggagagccggcggctacagccggaagtacgccagcaaagccaagaatctggcagacgatatggtgagaaacaccgctagagatctgctgtactacgccgtgacccaggatgccatgctgatcttcgccaacctgagccggggcttcggccggcagggcaagcggaccttcatggccgagagacagtacacacggatggaggactggctgaccgccaagctggcctacgagggcctgagcaagacctacctgtccaagacactggcccagtacacctccaagacatgcagcaactgtgggtttaccatcaccagcgccgactacgacagggtgctggagaagctgaagaagacagcaacaggctggatgaccacaattaacggcaaggagctgaaggtggagggccagattacctactacaacagatacaagagacagaacgtagtcaaggacctgtccgtcgagctggatagactgagcgaagaatctgtgaacaacgacatctcctcctggacaaagggcagaagcggagaagctctgagcctcctgaagaaaagattctcccatagacccgtgcaggagaagttcgtgtgcctgaactgcggcttcgagacacacgcagccgagcaagccgccctgaacatcgccagatcctggctgttcctgcggagccaggagtacaagaaataccagacaaacaagacaaccggcaacaccgataagagagccttcgtcgagacctggcagtccttttaccggaagaagcttaaggaggtgtggaaacctgccgtgcggtctggcggatctggcggaggctccgacatgggcctggtgagcttcgaggacgtggccgtggacttcacctggcaggagtggcaggagctggacgccgcccagaggaccctgtacagggacgtgatgctggagaactacagcagcctggtgagcctgggcaactgcctggacaagcccgagctgatcagcaagctggagcagggcctggtgccctggagcggcgccgaggccaccgagcagtaccagcccgacgtgcacaagtggagcggcggcccaagcagcggcgcccctcctcccagcggcggcagcccagccggctccccaacctctaccgaggagggcacctctgagtccgccacccccgagagcggccctggcacctccaccgagcccagcgagggcagcgcacccggcagccctgccggcagccccacctccacagaggagggaaccagcaccgagcccagcgaaggcagcgccccaggcaccagcaccgagcctagtgagcaggagattaaacggatcaacaagatcagaagaagacttgtgaaagacagcaacaccaagaaggccggcaagacaggccccatgaaaaccctgctggttagagtgatgacacccgatctgagagagcggctggaaaacctgagaaagaagcctgaaaatatcccccagcccatcagcaatacatctagagccaacctgaataagctgctgaccgattacaccgaaatgaagaaggcgatcctgcatgtgtactgggaagagttccagaaggaccctgtgggcctgatgagccgggtggcccagcctgccagcaagaagatcgatcagaacaagctgaaacctgagatggacgagaagggcaacctgaccaccgccggctttgcctgctctcagtgtggccagcccctgttcgtgtacaagctggagcaggtgtctgagaagggcaaggcttacaccaactacttcggacggtgcaatgtggccgagcacgaaaagctgatcctgctggcccagctgaagcccgagaaggatagcgacgaagccgtgacatatagcctgggaaagtttgggcagagggccctggatttctacagcattcatgtgaccaaggagtccacccaccccgtgaagcccctggcccagatcgccggaaacagatacgcctccggacctgtgggaaaggccctgagcgacgcatgtatgggcacaatcgcctccttcctgtctaagtaccaggacatcatcatcgaacaccagaaggtggtgaagggcaaccagaagagactggagagcctgcgggagctggccggcaaggaaaacctggaataccctagcgtgaccctgccacctcagcctcacaccaaggagggcgttgatgcctacaacgaagtgatcgcccgggtgcgaatgtgggtgaacctgaacctgtggcagaagctgaagctaagcagagatgatgccaagcctctgctgagactgaagggattcccttcctttcctctggtcgagagacaggccaacgaagtggactggtgggacatggtgtgtaacgtgaagaagctgatcaacgagaaaaaggaggatggcaaggtgttttggcagaatctggctggctacaagagacaggaagccctgagaccatacctgagcagcgaggaagatcggaagaagggaaagaaattcgctcggtaccagctgggcgacctgctgctgcacctggaaaagaagcacggcgaggactggggaaaggtgtacgacgaggcctgggagcggattgacaagaaagtggaaggcctgagcaagcacatcaagctggaagaggaacggagaagcgaggacgcccagagcaaggccgccctgaccgactggctgcgggctaaggccagcttcgtgatcgagggcctgaaggaggccgacaaggacgagttctgcagatgcgagctgaagctgcagaagtggtacggggacctgcggggaaagcccttcgccatcgaagccgagaacagcatcctggacatcagcggcttcagcaagcagtacaactgtgccttcatctggcagaaggacggcgtgaagaagctgaacctgtacctgatcatcaactacttcaagggcggcaagctgcggttcaagaagatcaaacctgaagccttcgaagccaacagattctacaccgtgatcaacaaaaagagcggcgagatcgtgcccatggaggtgaacttcaacttcgacgaccccaacctgatcatcctgcctctggcctttggcaagagacagggcagagaattcatctggaacgacctgctgtccctggaaaccggcagcctgaagctggccaacggaagagtgatcgagaagacactgtacaacagaagaacccggcaggatgagcctgccctgttcgtggccctgaccttcgagcggcgggaggtcctggactcctccaatatcaaaccaatgaacctgatcggcgtggcaagaggcgaaaacatccccgccgtgatcgccctgaccgaccccgagggctgcccactgagccggtttaaggatagcctgggaaacccaacccacatcctgagaatcggcgagagctataaggagaagcagcggaccatccaggccaagaaggaggtggagcagcggagagccggcggctacagccggaagtacgccagcaaagccaagaatctggcagacgatatggtgagaaacaccgctagagatctgctgtactacgccgtgacccaggatgccatgctgatcttcgccaacctgagccggggcttcggccggcagggcaagcggaccttcatggccgagagacagtacacacggatggaggactggctgaccgccaagctggcctacgagggcctgagcaagacctacctgtccaagacactggcccagtacacctccaagacatgcagcaactgtgggtttaccatcaccagcgccgactacgacagggtgctggagaagctgaagaagacagcaacaggctggatgaccacaattaacggcaaggagctgaaggtggagggccagattacctactacaacagatacaagagacagaacgtagtcaaggacctgtccgtcgagctggatagactgagcgaagaatctgtgaacaacgacatctcctcctggacaaagggcagaagcggagaagctctgagcctcctgaagaaaagattctcccatagacccgtgcaggagaagttcgtgtgcctgaactgcggcttcgagacacacgcagccgagcaagccgccctgaacatcgccagatcctggctgttcctgcggagccaggagtacaagaaataccagacaaacaagacaaccggcaacaccgataagagagccttcgtcgagacctggcagtccttttaccggaagaagcttaaggaggtgtggaaacctgccgtgcggtctggcggatctggcggaggctcctgacatgggcctggtgagcttcgaggacgtggccgtggacttcacctggcaggagtggcaggagctggacgccgcccagaggaccctgtacagggacgtgatgctggagaactacagcagcctggtgagcctgggcaactgcctggacaagcccgagctgatcagcaagctggagcagggcctggtgccctggagcggcgccgaggccaccgagcagtaccagcccgacgtgcacaagtggagcggatctggctccggcagcggccccaagaaaaagagaaaagtctaagctgccttctgcggggcttgccttctggccatgcccttcttctctcccttgcacctgtacctcttggtctttgaataaagcctgagtaggaaggctagcaaaaaaaaaaaaaaaaaaaaaaaaaaaaaaaaaaaaaaaaaaaaaaaaaaaaaaaaaaaaaaaaaaaaaaaaaaaaaaaa

SEQ ID NO: 16282 - RNA, 9485 nt, synthetic construct
  source 1..9485: mol_type = other RNA
aggaaataagagagaaaagaagagtaagaagaaatataagagccaccatggcccctaagaagaagcgtaaagtgagccggatggaacgcctcgtctacgaggtgcggcagaagtgcagaaacatcgaggacatctgcatctcctgcggatctctgaacgtgaccctggagcacccactgttcatcggcggcatgtgccagaactgtaaaaactgttttctggagtgtgcctatcaatacgacgatgacggctaccagagctactgcaccatctgttgcggcggaagagaggtgctgatgtgtggaaataacaactgctgccggtgcttctgcgtggaatgcgtggacctgctggtgggccccggcgccgcccaggccgctattaaggaagatccttggaactgctacatgtgcggccacaagggcacatacggcctgctgagacggagagaggactggcctagcagactgcagatgttcttcgccaataaccacgaccaggagttcgacccccctaaggtgtaccctcccgtccccgccgagaagagaaagcccatccgggtcctgagcctgttcgatggcatcgccaccggtctgctggtgctgaaggacctgggcatccaggtggataggtacattgcctccgaggtgtgcgaggactccatcaccgtgggaatggtgcgtcatcagggcaagatcatgtacgtgggcgacgtgcggagcgtgacacagaagcatatccaggagtggggccctttcgacctggtgatcggcggcagcccttgcaatgacctgagcatcgtgaacccagcccggaagggcctgtacgagggaaccggcagactgttcttcgagttttacagactgctgcacgacgcccggcctaaggaaggcgacgaccggcccttcttttggctgttcgagaatgtggtggccatgggagtcagcgacaagcgggatattagccggttcctggagagcaaccccgtgatgatcgatgccaaggaagtgagcgccgcccaccgggccagatacttctggggcaatctgcctggcatgaacagacccctggccagcaccgtgaacgacaagctggagctgcaggagtgcctggagcacggccggatcgccaagttcagcaaggtgagaaccatcaccacccgaagcaacagcatcaaacaaggcaaggaccagcactttcctgtgttcatgaacgagaaggaggacatcctgtggtgtaccgagatggagagagtgttcgggttcccagtccactacacagatgtcagcaacatgtctagactggccagacagagactgctgggaagaagctggtccgtccctgtgatcagacacctgttcgcccctctgaaggagtacttcgcctgcgtgagcagcggcaacagcaacgccaacagccggggccccagcttctctagcggcctggtgccactgtccctgagagggagccacatgggccccatggagatctacaaaaccgtgagcgcctggaagcggcagcctgtgcgcgtgctgagcctgtttcggaatatcgataaagtcctgaaaagcctgggattcctggagagcggctctggctccggcggtggcaccctgaagtacgtggaggatgtgacaaacgtggtcagacgggatgtggagaagtggggccccttcgatctggtgtacggcagcacccaacccctgggcagctcttgtgaccggtgccctggctggtacatgtttcagttccaccggatcctgcagtacgccctgccgagacaggagtcccagcggccattcttttggattttcatggacaacttgctgctgaccgaggatgaccaggaaactaccactcggttcctgcagaccgaagccgtgaccctgcaggacgtgagaggccgggactaccagaacgccatgcgggtgtggtccaacatccctggactgaaaagcaagcacgcacctctgacccctaaagaagaggagtacctgcaggcccaggtgcggagcagaagcaagctggacgcccctaaggtggatctgctggtgaagaattgcctcctgcccctgagagagtacttcaagtatttcagccagaatagtctgcccctgggaggcagcggcggcggcgccctggtgacatttgaggacgtcgccgtgcggttcacccaggaggaatgggctctgctggatccttctcagaaaatcctgtaccgggacgtgatgagagagacataccggaatctgacctccgtgggcatcaactgggaatgttgggaccttgaagcctgcttcagaagcctgggaagaaacctgagagtgcaggtggtgaagagaaagtgcgagctgaccaacagcggcccctgcgccgagggcggcccaagcagcggcgcccctcctcccagcggcggcagcccagccggctccccaacctctaccgaggagggcacctctgagtccgccacccccgagagcggccctggcacctccaccgagcccagcgagggcagcgcacccggcagccctgccggcagccccacctccacagaggagggaaccagcaccgagcccagcgaaggcagcgccccaggcaccagcaccgagcctagtgagcaggagattaaacggatcaacaagatcagaagaagacttgtgaaagacagcaacaccaagaaggccggcaagacaggccccatgaaaaccctgctggttagagtgatgacacccgatctgagagagcggctggaaaacctgagaaagaagcctgaaaatatcccccagcccatcagcaatacatctagagccaacctgaataagctgctgaccgattacaccgaaatgaagaaggcgatcctgcatgtgtactgggaagagttccagaaggaccctgtgggcctgatgagccgggtggcccagcctgccagcaagaagatcgatcagaacaagctgaaacctgagatggacgagaagggcaacctgaccaccgccggctttgcctgctctcagtgtggccagcccctgttcgtgtacaagctggagcaggtgtctgagaagggcaaggcttacaccaactacttcggacggtgcaatgtggccgagcacgaaaagctgatcctgctggcccagctgaagcccgagaaggatagcgacgaagccgtgacatatagcctgggaaagtttgggcagagggccctggatttctacagcattcatgtgaccaaggagtccacccaccccgtgaagcccctggcccagatcgccggaaacagatacgcctccggacctgtgggaaaggccctgagcgacgcatgtatgggcacaatcgcctccttcctgtctaagtaccaggacatcatcatcgaacaccagaaggtggtgaagggcaaccagaagagactggagagcctgcgggagctggccggcaaggaaaacctggaataccctagcgtgaccctgccacctcagcctcacaccaaggagggcgttgatgcctacaacgaagtgatcgcccgggtgcgaatgtgggtgaacctgaacctgtggcagaagctgaagctaagcagagatgatgccaagcctctgctgagactgaagggattcccttcctttcctctggtcgagagacaggccaacgaagtggactggtgggacatggtgtgtaacgtgaagaagctgatcaacgagaaaaaggaggatggcaaggtgttttggcagaatctggctggctacaagagacaggaagccctgagaccatacctgagcagcgaggaagatcggaagaagggaaagaaattcgctcggtaccagctgggcgacctgctgctgcacctggaaaagaagcacggcgaggactggggaaaggtgtacgacgaggcctgggagcggattgacaagaaagtggaaggcctgagcaagcacatcaagctggaagaggaacggagaagcgaggacgcccagagcaaggccgccctgaccgactggctgcgggctaaggccagcttcgtgatcgagggcctgaaggaggccgacaaggacgagttctgcagatgcgagctgaagctgcagaagtggtacggggacctgcggggaaagcccttcgccatcgaagccgagaacagcatcctggacatcagcggcttcagcaagcagtacaactgtgccttcatctggcagaaggacggcgtgaagaagctgaacctgtacctgatcatcaactacttcaagggcggcaagctgcggttcaagaagatcaaacctgaagccttcgaagccaacagattctacaccgtgatcaacaaaaagagcggcgagatcgtgcccatggaggtgaacttcaacttcgacgaccccaacctgatcatcctgcctctggcctttggcaagagacagggcagagaattcatctggaacgacctgctgtccctggaaaccggcagcctgaagctggccaacggaagagtgatcgagaagacactgtacaacagaagaacccggcaggatgagcctgccctgttcgtggccctgaccttcgagcggcgggaggtcctggactcctccaatatcaaaccaatgaacctgatcggcgtggcaagaggcgaaaacatccccgccgtgatcgccctgaccgaccccgagggctgcccactgagccggtttaaggatagcctgggaaacccaacccacatcctgagaatcggcgagagctataaggagaagcagcggaccatccaggccaagaaggaggtggagcagcggagagccggcggctacagccggaagtacgccagcaaagccaagaatctggcagacgatatggtgagaaacaccgctagagatctgctgtactacgccgtgacccaggatgccatgctgatcttcgccaacctgagccggggcttcggccggcagggcaagcggaccttcatggccgagagacagtacacacggatggaggactggctgaccgccaagctggcctacgagggcctgagcaagacctacctgtccaagacactggcccagtacacctccaagacatgcagcaactgtgggtttaccatcaccagcgccgactacgacagggtgctggagaagctgaagaagacagcaacaggctggatgaccacaattaacggcaaggagctgaaggtggagggccagattacctactacaacagatacaagagacagaacgtagtcaaggacctgtccgtcgagctggatagactgagcgaagaatctgtgaacaacgacatctcctcctggacaaagggcagaagcggagaagctctgagcctcctgaagaaaagattctcccatagacccgtgcaggagaagttcgtgtgcctgaactgcggcttcgagacacacgcagccgagcaagccgccctgaacatcgccagatcctggctgttcctgcggagccaggagtacaagaaataccagacaaacaagacaaccggcaacaccgataagagagccttcgtcgagacctggcagtccttttaccggaagaagcttaaggaggtgtggaaacctgccgtgcggtctggcggatctggcggaggctccagccaggtgagcgtgaccttcgaggacgtggccgtgctgttcaccagggacgagtggaagaagctggaccacagccagaggagcctgtacagggaggtgatgctggagaactacagcaacctggccagcctgggcttccccttcgccaagcccgagatgatcagcgtgctgcagcagggcgaggagccctggaaggtggagaagaggagcctgggcttcagcctgggctgcaacagcagcctgggcggcccaagcagcggcgcccctcctcccagcggcggcagcccagccggctccccaacctctaccgaggagggcacctctgagtccgccacccccgagagcggccctggcacctccaccgagcccagcgagggcagcgcacccggcagccctgccggcagccccacctccacagaggagggaaccagcaccgagcccagcgaaggcagcgccccaggcaccagcaccgagcctagtgagcaggagattaaacggatcaacaagatcagaagaagacttgtgaaagacagcaacaccaagaaggccggcaagacaggccccatgaaaaccctgctggttagagtgatgacacccgatctgagagagcggctggaaaacctgagaaagaagcctgaaaatatcccccagcccatcagcaatacatctagagccaacctgaataagctgctgaccgattacaccgaaatgaagaaggcgatcctgcatgtgtactgggaagagttccagaaggaccctgtgggcctgatgagccgggtggcccagcctgccagcaagaagatcgatcagaacaagctgaaacctgagatggacgagaagggcaacctgaccaccgccggctttgcctgctctcagtgtggccagcccctgttcgtgtacaagctggagcaggtgtctgagaagggcaaggcttacaccaactacttcggacggtgcaatgtggccgagcacgaaaagctgatcctgctggcccagctgaagcccgagaaggatagcgacgaagccgtgacatatagcctgggaaagtttgggcagagggccctggatttctacagcattcatgtgaccaaggagtccacccaccccgtgaagcccctggcccagatcgccggaaacagatacgcctccggacctgtgggaaaggccctgagcgacgcatgtatgggcacaatcgcctccttcctgtctaagtaccaggacatcatcatcgaacaccagaaggtggtgaagggcaaccagaagagactggagagcctgcgggagctggccggcaaggaaaacctggaataccctagcgtgaccctgccacctcagcctcacaccaaggagggcgttgatgcctacaacgaagtgatcgcccgggtgcgaatgtgggtgaacctgaacctgtggcagaagctgaagctaagcagagatgatgccaagcctctgctgagactgaagggattcccttcctttcctctggtcgagagacaggccaacgaagtggactggtgggacatggtgtgtaacgtgaagaagctgatcaacgagaaaaaggaggatggcaaggtgttttggcagaatctggctggctacaagagacaggaagccctgagaccatacctgagcagcgaggaagatcggaagaagggaaagaaattcgctcggtaccagctgggcgacctgctgctgcacctggaaaagaagcacggcgaggactggggaaaggtgtacgacgaggcctgggagcggattgacaagaaagtggaaggcctgagcaagcacatcaagctggaagaggaacggagaagcgaggacgcccagagcaaggccgccctgaccgactggctgcgggctaaggccagcttcgtgatcgagggcctgaaggaggccgacaaggacgagttctgcagatgcgagctgaagctgcagaagtggtacggggacctgcggggaaagcccttcgccatcgaagccgagaacagcatcctggacatcagcggcttcagcaagcagtacaactgtgccttcatctggcagaaggacggcgtgaagaagctgaacctgtacctgatcatcaactacttcaagggcggcaagctgcggttcaagaagatcaaacctgaagccttcgaagccaacagattctacaccgtgatcaacaaaaagagcggcgagatcgtgcccatggaggtgaacttcaacttcgacgaccccaacctgatcatcctgcctctggcctttggcaagagacagggcagagaattcatctggaacgacctgctgtccctggaaaccggcagcctgaagctggccaacggaagagtgatcgagaagacactgtacaacagaagaacccggcaggatgagcctgccctgttcgtggccctgaccttcgagcggcgggaggtcctggactcctccaatatcaaaccaatgaacctgatcggcgtggcaagaggcgaaaacatccccgccgtgatcgccctgaccgaccccgagggctgcccactgagccggtttaaggatagcctgggaaacccaacccacatcctgagaatcggcgagagctataaggagaagcagcggaccatccaggccaagaaggaggtggagcagcggagagccggcggctacagccggaagtacgccagcaaagccaagaatctggcagacgatatggtgagaaacaccgctagagatctgctgtactacgccgtgacccaggatgccatgctgatcttcgccaacctgagccggggcttcggccggcagggcaagcggaccttcatggccgagagacagtacacacggatggaggactggctgaccgccaagctggcctacgagggcctgagcaagacctacctgtccaagacactggcccagtacacctccaagacatgcagcaactgtgggtttaccatcaccagcgccgactacgacagggtgctggagaagctgaagaagacagcaacaggctggatgaccacaattaacggcaaggagctgaaggtggagggccagattacctactacaacagatacaagagacagaacgtagtcaaggacctgtccgtcgagctggatagactgagcgaagaatctgtgaacaacgacatctcctcctggacaaagggcagaagcggagaagctctgagcctcctgaagaaaagattctcccatagacccgtgcaggagaagttcgtgtgcctgaactgcggcttcgagacacacgcagccgagcaagccgccctgaacatcgccagatcctggctgttcctgcggagccaggagtacaagaaataccagacaaacaagacaaccggcaacaccgataagagagccttcgtcgagacctggcagtccttttaccggaagaagcttaaggaggtgtggaaacctgccgtgcggtctggcggatctggcggaggctcctagccaggtgagcgtgaccttcgaggacgtggccgtgctgttcaccagggacgagtggaagaagctggaccacagccagaggagcctgtacagggaggtgatgctggagaactacagcaacctggccagcctgggcttccccttcgccaagcccgagatgatcagcgtgctgcagcagggcgaggagccctggaaggtggagaagaggagcctgggcttcagcctgggctgcaacagcagcctgggatctggctccggcagcggccccaagaaaaagagaaaagtctaagctgccttctgcggggcttgccttctggccatgcccttcttctctcccttgcacctgtacctcttggtctttgaataaagcctgagtaggaaggctagcaaaaaaaaaaaaaaaaaaaaaaaaaaaaaaaaaaaaaaaaaaaaaaaaaaaaaaaaaaaaaaaaaaaaaaaaaaaaaaaa

SEQ ID NO: 16283 - RNA, 9485 nt, synthetic construct
  source 1..9485: mol_type = other RNA
aggaaataagagagaaaagaagagtaagaagaaatataagagccaccatggcccctaagaagaagcgtaaagtgagccggatggaacgcctcgtctacgaggtgcggcagaagtgcagaaacatcgaggacatctgcatctcctgcggatctctgaacgtgaccctggagcacccactgttcatcggcggcatgtgccagaactgtaaaaactgttttctggagtgtgcctatcaatacgacgatgacggctaccagagctactgcaccatctgttgcggcggaagagaggtgctgatgtgtggaaataacaactgctgccggtgcttctgcgtggaatgcgtggacctgctggtgggccccggcgccgcccaggccgctattaaggaagatccttggaactgctacatgtgcggccacaagggcacatacggcctgctgagacggagagaggactggcctagcagactgcagatgttcttcgccaataaccacgaccaggagttcgacccccctaaggtgtaccctcccgtccccgccgagaagagaaagcccatccgggtcctgagcctgttcgatggcatcgccaccggtctgctggtgctgaaggacctgggcatccaggtggataggtacattgcctccgaggtgtgcgaggactccatcaccgtgggaatggtgcgtcatcagggcaagatcatgtacgtgggcgacgtgcggagcgtgacacagaagcatatccaggagtggggccctttcgacctggtgatcggcggcagcccttgcaatgacctgagcatcgtgaacccagcccggaagggcctgtacgagggaaccggcagactgttcttcgagttttacagactgctgcacgacgcccggcctaaggaaggcgacgaccggcccttcttttggctgttcgagaatgtggtggccatgggagtcagcgacaagcgggatattagccggttcctggagagcaaccccgtgatgatcgatgccaaggaagtgagcgccgcccaccgggccagatacttctggggcaatctgcctggcatgaacagacccctggccagcaccgtgaacgacaagctggagctgcaggagtgcctggagcacggccggatcgccaagttcagcaaggtgagaaccatcaccacccgaagcaacagcatcaaacaaggcaaggaccagcactttcctgtgttcatgaacgagaaggaggacatcctgtggtgtaccgagatggagagagtgttcgggttcccagtccactacacagatgtcagcaacatgtctagactggccagacagagactgctgggaagaagctggtccgtccctgtgatcagacacctgttcgcccctctgaaggagtacttcgcctgcgtgagcagcggcaacagcaacgccaacagccggggccccagcttctctagcggcctggtgccactgtccctgagagggagccacatgggccccatggagatctacaaaaccgtgagcgcctggaagcggcagcctgtgcgcgtgctgagcctgtttcggaatatcgataaagtcctgaaaagcctgggattcctggagagcggctctggctccggcggtggcaccctgaagtacgtggaggatgtgacaaacgtggtcagacgggatgtggagaagtggggccccttcgatctggtgtacggcagcacccaacccctgggcagctcttgtgaccggtgccctggctggtacatgtttcagttccaccggatcctgcagtacgccctgccgagacaggagtcccagcggccattcttttggattttcatggacaacttgctgctgaccgaggatgaccaggaaactaccactcggttcctgcagaccgaagccgtgaccctgcaggacgtgagaggccgggactaccagaacgccatgcgggtgtggtccaacatccctggactgaaaagcaagcacgcacctctgacccctaaagaagaggagtacctgcaggcccaggtgcggagcagaagcaagctggacgcccctaaggtggatctgctggtgaagaattgcctcctgcccctgagagagtacttcaagtatttcagccagaatagtctgcccctgggaggcagcggcggcggcgccctggtgacatttgaggacgtcgccgtgcggttcacccaggaggaatgggctctgctggatccttctcagaaaatcctgtaccgggacgtgatgagagagacataccggaatctgacctccgtgggcatcaactgggaatgttgggaccttgaagcctgcttcagaagcctgggaagaaacctgagagtgcaggtggtgaagagaaagtgcgagctgaccaacagcggcccctgcgccgagggcggcccaagcagcggcgcccctcctcccagcggcggcagcccagccggctccccaacctctaccgaggagggcacctctgagtccgccacccccgagagcggccctggcacctccaccgagcccagcgagggcagcgcacccggcagccctgccggcagccccacctccacagaggagggaaccagcaccgagcccagcgaaggcagcgccccaggcaccagcaccgagcctagtgagcaggagattaaacggatcaacaagatcagaagaagacttgtgaaagacagcaacaccaagaaggccggcaagacaggccccatgaaaaccctgctggttagagtgatgacacccgatctgagagagcggctggaaaacctgagaaagaagcctgaaaatatcccccagcccatcagcaatacatctagagccaacctgaataagctgctgaccgattacaccgaaatgaagaaggcgatcctgcatgtgtactgggaagagttccagaaggaccctgtgggcctgatgagccgggtggcccagcctgccagcaagaagatcgatcagaacaagctgaaacctgagatggacgagaagggcaacctgaccaccgccggctttgcctgctctcagtgtggccagcccctgttcgtgtacaagctggagcaggtgtctgagaagggcaaggcttacaccaactacttcggacggtgcaatgtggccgagcacgaaaagctgatcctgctggcccagctgaagcccgagaaggatagcgacgaagccgtgacatatagcctgggaaagtttgggcagagggccctggatttctacagcattcatgtgaccaaggagtccacccaccccgtgaagcccctggcccagatcgccggaaacagatacgcctccggacctgtgggaaaggccctgagcgacgcatgtatgggcacaatcgcctccttcctgtctaagtaccaggacatcatcatcgaacaccagaaggtggtgaagggcaaccagaagagactggagagcctgcgggagctggccggcaaggaaaacctggaataccctagcgtgaccctgccacctcagcctcacaccaaggagggcgttgatgcctacaacgaagtgatcgcccgggtgcgaatgtgggtgaacctgaacctgtggcagaagctgaagctaagcagagatgatgccaagcctctgctgagactgaagggattcccttcctttcctctggtcgagagacaggccaacgaagtggactggtgggacatggtgtgtaacgtgaagaagctgatcaacgagaaaaaggaggatggcaaggtgttttggcagaatctggctggctacaagagacaggaagccctgagaccatacctgagcagcgaggaagatcggaagaagggaaagaaattcgctcggtaccagctgggcgacctgctgctgcacctggaaaagaagcacggcgaggactggggaaaggtgtacgacgaggcctgggagcggattgacaagaaagtggaaggcctgagcaagcacatcaagctggaagaggaacggagaagcgaggacgcccagagcaaggccgccctgaccgactggctgcgggctaaggccagcttcgtgatcgagggcctgaaggaggccgacaaggacgagttctgcagatgcgagctgaagctgcagaagtggtacggggacctgcggggaaagcccttcgccatcgaagccgagaacagcatcctggacatcagcggcttcagcaagcagtacaactgtgccttcatctggcagaaggacggcgtgaagaagctgaacctgtacctgatcatcaactacttcaagggcggcaagctgcggttcaagaagatcaaacctgaagccttcgaagccaacagattctacaccgtgatcaacaaaaagagcggcgagatcgtgcccatggaggtgaacttcaacttcgacgaccccaacctgatcatcctgcctctggcctttggcaagagacagggcagagaattcatctggaacgacctgctgtccctggaaaccggcagcctgaagctggccaacggaagagtgatcgagaagacactgtacaacagaagaacccggcaggatgagcctgccctgttcgtggccctgaccttcgagcggcgggaggtcctggactcctccaatatcaaaccaatgaacctgatcggcgtggcaagaggcgaaaacatccccgccgtgatcgccctgaccgaccccgagggctgcccactgagccggtttaaggatagcctgggaaacccaacccacatcctgagaatcggcgagagctataaggagaagcagcggaccatccaggccaagaaggaggtggagcagcggagagccggcggctacagccggaagtacgccagcaaagccaagaatctggcagacgatatggtgagaaacaccgctagagatctgctgtactacgccgtgacccaggatgccatgctgatcttcgccaacctgagccggggcttcggccggcagggcaagcggaccttcatggccgagagacagtacacacggatggaggactggctgaccgccaagctggcctacgagggcctgagcaagacctacctgtccaagacactggcccagtacacctccaagacatgcagcaactgtgggtttaccatcaccagcgccgactacgacagggtgctggagaagctgaagaagacagcaacaggctggatgaccacaattaacggcaaggagctgaaggtggagggccagattacctactacaacagatacaagagacagaacgtagtcaaggacctgtccgtcgagctggatagactgagcgaagaatctgtgaacaacgacatctcctcctggacaaagggcagaagcggagaagctctgagcctcctgaagaaaagattctcccatagacccgtgcaggagaagttcgtgtgcctgaactgcggcttcgagacacacgcagccgagcaagccgccctgaacatcgccagatcctggctgttcctgcggagccaggagtacaagaaataccagacaaacaagacaaccggcaacaccgataagagagccttcgtcgagacctggcagtccttttaccggaagaagcttaaggaggtgtggaaacctgccgtgcggtctggcggatctggcggaggctcccaggaggaccccgtgaccttccaggacgtggccgtggtgttcacccaggagcagtggggctacctggaccccagccagaaggagctgtacagggacgtgatgctggagaactaccagaacctgctgtgcctgggcctggccgtgagcaagcccgaggtgatctgccagctggagcagggcgaggccccctggaggcccgagggcagggtgcccggcagcagccaccccgacggcgaggtgaggggcggcccaagcagcggcgcccctcctcccagcggcggcagcccagccggctccccaacctctaccgaggagggcacctctgagtccgccacccccgagagcggccctggcacctccaccgagcccagcgagggcagcgcacccggcagccctgccggcagccccacctccacagaggagggaaccagcaccgagcccagcgaaggcagcgccccaggcaccagcaccgagcctagtgagcaggagattaaacggatcaacaagatcagaagaagacttgtgaaagacagcaacaccaagaaggccggcaagacaggccccatgaaaaccctgctggttagagtgatgacacccgatctgagagagcggctggaaaacctgagaaagaagcctgaaaatatcccccagcccatcagcaatacatctagagccaacctgaataagctgctgaccgattacaccgaaatgaagaaggcgatcctgcatgtgtactgggaagagttccagaaggaccctgtgggcctgatgagccgggtggcccagcctgccagcaagaagatcgatcagaacaagctgaaacctgagatggacgagaagggcaacctgaccaccgccggctttgcctgctctcagtgtggccagcccctgttcgtgtacaagctggagcaggtgtctgagaagggcaaggcttacaccaactacttcggacggtgcaatgtggccgagcacgaaaagctgatcctgctggcccagctgaagcccgagaaggatagcgacgaagccgtgacatatagcctgggaaagtttgggcagagggccctggatttctacagcattcatgtgaccaaggagtccacccaccccgtgaagcccctggcccagatcgccggaaacagatacgcctccggacctgtgggaaaggccctgagcgacgcatgtatgggcacaatcgcctccttcctgtctaagtaccaggacatcatcatcgaacaccagaaggtggtgaagggcaaccagaagagactggagagcctgcgggagctggccggcaaggaaaacctggaataccctagcgtgaccctgccacctcagcctcacaccaaggagggcgttgatgcctacaacgaagtgatcgcccgggtgcgaatgtgggtgaacctgaacctgtggcagaagctgaagctaagcagagatgatgccaagcctctgctgagactgaagggattcccttcctttcctctggtcgagagacaggccaacgaagtggactggtgggacatggtgtgtaacgtgaagaagctgatcaacgagaaaaaggaggatggcaaggtgttttggcagaatctggctggctacaagagacaggaagccctgagaccatacctgagcagcgaggaagatcggaagaagggaaagaaattcgctcggtaccagctgggcgacctgctgctgcacctggaaaagaagcacggcgaggactggggaaaggtgtacgacgaggcctgggagcggattgacaagaaagtggaaggcctgagcaagcacatcaagctggaagaggaacggagaagcgaggacgcccagagcaaggccgccctgaccgactggctgcgggctaaggccagcttcgtgatcgagggcctgaaggaggccgacaaggacgagttctgcagatgcgagctgaagctgcagaagtggtacggggacctgcggggaaagcccttcgccatcgaagccgagaacagcatcctggacatcagcggcttcagcaagcagtacaactgtgccttcatctggcagaaggacggcgtgaagaagctgaacctgtacctgatcatcaactacttcaagggcggcaagctgcggttcaagaagatcaaacctgaagccttcgaagccaacagattctacaccgtgatcaacaaaaagagcggcgagatcgtgcccatggaggtgaacttcaacttcgacgaccccaacctgatcatcctgcctctggcctttggcaagagacagggcagagaattcatctggaacgacctgctgtccctggaaaccggcagcctgaagctggccaacggaagagtgatcgagaagacactgtacaacagaagaacccggcaggatgagcctgccctgttcgtggccctgaccttcgagcggcgggaggtcctggactcctccaatatcaaaccaatgaacctgatcggcgtggcaagaggcgaaaacatccccgccgtgatcgccctgaccgaccccgagggctgcccactgagccggtttaaggatagcctgggaaacccaacccacatcctgagaatcggcgagagctataaggagaagcagcggaccatccaggccaagaaggaggtggagcagcggagagccggcggctacagccggaagtacgccagcaaagccaagaatctggcagacgatatggtgagaaacaccgctagagatctgctgtactacgccgtgacccaggatgccatgctgatcttcgccaacctgagccggggcttcggccggcagggcaagcggaccttcatggccgagagacagtacacacggatggaggactggctgaccgccaagctggcctacgagggcctgagcaagacctacctgtccaagacactggcccagtacacctccaagacatgcagcaactgtgggtttaccatcaccagcgccgactacgacagggtgctggagaagctgaagaagacagcaacaggctggatgaccacaattaacggcaaggagctgaaggtggagggccagattacctactacaacagatacaagagacagaacgtagtcaaggacctgtccgtcgagctggatagactgagcgaagaatctgtgaacaacgacatctcctcctggacaaagggcagaagcggagaagctctgagcctcctgaagaaaagattctcccatagacccgtgcaggagaagttcgtgtgcctgaactgcggcttcgagacacacgcagccgagcaagccgccctgaacatcgccagatcctggctgttcctgcggagccaggagtacaagaaataccagacaaacaagacaaccggcaacaccgataagagagccttcgtcgagacctggcagtccttttaccggaagaagcttaaggaggtgtggaaacctgccgtgcggtctggcggatctggcggaggctcctcaggaggaccccgtgaccttccaggacgtggccgtggtgttcacccaggagcagtggggctacctggaccccagccagaaggagctgtacagggacgtgatgctggagaactaccagaacctgctgtgcctgggcctggccgtgagcaagcccgaggtgatctgccagctggagcagggcgaggccccctggaggcccgagggcagggtgcccggcagcagccaccccgacggcgaggtgaggggatctggctccggcagcggccccaagaaaaagagaaaagtctaagctgccttctgcggggcttgccttctggccatgcccttcttctctcccttgcacctgtacctcttggtctttgaataaagcctgagtaggaaggctagcaaaaaaaaaaaaaaaaaaaaaaaaaaaaaaaaaaaaaaaaaaaaaaaaaaaaaaaaaaaaaaaaaaaaaaaaaaaaaaaa

SEQ ID NO: 16284 - RNA, 9485 nt, synthetic construct
  source 1..9485: mol_type = other RNA
aggaaataagagagaaaagaagagtaagaagaaatataagagccaccatggcccctaagaagaagcgtaaagtgagccggatggaacgcctcgtctacgaggtgcggcagaagtgcagaaacatcgaggacatctgcatctcctgcggatctctgaacgtgaccctggagcacccactgttcatcggcggcatgtgccagaactgtaaaaactgttttctggagtgtgcctatcaatacgacgatgacggctaccagagctactgcaccatctgttgcggcggaagagaggtgctgatgtgtggaaataacaactgctgccggtgcttctgcgtggaatgcgtggacctgctggtgggccccggcgccgcccaggccgctattaaggaagatccttggaactgctacatgtgcggccacaagggcacatacggcctgctgagacggagagaggactggcctagcagactgcagatgttcttcgccaataaccacgaccaggagttcgacccccctaaggtgtaccctcccgtccccgccgagaagagaaagcccatccgggtcctgagcctgttcgatggcatcgccaccggtctgctggtgctgaaggacctgggcatccaggtggataggtacattgcctccgaggtgtgcgaggactccatcaccgtgggaatggtgcgtcatcagggcaagatcatgtacgtgggcgacgtgcggagcgtgacacagaagcatatccaggagtggggccctttcgacctggtgatcggcggcagcccttgcaatgacctgagcatcgtgaacccagcccggaagggcctgtacgagggaaccggcagactgttcttcgagttttacagactgctgcacgacgcccggcctaaggaaggcgacgaccggcccttcttttggctgttcgagaatgtggtggccatgggagtcagcgacaagcgggatattagccggttcctggagagcaaccccgtgatgatcgatgccaaggaagtgagcgccgcccaccgggccagatacttctggggcaatctgcctggcatgaacagacccctggccagcaccgtgaacgacaagctggagctgcaggagtgcctggagcacggccggatcgccaagttcagcaaggtgagaaccatcaccacccgaagcaacagcatcaaacaaggcaaggaccagcactttcctgtgttcatgaacgagaaggaggacatcctgtggtgtaccgagatggagagagtgttcgggttcccagtccactacacagatgtcagcaacatgtctagactggccagacagagactgctgggaagaagctggtccgtccctgtgatcagacacctgttcgcccctctgaaggagtacttcgcctgcgtgagcagcggcaacagcaacgccaacagccggggccccagcttctctagcggcctggtgccactgtccctgagagggagccacatgggccccatggagatctacaaaaccgtgagcgcctggaagcggcagcctgtgcgcgtgctgagcctgtttcggaatatcgataaagtcctgaaaagcctgggattcctggagagcggctctggctccggcggtggcaccctgaagtacgtggaggatgtgacaaacgtggtcagacgggatgtggagaagtggggccccttcgatctggtgtacggcagcacccaacccctgggcagctcttgtgaccggtgccctggctggtacatgtttcagttccaccggatcctgcagtacgccctgccgagacaggagtcccagcggccattcttttggattttcatggacaacttgctgctgaccgaggatgaccaggaaactaccactcggttcctgcagaccgaagccgtgaccctgcaggacgtgagaggccgggactaccagaacgccatgcgggtgtggtccaacatccctggactgaaaagcaagcacgcacctctgacccctaaagaagaggagtacctgcaggcccaggtgcggagcagaagcaagctggacgcccctaaggtggatctgctggtgaagaattgcctcctgcccctgagagagtacttcaagtatttcagccagaatagtctgcccctgggaggcagcggcggcggcgccctggtgacatttgaggacgtcgccgtgcggttcacccaggaggaatgggctctgctggatccttctcagaaaatcctgtaccgggacgtgatgagagagacataccggaatctgacctccgtgggcatcaactgggaatgttgggaccttgaagcctgcttcagaagcctgggaagaaacctgagagtgcaggtggtgaagagaaagtgcgagctgaccaacagcggcccctgcgccgagggcggcccaagcagcggcgcccctcctcccagcggcggcagcccagccggctccccaacctctaccgaggagggcacctctgagtccgccacccccgagagcggccctggcacctccaccgagcccagcgagggcagcgcacccggcagccctgccggcagccccacctccacagaggagggaaccagcaccgagcccagcgaaggcagcgccccaggcaccagcaccgagcctagtgagcaggagattaaacggatcaacaagatcagaagaagacttgtgaaagacagcaacaccaagaaggccggcaagacaggccccatgaaaaccctgctggttagagtgatgacacccgatctgagagagcggctggaaaacctgagaaagaagcctgaaaatatcccccagcccatcagcaatacatctagagccaacctgaataagctgctgaccgattacaccgaaatgaagaaggcgatcctgcatgtgtactgggaagagttccagaaggaccctgtgggcctgatgagccgggtggcccagcctgccagcaagaagatcgatcagaacaagctgaaacctgagatggacgagaagggcaacctgaccaccgccggctttgcctgctctcagtgtggccagcccctgttcgtgtacaagctggagcaggtgtctgagaagggcaaggcttacaccaactacttcggacggtgcaatgtggccgagcacgaaaagctgatcctgctggcccagctgaagcccgagaaggatagcgacgaagccgtgacatatagcctgggaaagtttgggcagagggccctggatttctacagcattcatgtgaccaaggagtccacccaccccgtgaagcccctggcccagatcgccggaaacagatacgcctccggacctgtgggaaaggccctgagcgacgcatgtatgggcacaatcgcctccttcctgtctaagtaccaggacatcatcatcgaacaccagaaggtggtgaagggcaaccagaagagactggagagcctgcgggagctggccggcaaggaaaacctggaataccctagcgtgaccctgccacctcagcctcacaccaaggagggcgttgatgcctacaacgaagtgatcgcccgggtgcgaatgtgggtgaacctgaacctgtggcagaagctgaagctaagcagagatgatgccaagcctctgctgagactgaagggattcccttcctttcctctggtcgagagacaggccaacgaagtggactggtgggacatggtgtgtaacgtgaagaagctgatcaacgagaaaaaggaggatggcaaggtgttttggcagaatctggctggctacaagagacaggaagccctgagaccatacctgagcagcgaggaagatcggaagaagggaaagaaattcgctcggtaccagctgggcgacctgctgctgcacctggaaaagaagcacggcgaggactggggaaaggtgtacgacgaggcctgggagcggattgacaagaaagtggaaggcctgagcaagcacatcaagctggaagaggaacggagaagcgaggacgcccagagcaaggccgccctgaccgactggctgcgggctaaggccagcttcgtgatcgagggcctgaaggaggccgacaaggacgagttctgcagatgcgagctgaagctgcagaagtggtacggggacctgcggggaaagcccttcgccatcgaagccgagaacagcatcctggacatcagcggcttcagcaagcagtacaactgtgccttcatctggcagaaggacggcgtgaagaagctgaacctgtacctgatcatcaactacttcaagggcggcaagctgcggttcaagaagatcaaacctgaagccttcgaagccaacagattctacaccgtgatcaacaaaaagagcggcgagatcgtgcccatggaggtgaacttcaacttcgacgaccccaacctgatcatcctgcctctggcctttggcaagagacagggcagagaattcatctggaacgacctgctgtccctggaaaccggcagcctgaagctggccaacggaagagtgatcgagaagacactgtacaacagaagaacccggcaggatgagcctgccctgttcgtggccctgaccttcgagcggcgggaggtcctggactcctccaatatcaaaccaatgaacctgatcggcgtggcaagaggcgaaaacatccccgccgtgatcgccctgaccgaccccgagggctgcccactgagccggtttaaggatagcctgggaaacccaacccacatcctgagaatcggcgagagctataaggagaagcagcggaccatccaggccaagaaggaggtggagcagcggagagccggcggctacagccggaagtacgccagcaaagccaagaatctggcagacgatatggtgagaaacaccgctagagatctgctgtactacgccgtgacccaggatgccatgctgatcttcgccaacctgagccggggcttcggccggcagggcaagcggaccttcatggccgagagacagtacacacggatggaggactggctgaccgccaagctggcctacgagggcctgagcaagacctacctgtccaagacactggcccagtacacctccaagacatgcagcaactgtgggtttaccatcaccagcgccgactacgacagggtgctggagaagctgaagaagacagcaacaggctggatgaccacaattaacggcaaggagctgaaggtggagggccagattacctactacaacagatacaagagacagaacgtagtcaaggacctgtccgtcgagctggatagactgagcgaagaatctgtgaacaacgacatctcctcctggacaaagggcagaagcggagaagctctgagcctcctgaagaaaagattctcccatagacccgtgcaggagaagttcgtgtgcctgaactgcggcttcgagacacacgcagccgagcaagccgccctgaacatcgccagatcctggctgttcctgcggagccaggagtacaagaaataccagacaaacaagacaaccggcaacaccgataagagagccttcgtcgagacctggcagtccttttaccggaagaagcttaaggaggtgtggaaacctgccgtgcggtctggcggatctggcggaggctccatggacgccctgaccttcgacgacgtgcacgtgcacttcaccagggaggagtggagcctgctggaccccagccagaagaggctgtacaaggacgtgatgctggagatctacaagaacctgaccgccatcggctacaagtggaaggaccacaacgtgggcgagcacagccagaacgacaggaggtacggcaggcacgagaggagccccgccggcgagaaccacaacgagtacacccagtgcgacggcggcccaagcagcggcgcccctcctcccagcggcggcagcccagccggctccccaacctctaccgaggagggcacctctgagtccgccacccccgagagcggccctggcacctccaccgagcccagcgagggcagcgcacccggcagccctgccggcagccccacctccacagaggagggaaccagcaccgagcccagcgaaggcagcgccccaggcaccagcaccgagcctagtgagcaggagattaaacggatcaacaagatcagaagaagacttgtgaaagacagcaacaccaagaaggccggcaagacaggccccatgaaaaccctgctggttagagtgatgacacccgatctgagagagcggctggaaaacctgagaaagaagcctgaaaatatcccccagcccatcagcaatacatctagagccaacctgaataagctgctgaccgattacaccgaaatgaagaaggcgatcctgcatgtgtactgggaagagttccagaaggaccctgtgggcctgatgagccgggtggcccagcctgccagcaagaagatcgatcagaacaagctgaaacctgagatggacgagaagggcaacctgaccaccgccggctttgcctgctctcagtgtggccagcccctgttcgtgtacaagctggagcaggtgtctgagaagggcaaggcttacaccaactacttcggacggtgcaatgtggccgagcacgaaaagctgatcctgctggcccagctgaagcccgagaaggatagcgacgaagccgtgacatatagcctgggaaagtttgggcagagggccctggatttctacagcattcatgtgaccaaggagtccacccaccccgtgaagcccctggcccagatcgccggaaacagatacgcctccggacctgtgggaaaggccctgagcgacgcatgtatgggcacaatcgcctccttcctgtctaagtaccaggacatcatcatcgaacaccagaaggtggtgaagggcaaccagaagagactggagagcctgcgggagctggccggcaaggaaaacctggaataccctagcgtgaccctgccacctcagcctcacaccaaggagggcgttgatgcctacaacgaagtgatcgcccgggtgcgaatgtgggtgaacctgaacctgtggcagaagctgaagctaagcagagatgatgccaagcctctgctgagactgaagggattcccttcctttcctctggtcgagagacaggccaacgaagtggactggtgggacatggtgtgtaacgtgaagaagctgatcaacgagaaaaaggaggatggcaaggtgttttggcagaatctggctggctacaagagacaggaagccctgagaccatacctgagcagcgaggaagatcggaagaagggaaagaaattcgctcggtaccagctgggcgacctgctgctgcacctggaaaagaagcacggcgaggactggggaaaggtgtacgacgaggcctgggagcggattgacaagaaagtggaaggcctgagcaagcacatcaagctggaagaggaacggagaagcgaggacgcccagagcaaggccgccctgaccgactggctgcgggctaaggccagcttcgtgatcgagggcctgaaggaggccgacaaggacgagttctgcagatgcgagctgaagctgcagaagtggtacggggacctgcggggaaagcccttcgccatcgaagccgagaacagcatcctggacatcagcggcttcagcaagcagtacaactgtgccttcatctggcagaaggacggcgtgaagaagctgaacctgtacctgatcatcaactacttcaagggcggcaagctgcggttcaagaagatcaaacctgaagccttcgaagccaacagattctacaccgtgatcaacaaaaagagcggcgagatcgtgcccatggaggtgaacttcaacttcgacgaccccaacctgatcatcctgcctctggcctttggcaagagacagggcagagaattcatctggaacgacctgctgtccctggaaaccggcagcctgaagctggccaacggaagagtgatcgagaagacactgtacaacagaagaacccggcaggatgagcctgccctgttcgtggccctgaccttcgagcggcgggaggtcctggactcctccaatatcaaaccaatgaacctgatcggcgtggcaagaggcgaaaacatccccgccgtgatcgccctgaccgaccccgagggctgcccactgagccggtttaaggatagcctgggaaacccaacccacatcctgagaatcggcgagagctataaggagaagcagcggaccatccaggccaagaaggaggtggagcagcggagagccggcggctacagccggaagtacgccagcaaagccaagaatctggcagacgatatggtgagaaacaccgctagagatctgctgtactacgccgtgacccaggatgccatgctgatcttcgccaacctgagccggggcttcggccggcagggcaagcggaccttcatggccgagagacagtacacacggatggaggactggctgaccgccaagctggcctacgagggcctgagcaagacctacctgtccaagacactggcccagtacacctccaagacatgcagcaactgtgggtttaccatcaccagcgccgactacgacagggtgctggagaagctgaagaagacagcaacaggctggatgaccacaattaacggcaaggagctgaaggtggagggccagattacctactacaacagatacaagagacagaacgtagtcaaggacctgtccgtcgagctggatagactgagcgaagaatctgtgaacaacgacatctcctcctggacaaagggcagaagcggagaagctctgagcctcctgaagaaaagattctcccatagacccgtgcaggagaagttcgtgtgcctgaactgcggcttcgagacacacgcagccgagcaagccgccctgaacatcgccagatcctggctgttcctgcggagccaggagtacaagaaataccagacaaacaagacaaccggcaacaccgataagagagccttcgtcgagacctggcagtccttttaccggaagaagcttaaggaggtgtggaaacctgccgtgcggtctggcggatctggcggaggctcctatggacgccctgaccttcgacgacgtgcacgtgcacttcaccagggaggagtggagcctgctggaccccagccagaagaggctgtacaaggacgtgatgctggagatctacaagaacctgaccgccatcggctacaagtggaaggaccacaacgtgggcgagcacagccagaacgacaggaggtacggcaggcacgagaggagccccgccggcgagaaccacaacgagtacacccagtgcgacggatctggctccggcagcggccccaagaaaaagagaaaagtctaagctgccttctgcggggcttgccttctggccatgcccttcttctctcccttgcacctgtacctcttggtctttgaataaagcctgagtaggaaggctagcaaaaaaaaaaaaaaaaaaaaaaaaaaaaaaaaaaaaaaaaaaaaaaaaaaaaaaaaaaaaaaaaaaaaaaaaaaaaaaaa

SEQ ID NO: 16285 - RNA, 9485 nt, synthetic construct
  source 1..9485: mol_type = other RNA
aggaaataagagagaaaagaagagtaagaagaaatataagagccaccatggcccctaagaagaagcgtaaagtgagccggatggaacgcctcgtctacgaggtgcggcagaagtgcagaaacatcgaggacatctgcatctcctgcggatctctgaacgtgaccctggagcacccactgttcatcggcggcatgtgccagaactgtaaaaactgttttctggagtgtgcctatcaatacgacgatgacggctaccagagctactgcaccatctgttgcggcggaagagaggtgctgatgtgtggaaataacaactgctgccggtgcttctgcgtggaatgcgtggacctgctggtgggccccggcgccgcccaggccgctattaaggaagatccttggaactgctacatgtgcggccacaagggcacatacggcctgctgagacggagagaggactggcctagcagactgcagatgttcttcgccaataaccacgaccaggagttcgacccccctaaggtgtaccctcccgtccccgccgagaagagaaagcccatccgggtcctgagcctgttcgatggcatcgccaccggtctgctggtgctgaaggacctgggcatccaggtggataggtacattgcctccgaggtgtgcgaggactccatcaccgtgggaatggtgcgtcatcagggcaagatcatgtacgtgggcgacgtgcggagcgtgacacagaagcatatccaggagtggggccctttcgacctggtgatcggcggcagcccttgcaatgacctgagcatcgtgaacccagcccggaagggcctgtacgagggaaccggcagactgttcttcgagttttacagactgctgcacgacgcccggcctaaggaaggcgacgaccggcccttcttttggctgttcgagaatgtggtggccatgggagtcagcgacaagcgggatattagccggttcctggagagcaaccccgtgatgatcgatgccaaggaagtgagcgccgcccaccgggccagatacttctggggcaatctgcctggcatgaacagacccctggccagcaccgtgaacgacaagctggagctgcaggagtgcctggagcacggccggatcgccaagttcagcaaggtgagaaccatcaccacccgaagcaacagcatcaaacaaggcaaggaccagcactttcctgtgttcatgaacgagaaggaggacatcctgtggtgtaccgagatggagagagtgttcgggttcccagtccactacacagatgtcagcaacatgtctagactggccagacagagactgctgggaagaagctggtccgtccctgtgatcagacacctgttcgcccctctgaaggagtacttcgcctgcgtgagcagcggcaacagcaacgccaacagccggggccccagcttctctagcggcctggtgccactgtccctgagagggagccacatgggccccatggagatctacaaaaccgtgagcgcctggaagcggcagcctgtgcgcgtgctgagcctgtttcggaatatcgataaagtcctgaaaagcctgggattcctggagagcggctctggctccggcggtggcaccctgaagtacgtggaggatgtgacaaacgtggtcagacgggatgtggagaagtggggccccttcgatctggtgtacggcagcacccaacccctgggcagctcttgtgaccggtgccctggctggtacatgtttcagttccaccggatcctgcagtacgccctgccgagacaggagtcccagcggccattcttttggattttcatggacaacttgctgctgaccgaggatgaccaggaaactaccactcggttcctgcagaccgaagccgtgaccctgcaggacgtgagaggccgggactaccagaacgccatgcgggtgtggtccaacatccctggactgaaaagcaagcacgcacctctgacccctaaagaagaggagtacctgcaggcccaggtgcggagcagaagcaagctggacgcccctaaggtggatctgctggtgaagaattgcctcctgcccctgagagagtacttcaagtatttcagccagaatagtctgcccctgggaggcagcggcggcggcgccctggtgacatttgaggacgtcgccgtgcggttcacccaggaggaatgggctctgctggatccttctcagaaaatcctgtaccgggacgtgatgagagagacataccggaatctgacctccgtgggcatcaactgggaatgttgggaccttgaagcctgcttcagaagcctgggaagaaacctgagagtgcaggtggtgaagagaaagtgcgagctgaccaacagcggcccctgcgccgagggcggcccaagcagcggcgcccctcctcccagcggcggcagcccagccggctccccaacctctaccgaggagggcacctctgagtccgccacccccgagagcggccctggcacctccaccgagcccagcgagggcagcgcacccggcagccctgccggcagccccacctccacagaggagggaaccagcaccgagcccagcgaaggcagcgccccaggcaccagcaccgagcctagtgagcaggagattaaacggatcaacaagatcagaagaagacttgtgaaagacagcaacaccaagaaggccggcaagacaggccccatgaaaaccctgctggttagagtgatgacacccgatctgagagagcggctggaaaacctgagaaagaagcctgaaaatatcccccagcccatcagcaatacatctagagccaacctgaataagctgctgaccgattacaccgaaatgaagaaggcgatcctgcatgtgtactgggaagagttccagaaggaccctgtgggcctgatgagccgggtggcccagcctgccagcaagaagatcgatcagaacaagctgaaacctgagatggacgagaagggcaacctgaccaccgccggctttgcctgctctcagtgtggccagcccctgttcgtgtacaagctggagcaggtgtctgagaagggcaaggcttacaccaactacttcggacggtgcaatgtggccgagcacgaaaagctgatcctgctggcccagctgaagcccgagaaggatagcgacgaagccgtgacatatagcctgggaaagtttgggcagagggccctggatttctacagcattcatgtgaccaaggagtccacccaccccgtgaagcccctggcccagatcgccggaaacagatacgcctccggacctgtgggaaaggccctgagcgacgcatgtatgggcacaatcgcctccttcctgtctaagtaccaggacatcatcatcgaacaccagaaggtggtgaagggcaaccagaagagactggagagcctgcgggagctggccggcaaggaaaacctggaataccctagcgtgaccctgccacctcagcctcacaccaaggagggcgttgatgcctacaacgaagtgatcgcccgggtgcgaatgtgggtgaacctgaacctgtggcagaagctgaagctaagcagagatgatgccaagcctctgctgagactgaagggattcccttcctttcctctggtcgagagacaggccaacgaagtggactggtgggacatggtgtgtaacgtgaagaagctgatcaacgagaaaaaggaggatggcaaggtgttttggcagaatctggctggctacaagagacaggaagccctgagaccatacctgagcagcgaggaagatcggaagaagggaaagaaattcgctcggtaccagctgggcgacctgctgctgcacctggaaaagaagcacggcgaggactggggaaaggtgtacgacgaggcctgggagcggattgacaagaaagtggaaggcctgagcaagcacatcaagctggaagaggaacggagaagcgaggacgcccagagcaaggccgccctgaccgactggctgcgggctaaggccagcttcgtgatcgagggcctgaaggaggccgacaaggacgagttctgcagatgcgagctgaagctgcagaagtggtacggggacctgcggggaaagcccttcgccatcgaagccgagaacagcatcctggacatcagcggcttcagcaagcagtacaactgtgccttcatctggcagaaggacggcgtgaagaagctgaacctgtacctgatcatcaactacttcaagggcggcaagctgcggttcaagaagatcaaacctgaagccttcgaagccaacagattctacaccgtgatcaacaaaaagagcggcgagatcgtgcccatggaggtgaacttcaacttcgacgaccccaacctgatcatcctgcctctggcctttggcaagagacagggcagagaattcatctggaacgacctgctgtccctggaaaccggcagcctgaagctggccaacggaagagtgatcgagaagacactgtacaacagaagaacccggcaggatgagcctgccctgttcgtggccctgaccttcgagcggcgggaggtcctggactcctccaatatcaaaccaatgaacctgatcggcgtggcaagaggcgaaaacatccccgccgtgatcgccctgaccgaccccgagggctgcccactgagccggtttaaggatagcctgggaaacccaacccacatcctgagaatcggcgagagctataaggagaagcagcggaccatccaggccaagaaggaggtggagcagcggagagccggcggctacagccggaagtacgccagcaaagccaagaatctggcagacgatatggtgagaaacaccgctagagatctgctgtactacgccgtgacccaggatgccatgctgatcttcgccaacctgagccggggcttcggccggcagggcaagcggaccttcatggccgagagacagtacacacggatggaggactggctgaccgccaagctggcctacgagggcctgagcaagacctacctgtccaagacactggcccagtacacctccaagacatgcagcaactgtgggtttaccatcaccagcgccgactacgacagggtgctggagaagctgaagaagacagcaacaggctggatgaccacaattaacggcaaggagctgaaggtggagggccagattacctactacaacagatacaagagacagaacgtagtcaaggacctgtccgtcgagctggatagactgagcgaagaatctgtgaacaacgacatctcctcctggacaaagggcagaagcggagaagctctgagcctcctgaagaaaagattctcccatagacccgtgcaggagaagttcgtgtgcctgaactgcggcttcgagacacacgcagccgagcaagccgccctgaacatcgccagatcctggctgttcctgcggagccaggagtacaagaaataccagacaaacaagacaaccggcaacaccgataagagagccttcgtcgagacctggcagtccttttaccggaagaagcttaaggaggtgtggaaacctgccgtgcggtctggcggatctggcggaggctccagccaggagagcctgaccttcaaggacgtggccgtggacttcacccaggaggagtggggcaagctggacagcggccagaggtacctgtacagggacgtgatgctggagaactacaggaacctggtgagcctgggccaccagggcagcaagccctacgtgatcagccagctggagcagggccaggagccctggatcgtggagagggagatcagcaggggcaactgcaaggactggggcaccaggggcggcccaagcagcggcgcccctcctcccagcggcggcagcccagccggctccccaacctctaccgaggagggcacctctgagtccgccacccccgagagcggccctggcacctccaccgagcccagcgagggcagcgcacccggcagccctgccggcagccccacctccacagaggagggaaccagcaccgagcccagcgaaggcagcgccccaggcaccagcaccgagcctagtgagcaggagattaaacggatcaacaagatcagaagaagacttgtgaaagacagcaacaccaagaaggccggcaagacaggccccatgaaaaccctgctggttagagtgatgacacccgatctgagagagcggctggaaaacctgagaaagaagcctgaaaatatcccccagcccatcagcaatacatctagagccaacctgaataagctgctgaccgattacaccgaaatgaagaaggcgatcctgcatgtgtactgggaagagttccagaaggaccctgtgggcctgatgagccgggtggcccagcctgccagcaagaagatcgatcagaacaagctgaaacctgagatggacgagaagggcaacctgaccaccgccggctttgcctgctctcagtgtggccagcccctgttcgtgtacaagctggagcaggtgtctgagaagggcaaggcttacaccaactacttcggacggtgcaatgtggccgagcacgaaaagctgatcctgctggcccagctgaagcccgagaaggatagcgacgaagccgtgacatatagcctgggaaagtttgggcagagggccctggatttctacagcattcatgtgaccaaggagtccacccaccccgtgaagcccctggcccagatcgccggaaacagatacgcctccggacctgtgggaaaggccctgagcgacgcatgtatgggcacaatcgcctccttcctgtctaagtaccaggacatcatcatcgaacaccagaaggtggtgaagggcaaccagaagagactggagagcctgcgggagctggccggcaaggaaaacctggaataccctagcgtgaccctgccacctcagcctcacaccaaggagggcgttgatgcctacaacgaagtgatcgcccgggtgcgaatgtgggtgaacctgaacctgtggcagaagctgaagctaagcagagatgatgccaagcctctgctgagactgaagggattcccttcctttcctctggtcgagagacaggccaacgaagtggactggtgggacatggtgtgtaacgtgaagaagctgatcaacgagaaaaaggaggatggcaaggtgttttggcagaatctggctggctacaagagacaggaagccctgagaccatacctgagcagcgaggaagatcggaagaagggaaagaaattcgctcggtaccagctgggcgacctgctgctgcacctggaaaagaagcacggcgaggactggggaaaggtgtacgacgaggcctgggagcggattgacaagaaagtggaaggcctgagcaagcacatcaagctggaagaggaacggagaagcgaggacgcccagagcaaggccgccctgaccgactggctgcgggctaaggccagcttcgtgatcgagggcctgaaggaggccgacaaggacgagttctgcagatgcgagctgaagctgcagaagtggtacggggacctgcggggaaagcccttcgccatcgaagccgagaacagcatcctggacatcagcggcttcagcaagcagtacaactgtgccttcatctggcagaaggacggcgtgaagaagctgaacctgtacctgatcatcaactacttcaagggcggcaagctgcggttcaagaagatcaaacctgaagccttcgaagccaacagattctacaccgtgatcaacaaaaagagcggcgagatcgtgcccatggaggtgaacttcaacttcgacgaccccaacctgatcatcctgcctctggcctttggcaagagacagggcagagaattcatctggaacgacctgctgtccctggaaaccggcagcctgaagctggccaacggaagagtgatcgagaagacactgtacaacagaagaacccggcaggatgagcctgccctgttcgtggccctgaccttcgagcggcgggaggtcctggactcctccaatatcaaaccaatgaacctgatcggcgtggcaagaggcgaaaacatccccgccgtgatcgccctgaccgaccccgagggctgcccactgagccggtttaaggatagcctgggaaacccaacccacatcctgagaatcggcgagagctataaggagaagcagcggaccatccaggccaagaaggaggtggagcagcggagagccggcggctacagccggaagtacgccagcaaagccaagaatctggcagacgatatggtgagaaacaccgctagagatctgctgtactacgccgtgacccaggatgccatgctgatcttcgccaacctgagccggggcttcggccggcagggcaagcggaccttcatggccgagagacagtacacacggatggaggactggctgaccgccaagctggcctacgagggcctgagcaagacctacctgtccaagacactggcccagtacacctccaagacatgcagcaactgtgggtttaccatcaccagcgccgactacgacagggtgctggagaagctgaagaagacagcaacaggctggatgaccacaattaacggcaaggagctgaaggtggagggccagattacctactacaacagatacaagagacagaacgtagtcaaggacctgtccgtcgagctggatagactgagcgaagaatctgtgaacaacgacatctcctcctggacaaagggcagaagcggagaagctctgagcctcctgaagaaaagattctcccatagacccgtgcaggagaagttcgtgtgcctgaactgcggcttcgagacacacgcagccgagcaagccgccctgaacatcgccagatcctggctgttcctgcggagccaggagtacaagaaataccagacaaacaagacaaccggcaacaccgataagagagccttcgtcgagacctggcagtccttttaccggaagaagcttaaggaggtgtggaaacctgccgtgcggtctggcggatctggcggaggctcctagccaggagagcctgaccttcaaggacgtggccgtggacttcacccaggaggagtggggcaagctggacagcggccagaggtacctgtacagggacgtgatgctggagaactacaggaacctggtgagcctgggccaccagggcagcaagccctacgtgatcagccagctggagcagggccaggagccctggatcgtggagagggagatcagcaggggcaactgcaaggactggggcaccaggggatctggctccggcagcggccccaagaaaaagagaaaagtctaagctgccttctgcggggcttgccttctggccatgcccttcttctctcccttgcacctgtacctcttggtctttgaataaagcctgagtaggaaggctagcaaaaaaaaaaaaaaaaaaaaaaaaaaaaaaaaaaaaaaaaaaaaaaaaaaaaaaaaaaaaaaaaaaaaaaaaaaaaaaaa

SEQ ID NO: 16286 - RNA, 9485 nt, synthetic construct
  source 1..9485: mol_type = other RNA
aggaaataagagagaaaagaagagtaagaagaaatataagagccaccatggcccctaagaagaagcgtaaagtgagccggatggaacgcctcgtctacgaggtgcggcagaagtgcagaaacatcgaggacatctgcatctcctgcggatctctgaacgtgaccctggagcacccactgttcatcggcggcatgtgccagaactgtaaaaactgttttctggagtgtgcctatcaatacgacgatgacggctaccagagctactgcaccatctgttgcggcggaagagaggtgctgatgtgtggaaataacaactgctgccggtgcttctgcgtggaatgcgtggacctgctggtgggccccggcgccgcccaggccgctattaaggaagatccttggaactgctacatgtgcggccacaagggcacatacggcctgctgagacggagagaggactggcctagcagactgcagatgttcttcgccaataaccacgaccaggagttcgacccccctaaggtgtaccctcccgtccccgccgagaagagaaagcccatccgggtcctgagcctgttcgatggcatcgccaccggtctgctggtgctgaaggacctgggcatccaggtggataggtacattgcctccgaggtgtgcgaggactccatcaccgtgggaatggtgcgtcatcagggcaagatcatgtacgtgggcgacgtgcggagcgtgacacagaagcatatccaggagtggggccctttcgacctggtgatcggcggcagcccttgcaatgacctgagcatcgtgaacccagcccggaagggcctgtacgagggaaccggcagactgttcttcgagttttacagactgctgcacgacgcccggcctaaggaaggcgacgaccggcccttcttttggctgttcgagaatgtggtggccatgggagtcagcgacaagcgggatattagccggttcctggagagcaaccccgtgatgatcgatgccaaggaagtgagcgccgcccaccgggccagatacttctggggcaatctgcctggcatgaacagacccctggccagcaccgtgaacgacaagctggagctgcaggagtgcctggagcacggccggatcgccaagttcagcaaggtgagaaccatcaccacccgaagcaacagcatcaaacaaggcaaggaccagcactttcctgtgttcatgaacgagaaggaggacatcctgtggtgtaccgagatggagagagtgttcgggttcccagtccactacacagatgtcagcaacatgtctagactggccagacagagactgctgggaagaagctggtccgtccctgtgatcagacacctgttcgcccctctgaaggagtacttcgcctgcgtgagcagcggcaacagcaacgccaacagccggggccccagcttctctagcggcctggtgccactgtccctgagagggagccacatgggccccatggagatctacaaaaccgtgagcgcctggaagcggcagcctgtgcgcgtgctgagcctgtttcggaatatcgataaagtcctgaaaagcctgggattcctggagagcggctctggctccggcggtggcaccctgaagtacgtggaggatgtgacaaacgtggtcagacgggatgtggagaagtggggccccttcgatctggtgtacggcagcacccaacccctgggcagctcttgtgaccggtgccctggctggtacatgtttcagttccaccggatcctgcagtacgccctgccgagacaggagtcccagcggccattcttttggattttcatggacaacttgctgctgaccgaggatgaccaggaaactaccactcggttcctgcagaccgaagccgtgaccctgcaggacgtgagaggccgggactaccagaacgccatgcgggtgtggtccaacatccctggactgaaaagcaagcacgcacctctgacccctaaagaagaggagtacctgcaggcccaggtgcggagcagaagcaagctggacgcccctaaggtggatctgctggtgaagaattgcctcctgcccctgagagagtacttcaagtatttcagccagaatagtctgcccctgggaggcagcggcggcggcgccctggtgacatttgaggacgtcgccgtgcggttcacccaggaggaatgggctctgctggatccttctcagaaaatcctgtaccgggacgtgatgagagagacataccggaatctgacctccgtgggcatcaactgggaatgttgggaccttgaagcctgcttcagaagcctgggaagaaacctgagagtgcaggtggtgaagagaaagtgcgagctgaccaacagcggcccctgcgccgagggcggcccaagcagcggcgcccctcctcccagcggcggcagcccagccggctccccaacctctaccgaggagggcacctctgagtccgccacccccgagagcggccctggcacctccaccgagcccagcgagggcagcgcacccggcagccctgccggcagccccacctccacagaggagggaaccagcaccgagcccagcgaaggcagcgccccaggcaccagcaccgagcctagtgagcaggagattaaacggatcaacaagatcagaagaagacttgtgaaagacagcaacaccaagaaggccggcaagacaggccccatgaaaaccctgctggttagagtgatgacacccgatctgagagagcggctggaaaacctgagaaagaagcctgaaaatatcccccagcccatcagcaatacatctagagccaacctgaataagctgctgaccgattacaccgaaatgaagaaggcgatcctgcatgtgtactgggaagagttccagaaggaccctgtgggcctgatgagccgggtggcccagcctgccagcaagaagatcgatcagaacaagctgaaacctgagatggacgagaagggcaacctgaccaccgccggctttgcctgctctcagtgtggccagcccctgttcgtgtacaagctggagcaggtgtctgagaagggcaaggcttacaccaactacttcggacggtgcaatgtggccgagcacgaaaagctgatcctgctggcccagctgaagcccgagaaggatagcgacgaagccgtgacatatagcctgggaaagtttgggcagagggccctggatttctacagcattcatgtgaccaaggagtccacccaccccgtgaagcccctggcccagatcgccggaaacagatacgcctccggacctgtgggaaaggccctgagcgacgcatgtatgggcacaatcgcctccttcctgtctaagtaccaggacatcatcatcgaacaccagaaggtggtgaagggcaaccagaagagactggagagcctgcgggagctggccggcaaggaaaacctggaataccctagcgtgaccctgccacctcagcctcacaccaaggagggcgttgatgcctacaacgaagtgatcgcccgggtgcgaatgtgggtgaacctgaacctgtggcagaagctgaagctaagcagagatgatgccaagcctctgctgagactgaagggattcccttcctttcctctggtcgagagacaggccaacgaagtggactggtgggacatggtgtgtaacgtgaagaagctgatcaacgagaaaaaggaggatggcaaggtgttttggcagaatctggctggctacaagagacaggaagccctgagaccatacctgagcagcgaggaagatcggaagaagggaaagaaattcgctcggtaccagctgggcgacctgctgctgcacctggaaaagaagcacggcgaggactggggaaaggtgtacgacgaggcctgggagcggattgacaagaaagtggaaggcctgagcaagcacatcaagctggaagaggaacggagaagcgaggacgcccagagcaaggccgccctgaccgactggctgcgggctaaggccagcttcgtgatcgagggcctgaaggaggccgacaaggacgagttctgcagatgcgagctgaagctgcagaagtggtacggggacctgcggggaaagcccttcgccatcgaagccgagaacagcatcctggacatcagcggcttcagcaagcagtacaactgtgccttcatctggcagaaggacggcgtgaagaagctgaacctgtacctgatcatcaactacttcaagggcggcaagctgcggttcaagaagatcaaacctgaagccttcgaagccaacagattctacaccgtgatcaacaaaaagagcggcgagatcgtgcccatggaggtgaacttcaacttcgacgaccccaacctgatcatcctgcctctggcctttggcaagagacagggcagagaattcatctggaacgacctgctgtccctggaaaccggcagcctgaagctggccaacggaagagtgatcgagaagacactgtacaacagaagaacccggcaggatgagcctgccctgttcgtggccctgaccttcgagcggcgggaggtcctggactcctccaatatcaaaccaatgaacctgatcggcgtggcaagaggcgaaaacatccccgccgtgatcgccctgaccgaccccgagggctgcccactgagccggtttaaggatagcctgggaaacccaacccacatcctgagaatcggcgagagctataaggagaagcagcggaccatccaggccaagaaggaggtggagcagcggagagccggcggctacagccggaagtacgccagcaaagccaagaatctggcagacgatatggtgagaaacaccgctagagatctgctgtactacgccgtgacccaggatgccatgctgatcttcgccaacctgagccggggcttcggccggcagggcaagcggaccttcatggccgagagacagtacacacggatggaggactggctgaccgccaagctggcctacgagggcctgagcaagacctacctgtccaagacactggcccagtacacctccaagacatgcagcaactgtgggtttaccatcaccagcgccgactacgacagggtgctggagaagctgaagaagacagcaacaggctggatgaccacaattaacggcaaggagctgaaggtggagggccagattacctactacaacagatacaagagacagaacgtagtcaaggacctgtccgtcgagctggatagactgagcgaagaatctgtgaacaacgacatctcctcctggacaaagggcagaagcggagaagctctgagcctcctgaagaaaagattctcccatagacccgtgcaggagaagttcgtgtgcctgaactgcggcttcgagacacacgcagccgagcaagccgccctgaacatcgccagatcctggctgttcctgcggagccaggagtacaagaaataccagacaaacaagacaaccggcaacaccgataagagagccttcgtcgagacctggcagtccttttaccggaagaagcttaaggaggtgtggaaacctgccgtgcggtctggcggatctggcggaggctccctgcagggcctgctgaccttcagggacgtggccatcgagttcagccaggacgagtggggctgcctgaaccagagccagagggagctgtacagggacgtgatgctggagacctacggccacctgctgttcctgggcctgatcgtgagcaagccccacctggtgatcttcctggagcagaagagggagctgtgggacgtgaagaggaagaagaccgtgaggacccagaagggcgagaacaccagcggcggcccaagcagcggcgcccctcctcccagcggcggcagcccagccggctccccaacctctaccgaggagggcacctctgagtccgccacccccgagagcggccctggcacctccaccgagcccagcgagggcagcgcacccggcagccctgccggcagccccacctccacagaggagggaaccagcaccgagcccagcgaaggcagcgccccaggcaccagcaccgagcctagtgagcaggagattaaacggatcaacaagatcagaagaagacttgtgaaagacagcaacaccaagaaggccggcaagacaggccccatgaaaaccctgctggttagagtgatgacacccgatctgagagagcggctggaaaacctgagaaagaagcctgaaaatatcccccagcccatcagcaatacatctagagccaacctgaataagctgctgaccgattacaccgaaatgaagaaggcgatcctgcatgtgtactgggaagagttccagaaggaccctgtgggcctgatgagccgggtggcccagcctgccagcaagaagatcgatcagaacaagctgaaacctgagatggacgagaagggcaacctgaccaccgccggctttgcctgctctcagtgtggccagcccctgttcgtgtacaagctggagcaggtgtctgagaagggcaaggcttacaccaactacttcggacggtgcaatgtggccgagcacgaaaagctgatcctgctggcccagctgaagcccgagaaggatagcgacgaagccgtgacatatagcctgggaaagtttgggcagagggccctggatttctacagcattcatgtgaccaaggagtccacccaccccgtgaagcccctggcccagatcgccggaaacagatacgcctccggacctgtgggaaaggccctgagcgacgcatgtatgggcacaatcgcctccttcctgtctaagtaccaggacatcatcatcgaacaccagaaggtggtgaagggcaaccagaagagactggagagcctgcgggagctggccggcaaggaaaacctggaataccctagcgtgaccctgccacctcagcctcacaccaaggagggcgttgatgcctacaacgaagtgatcgcccgggtgcgaatgtgggtgaacctgaacctgtggcagaagctgaagctaagcagagatgatgccaagcctctgctgagactgaagggattcccttcctttcctctggtcgagagacaggccaacgaagtggactggtgggacatggtgtgtaacgtgaagaagctgatcaacgagaaaaaggaggatggcaaggtgttttggcagaatctggctggctacaagagacaggaagccctgagaccatacctgagcagcgaggaagatcggaagaagggaaagaaattcgctcggtaccagctgggcgacctgctgctgcacctggaaaagaagcacggcgaggactggggaaaggtgtacgacgaggcctgggagcggattgacaagaaagtggaaggcctgagcaagcacatcaagctggaagaggaacggagaagcgaggacgcccagagcaaggccgccctgaccgactggctgcgggctaaggccagcttcgtgatcgagggcctgaaggaggccgacaaggacgagttctgcagatgcgagctgaagctgcagaagtggtacggggacctgcggggaaagcccttcgccatcgaagccgagaacagcatcctggacatcagcggcttcagcaagcagtacaactgtgccttcatctggcagaaggacggcgtgaagaagctgaacctgtacctgatcatcaactacttcaagggcggcaagctgcggttcaagaagatcaaacctgaagccttcgaagccaacagattctacaccgtgatcaacaaaaagagcggcgagatcgtgcccatggaggtgaacttcaacttcgacgaccccaacctgatcatcctgcctctggcctttggcaagagacagggcagagaattcatctggaacgacctgctgtccctggaaaccggcagcctgaagctggccaacggaagagtgatcgagaagacactgtacaacagaagaacccggcaggatgagcctgccctgttcgtggccctgaccttcgagcggcgggaggtcctggactcctccaatatcaaaccaatgaacctgatcggcgtggcaagaggcgaaaacatccccgccgtgatcgccctgaccgaccccgagggctgcccactgagccggtttaaggatagcctgggaaacccaacccacatcctgagaatcggcgagagctataaggagaagcagcggaccatccaggccaagaaggaggtggagcagcggagagccggcggctacagccggaagtacgccagcaaagccaagaatctggcagacgatatggtgagaaacaccgctagagatctgctgtactacgccgtgacccaggatgccatgctgatcttcgccaacctgagccggggcttcggccggcagggcaagcggaccttcatggccgagagacagtacacacggatggaggactggctgaccgccaagctggcctacgagggcctgagcaagacctacctgtccaagacactggcccagtacacctccaagacatgcagcaactgtgggtttaccatcaccagcgccgactacgacagggtgctggagaagctgaagaagacagcaacaggctggatgaccacaattaacggcaaggagctgaaggtggagggccagattacctactacaacagatacaagagacagaacgtagtcaaggacctgtccgtcgagctggatagactgagcgaagaatctgtgaacaacgacatctcctcctggacaaagggcagaagcggagaagctctgagcctcctgaagaaaagattctcccatagacccgtgcaggagaagttcgtgtgcctgaactgcggcttcgagacacacgcagccgagcaagccgccctgaacatcgccagatcctggctgttcctgcggagccaggagtacaagaaataccagacaaacaagacaaccggcaacaccgataagagagccttcgtcgagacctggcagtccttttaccggaagaagcttaaggaggtgtggaaacctgccgtgcggtctggcggatctggcggaggctcctctgcagggcctgctgaccttcagggacgtggccatcgagttcagccaggacgagtggggctgcctgaaccagagccagagggagctgtacagggacgtgatgctggagacctacggccacctgctgttcctgggcctgatcgtgagcaagccccacctggtgatcttcctggagcagaagagggagctgtgggacgtgaagaggaagaagaccgtgaggacccagaagggcgagaacaccagcggatctggctccggcagcggccccaagaaaaagagaaaagtctaagctgccttctgcggggcttgccttctggccatgcccttcttctctcccttgcacctgtacctcttggtctttgaataaagcctgagtaggaaggctagcaaaaaaaaaaaaaaaaaaaaaaaaaaaaaaaaaaaaaaaaaaaaaaaaaaaaaaaaaaaaaaaaaaaaaaaaaaaaaaaa

SEQ ID NO: 16287 - RNA, 9485 nt, synthetic construct
  source 1..9485: mol_type = other RNA
aggaaataagagagaaaagaagagtaagaagaaatataagagccaccatggcccctaagaagaagcgtaaagtgagccggatggaacgcctcgtctacgaggtgcggcagaagtgcagaaacatcgaggacatctgcatctcctgcggatctctgaacgtgaccctggagcacccactgttcatcggcggcatgtgccagaactgtaaaaactgttttctggagtgtgcctatcaatacgacgatgacggctaccagagctactgcaccatctgttgcggcggaagagaggtgctgatgtgtggaaataacaactgctgccggtgcttctgcgtggaatgcgtggacctgctggtgggccccggcgccgcccaggccgctattaaggaagatccttggaactgctacatgtgcggccacaagggcacatacggcctgctgagacggagagaggactggcctagcagactgcagatgttcttcgccaataaccacgaccaggagttcgacccccctaaggtgtaccctcccgtccccgccgagaagagaaagcccatccgggtcctgagcctgttcgatggcatcgccaccggtctgctggtgctgaaggacctgggcatccaggtggataggtacattgcctccgaggtgtgcgaggactccatcaccgtgggaatggtgcgtcatcagggcaagatcatgtacgtgggcgacgtgcggagcgtgacacagaagcatatccaggagtggggccctttcgacctggtgatcggcggcagcccttgcaatgacctgagcatcgtgaacccagcccggaagggcctgtacgagggaaccggcagactgttcttcgagttttacagactgctgcacgacgcccggcctaaggaaggcgacgaccggcccttcttttggctgttcgagaatgtggtggccatgggagtcagcgacaagcgggatattagccggttcctggagagcaaccccgtgatgatcgatgccaaggaagtgagcgccgcccaccgggccagatacttctggggcaatctgcctggcatgaacagacccctggccagcaccgtgaacgacaagctggagctgcaggagtgcctggagcacggccggatcgccaagttcagcaaggtgagaaccatcaccacccgaagcaacagcatcaaacaaggcaaggaccagcactttcctgtgttcatgaacgagaaggaggacatcctgtggtgtaccgagatggagagagtgttcgggttcccagtccactacacagatgtcagcaacatgtctagactggccagacagagactgctgggaagaagctggtccgtccctgtgatcagacacctgttcgcccctctgaaggagtacttcgcctgcgtgagcagcggcaacagcaacgccaacagccggggccccagcttctctagcggcctggtgccactgtccctgagagggagccacatgggccccatggagatctacaaaaccgtgagcgcctggaagcggcagcctgtgcgcgtgctgagcctgtttcggaatatcgataaagtcctgaaaagcctgggattcctggagagcggctctggctccggcggtggcaccctgaagtacgtggaggatgtgacaaacgtggtcagacgggatgtggagaagtggggccccttcgatctggtgtacggcagcacccaacccctgggcagctcttgtgaccggtgccctggctggtacatgtttcagttccaccggatcctgcagtacgccctgccgagacaggagtcccagcggccattcttttggattttcatggacaacttgctgctgaccgaggatgaccaggaaactaccactcggttcctgcagaccgaagccgtgaccctgcaggacgtgagaggccgggactaccagaacgccatgcgggtgtggtccaacatccctggactgaaaagcaagcacgcacctctgacccctaaagaagaggagtacctgcaggcccaggtgcggagcagaagcaagctggacgcccctaaggtggatctgctggtgaagaattgcctcctgcccctgagagagtacttcaagtatttcagccagaatagtctgcccctgggaggcagcggcggcggcgccctggtgacatttgaggacgtcgccgtgcggttcacccaggaggaatgggctctgctggatccttctcagaaaatcctgtaccgggacgtgatgagagagacataccggaatctgacctccgtgggcatcaactgggaatgttgggaccttgaagcctgcttcagaagcctgggaagaaacctgagagtgcaggtggtgaagagaaagtgcgagctgaccaacagcggcccctgcgccgagggcggcccaagcagcggcgcccctcctcccagcggcggcagcccagccggctccccaacctctaccgaggagggcacctctgagtccgccacccccgagagcggccctggcacctccaccgagcccagcgagggcagcgcacccggcagccctgccggcagccccacctccacagaggagggaaccagcaccgagcccagcgaaggcagcgccccaggcaccagcaccgagcctagtgagcaggagattaaacggatcaacaagatcagaagaagacttgtgaaagacagcaacaccaagaaggccggcaagacaggccccatgaaaaccctgctggttagagtgatgacacccgatctgagagagcggctggaaaacctgagaaagaagcctgaaaatatcccccagcccatcagcaatacatctagagccaacctgaataagctgctgaccgattacaccgaaatgaagaaggcgatcctgcatgtgtactgggaagagttccagaaggaccctgtgggcctgatgagccgggtggcccagcctgccagcaagaagatcgatcagaacaagctgaaacctgagatggacgagaagggcaacctgaccaccgccggctttgcctgctctcagtgtggccagcccctgttcgtgtacaagctggagcaggtgtctgagaagggcaaggcttacaccaactacttcggacggtgcaatgtggccgagcacgaaaagctgatcctgctggcccagctgaagcccgagaaggatagcgacgaagccgtgacatatagcctgggaaagtttgggcagagggccctggatttctacagcattcatgtgaccaaggagtccacccaccccgtgaagcccctggcccagatcgccggaaacagatacgcctccggacctgtgggaaaggccctgagcgacgcatgtatgggcacaatcgcctccttcctgtctaagtaccaggacatcatcatcgaacaccagaaggtggtgaagggcaaccagaagagactggagagcctgcgggagctggccggcaaggaaaacctggaataccctagcgtgaccctgccacctcagcctcacaccaaggagggcgttgatgcctacaacgaagtgatcgcccgggtgcgaatgtgggtgaacctgaacctgtggcagaagctgaagctaagcagagatgatgccaagcctctgctgagactgaagggattcccttcctttcctctggtcgagagacaggccaacgaagtggactggtgggacatggtgtgtaacgtgaagaagctgatcaacgagaaaaaggaggatggcaaggtgttttggcagaatctggctggctacaagagacaggaagccctgagaccatacctgagcagcgaggaagatcggaagaagggaaagaaattcgctcggtaccagctgggcgacctgctgctgcacctggaaaagaagcacggcgaggactggggaaaggtgtacgacgaggcctgggagcggattgacaagaaagtggaaggcctgagcaagcacatcaagctggaagaggaacggagaagcgaggacgcccagagcaaggccgccctgaccgactggctgcgggctaaggccagcttcgtgatcgagggcctgaaggaggccgacaaggacgagttctgcagatgcgagctgaagctgcagaagtggtacggggacctgcggggaaagcccttcgccatcgaagccgagaacagcatcctggacatcagcggcttcagcaagcagtacaactgtgccttcatctggcagaaggacggcgtgaagaagctgaacctgtacctgatcatcaactacttcaagggcggcaagctgcggttcaagaagatcaaacctgaagccttcgaagccaacagattctacaccgtgatcaacaaaaagagcggcgagatcgtgcccatggaggtgaacttcaacttcgacgaccccaacctgatcatcctgcctctggcctttggcaagagacagggcagagaattcatctggaacgacctgctgtccctggaaaccggcagcctgaagctggccaacggaagagtgatcgagaagacactgtacaacagaagaacccggcaggatgagcctgccctgttcgtggccctgaccttcgagcggcgggaggtcctggactcctccaatatcaaaccaatgaacctgatcggcgtggcaagaggcgaaaacatccccgccgtgatcgccctgaccgaccccgagggctgcccactgagccggtttaaggatagcctgggaaacccaacccacatcctgagaatcggcgagagctataaggagaagcagcggaccatccaggccaagaaggaggtggagcagcggagagccggcggctacagccggaagtacgccagcaaagccaagaatctggcagacgatatggtgagaaacaccgctagagatctgctgtactacgccgtgacccaggatgccatgctgatcttcgccaacctgagccggggcttcggccggcagggcaagcggaccttcatggccgagagacagtacacacggatggaggactggctgaccgccaagctggcctacgagggcctgagcaagacctacctgtccaagacactggcccagtacacctccaagacatgcagcaactgtgggtttaccatcaccagcgccgactacgacagggtgctggagaagctgaagaagacagcaacaggctggatgaccacaattaacggcaaggagctgaaggtggagggccagattacctactacaacagatacaagagacagaacgtagtcaaggacctgtccgtcgagctggatagactgagcgaagaatctgtgaacaacgacatctcctcctggacaaagggcagaagcggagaagctctgagcctcctgaagaaaagattctcccatagacccgtgcaggagaagttcgtgtgcctgaactgcggcttcgagacacacgcagccgagcaagccgccctgaacatcgccagatcctggctgttcctgcggagccaggagtacaagaaataccagacaaacaagacaaccggcaacaccgataagagagccttcgtcgagacctggcagtccttttaccggaagaagcttaaggaggtgtggaaacctgccgtgcggtctggcggatctggcggaggctccgccctggagagcgtgaccttccaggacgtggccgtgaacttcacccacgaggagtggggccacctgaagcccgcccagaaggacctgtacagggaggtgatgatggagaactaccagaacttcgtgagcctgggcctgcccttcagcaagccccacgtgatcagccagctggagaagggcgaggccccctggatcaccgagaaggccagcctggtgcccagggtgagctgccaggacttcttcggcggcccaagcagcggcgcccctcctcccagcggcggcagcccagccggctccccaacctctaccgaggagggcacctctgagtccgccacccccgagagcggccctggcacctccaccgagcccagcgagggcagcgcacccggcagccctgccggcagccccacctccacagaggagggaaccagcaccgagcccagcgaaggcagcgccccaggcaccagcaccgagcctagtgagcaggagattaaacggatcaacaagatcagaagaagacttgtgaaagacagcaacaccaagaaggccggcaagacaggccccatgaaaaccctgctggttagagtgatgacacccgatctgagagagcggctggaaaacctgagaaagaagcctgaaaatatcccccagcccatcagcaatacatctagagccaacctgaataagctgctgaccgattacaccgaaatgaagaaggcgatcctgcatgtgtactgggaagagttccagaaggaccctgtgggcctgatgagccgggtggcccagcctgccagcaagaagatcgatcagaacaagctgaaacctgagatggacgagaagggcaacctgaccaccgccggctttgcctgctctcagtgtggccagcccctgttcgtgtacaagctggagcaggtgtctgagaagggcaaggcttacaccaactacttcggacggtgcaatgtggccgagcacgaaaagctgatcctgctggcccagctgaagcccgagaaggatagcgacgaagccgtgacatatagcctgggaaagtttgggcagagggccctggatttctacagcattcatgtgaccaaggagtccacccaccccgtgaagcccctggcccagatcgccggaaacagatacgcctccggacctgtgggaaaggccctgagcgacgcatgtatgggcacaatcgcctccttcctgtctaagtaccaggacatcatcatcgaacaccagaaggtggtgaagggcaaccagaagagactggagagcctgcgggagctggccggcaaggaaaacctggaataccctagcgtgaccctgccacctcagcctcacaccaaggagggcgttgatgcctacaacgaagtgatcgcccgggtgcgaatgtgggtgaacctgaacctgtggcagaagctgaagctaagcagagatgatgccaagcctctgctgagactgaagggattcccttcctttcctctggtcgagagacaggccaacgaagtggactggtgggacatggtgtgtaacgtgaagaagctgatcaacgagaaaaaggaggatggcaaggtgttttggcagaatctggctggctacaagagacaggaagccctgagaccatacctgagcagcgaggaagatcggaagaagggaaagaaattcgctcggtaccagctgggcgacctgctgctgcacctggaaaagaagcacggcgaggactggggaaaggtgtacgacgaggcctgggagcggattgacaagaaagtggaaggcctgagcaagcacatcaagctggaagaggaacggagaagcgaggacgcccagagcaaggccgccctgaccgactggctgcgggctaaggccagcttcgtgatcgagggcctgaaggaggccgacaaggacgagttctgcagatgcgagctgaagctgcagaagtggtacggggacctgcggggaaagcccttcgccatcgaagccgagaacagcatcctggacatcagcggcttcagcaagcagtacaactgtgccttcatctggcagaaggacggcgtgaagaagctgaacctgtacctgatcatcaactacttcaagggcggcaagctgcggttcaagaagatcaaacctgaagccttcgaagccaacagattctacaccgtgatcaacaaaaagagcggcgagatcgtgcccatggaggtgaacttcaacttcgacgaccccaacctgatcatcctgcctctggcctttggcaagagacagggcagagaattcatctggaacgacctgctgtccctggaaaccggcagcctgaagctggccaacggaagagtgatcgagaagacactgtacaacagaagaacccggcaggatgagcctgccctgttcgtggccctgaccttcgagcggcgggaggtcctggactcctccaatatcaaaccaatgaacctgatcggcgtggcaagaggcgaaaacatccccgccgtgatcgccctgaccgaccccgagggctgcccactgagccggtttaaggatagcctgggaaacccaacccacatcctgagaatcggcgagagctataaggagaagcagcggaccatccaggccaagaaggaggtggagcagcggagagccggcggctacagccggaagtacgccagcaaagccaagaatctggcagacgatatggtgagaaacaccgctagagatctgctgtactacgccgtgacccaggatgccatgctgatcttcgccaacctgagccggggcttcggccggcagggcaagcggaccttcatggccgagagacagtacacacggatggaggactggctgaccgccaagctggcctacgagggcctgagcaagacctacctgtccaagacactggcccagtacacctccaagacatgcagcaactgtgggtttaccatcaccagcgccgactacgacagggtgctggagaagctgaagaagacagcaacaggctggatgaccacaattaacggcaaggagctgaaggtggagggccagattacctactacaacagatacaagagacagaacgtagtcaaggacctgtccgtcgagctggatagactgagcgaagaatctgtgaacaacgacatctcctcctggacaaagggcagaagcggagaagctctgagcctcctgaagaaaagattctcccatagacccgtgcaggagaagttcgtgtgcctgaactgcggcttcgagacacacgcagccgagcaagccgccctgaacatcgccagatcctggctgttcctgcggagccaggagtacaagaaataccagacaaacaagacaaccggcaacaccgataagagagccttcgtcgagacctggcagtccttttaccggaagaagcttaaggaggtgtggaaacctgccgtgcggtctggcggatctggcggaggctcctgccctggagagcgtgaccttccaggacgtggccgtgaacttcacccacgaggagtggggccacctgaagcccgcccagaaggacctgtacagggaggtgatgatggagaactaccagaacttcgtgagcctgggcctgcccttcagcaagccccacgtgatcagccagctggagaagggcgaggccccctggatcaccgagaaggccagcctggtgcccagggtgagctgccaggacttcttcggatctggctccggcagcggccccaagaaaaagagaaaagtctaagctgccttctgcggggcttgccttctggccatgcccttcttctctcccttgcacctgtacctcttggtctttgaataaagcctgagtaggaaggctagcaaaaaaaaaaaaaaaaaaaaaaaaaaaaaaaaaaaaaaaaaaaaaaaaaaaaaaaaaaaaaaaaaaaaaaaaaaaaaaaa

SEQ ID NO: 16288 - RNA, 9485 nt, synthetic construct
  source 1..9485: mol_type = other RNA
aggaaataagagagaaaagaagagtaagaagaaatataagagccaccatggcccctaagaagaagcgtaaagtgagccggatggaacgcctcgtctacgaggtgcggcagaagtgcagaaacatcgaggacatctgcatctcctgcggatctctgaacgtgaccctggagcacccactgttcatcggcggcatgtgccagaactgtaaaaactgttttctggagtgtgcctatcaatacgacgatgacggctaccagagctactgcaccatctgttgcggcggaagagaggtgctgatgtgtggaaataacaactgctgccggtgcttctgcgtggaatgcgtggacctgctggtgggccccggcgccgcccaggccgctattaaggaagatccttggaactgctacatgtgcggccacaagggcacatacggcctgctgagacggagagaggactggcctagcagactgcagatgttcttcgccaataaccacgaccaggagttcgacccccctaaggtgtaccctcccgtccccgccgagaagagaaagcccatccgggtcctgagcctgttcgatggcatcgccaccggtctgctggtgctgaaggacctgggcatccaggtggataggtacattgcctccgaggtgtgcgaggactccatcaccgtgggaatggtgcgtcatcagggcaagatcatgtacgtgggcgacgtgcggagcgtgacacagaagcatatccaggagtggggccctttcgacctggtgatcggcggcagcccttgcaatgacctgagcatcgtgaacccagcccggaagggcctgtacgagggaaccggcagactgttcttcgagttttacagactgctgcacgacgcccggcctaaggaaggcgacgaccggcccttcttttggctgttcgagaatgtggtggccatgggagtcagcgacaagcgggatattagccggttcctggagagcaaccccgtgatgatcgatgccaaggaagtgagcgccgcccaccgggccagatacttctggggcaatctgcctggcatgaacagacccctggccagcaccgtgaacgacaagctggagctgcaggagtgcctggagcacggccggatcgccaagttcagcaaggtgagaaccatcaccacccgaagcaacagcatcaaacaaggcaaggaccagcactttcctgtgttcatgaacgagaaggaggacatcctgtggtgtaccgagatggagagagtgttcgggttcccagtccactacacagatgtcagcaacatgtctagactggccagacagagactgctgggaagaagctggtccgtccctgtgatcagacacctgttcgcccctctgaaggagtacttcgcctgcgtgagcagcggcaacagcaacgccaacagccggggccccagcttctctagcggcctggtgccactgtccctgagagggagccacatgggccccatggagatctacaaaaccgtgagcgcctggaagcggcagcctgtgcgcgtgctgagcctgtttcggaatatcgataaagtcctgaaaagcctgggattcctggagagcggctctggctccggcggtggcaccctgaagtacgtggaggatgtgacaaacgtggtcagacgggatgtggagaagtggggccccttcgatctggtgtacggcagcacccaacccctgggcagctcttgtgaccggtgccctggctggtacatgtttcagttccaccggatcctgcagtacgccctgccgagacaggagtcccagcggccattcttttggattttcatggacaacttgctgctgaccgaggatgaccaggaaactaccactcggttcctgcagaccgaagccgtgaccctgcaggacgtgagaggccgggactaccagaacgccatgcgggtgtggtccaacatccctggactgaaaagcaagcacgcacctctgacccctaaagaagaggagtacctgcaggcccaggtgcggagcagaagcaagctggacgcccctaaggtggatctgctggtgaagaattgcctcctgcccctgagagagtacttcaagtatttcagccagaatagtctgcccctgggaggcagcggcggcggcgccctggtgacatttgaggacgtcgccgtgcggttcacccaggaggaatgggctctgctggatccttctcagaaaatcctgtaccgggacgtgatgagagagacataccggaatctgacctccgtgggcatcaactgggaatgttgggaccttgaagcctgcttcagaagcctgggaagaaacctgagagtgcaggtggtgaagagaaagtgcgagctgaccaacagcggcccctgcgccgagggcggcccaagcagcggcgcccctcctcccagcggcggcagcccagccggctccccaacctctaccgaggagggcacctctgagtccgccacccccgagagcggccctggcacctccaccgagcccagcgagggcagcgcacccggcagccctgccggcagccccacctccacagaggagggaaccagcaccgagcccagcgaaggcagcgccccaggcaccagcaccgagcctagtgagcaggagattaaacggatcaacaagatcagaagaagacttgtgaaagacagcaacaccaagaaggccggcaagacaggccccatgaaaaccctgctggttagagtgatgacacccgatctgagagagcggctggaaaacctgagaaagaagcctgaaaatatcccccagcccatcagcaatacatctagagccaacctgaataagctgctgaccgattacaccgaaatgaagaaggcgatcctgcatgtgtactgggaagagttccagaaggaccctgtgggcctgatgagccgggtggcccagcctgccagcaagaagatcgatcagaacaagctgaaacctgagatggacgagaagggcaacctgaccaccgccggctttgcctgctctcagtgtggccagcccctgttcgtgtacaagctggagcaggtgtctgagaagggcaaggcttacaccaactacttcggacggtgcaatgtggccgagcacgaaaagctgatcctgctggcccagctgaagcccgagaaggatagcgacgaagccgtgacatatagcctgggaaagtttgggcagagggccctggatttctacagcattcatgtgaccaaggagtccacccaccccgtgaagcccctggcccagatcgccggaaacagatacgcctccggacctgtgggaaaggccctgagcgacgcatgtatgggcacaatcgcctccttcctgtctaagtaccaggacatcatcatcgaacaccagaaggtggtgaagggcaaccagaagagactggagagcctgcgggagctggccggcaaggaaaacctggaataccctagcgtgaccctgccacctcagcctcacaccaaggagggcgttgatgcctacaacgaagtgatcgcccgggtgcgaatgtgggtgaacctgaacctgtggcagaagctgaagctaagcagagatgatgccaagcctctgctgagactgaagggattcccttcctttcctctggtcgagagacaggccaacgaagtggactggtgggacatggtgtgtaacgtgaagaagctgatcaacgagaaaaaggaggatggcaaggtgttttggcagaatctggctggctacaagagacaggaagccctgagaccatacctgagcagcgaggaagatcggaagaagggaaagaaattcgctcggtaccagctgggcgacctgctgctgcacctggaaaagaagcacggcgaggactggggaaaggtgtacgacgaggcctgggagcggattgacaagaaagtggaaggcctgagcaagcacatcaagctggaagaggaacggagaagcgaggacgcccagagcaaggccgccctgaccgactggctgcgggctaaggccagcttcgtgatcgagggcctgaaggaggccgacaaggacgagttctgcagatgcgagctgaagctgcagaagtggtacggggacctgcggggaaagcccttcgccatcgaagccgagaacagcatcctggacatcagcggcttcagcaagcagtacaactgtgccttcatctggcagaaggacggcgtgaagaagctgaacctgtacctgatcatcaactacttcaagggcggcaagctgcggttcaagaagatcaaacctgaagccttcgaagccaacagattctacaccgtgatcaacaaaaagagcggcgagatcgtgcccatggaggtgaacttcaacttcgacgaccccaacctgatcatcctgcctctggcctttggcaagagacagggcagagaattcatctggaacgacctgctgtccctggaaaccggcagcctgaagctggccaacggaagagtgatcgagaagacactgtacaacagaagaacccggcaggatgagcctgccctgttcgtggccctgaccttcgagcggcgggaggtcctggactcctccaatatcaaaccaatgaacctgatcggcgtggcaagaggcgaaaacatccccgccgtgatcgccctgaccgaccccgagggctgcccactgagccggtttaaggatagcctgggaaacccaacccacatcctgagaatcggcgagagctataaggagaagcagcggaccatccaggccaagaaggaggtggagcagcggagagccggcggctacagccggaagtacgccagcaaagccaagaatctggcagacgatatggtgagaaacaccgctagagatctgctgtactacgccgtgacccaggatgccatgctgatcttcgccaacctgagccggggcttcggccggcagggcaagcggaccttcatggccgagagacagtacacacggatggaggactggctgaccgccaagctggcctacgagggcctgagcaagacctacctgtccaagacactggcccagtacacctccaagacatgcagcaactgtgggtttaccatcaccagcgccgactacgacagggtgctggagaagctgaagaagacagcaacaggctggatgaccacaattaacggcaaggagctgaaggtggagggccagattacctactacaacagatacaagagacagaacgtagtcaaggacctgtccgtcgagctggatagactgagcgaagaatctgtgaacaacgacatctcctcctggacaaagggcagaagcggagaagctctgagcctcctgaagaaaagattctcccatagacccgtgcaggagaagttcgtgtgcctgaactgcggcttcgagacacacgcagccgagcaagccgccctgaacatcgccagatcctggctgttcctgcggagccaggagtacaagaaataccagacaaacaagacaaccggcaacaccgataagagagccttcgtcgagacctggcagtccttttaccggaagaagcttaaggaggtgtggaaacctgccgtgcggtctggcggatctggcggaggctccaggaccggccccctgaccttcggcgacgtggccgtggagttcagcggcgaggagtgggcctggctggacagcgcccagaggagcctgcacaggagcgtgatgctggagaactacaggaacctggccagcctgggcctgtgcatgagcaagcccgagatgatcagcagcctggagcagagcaaggagccctgggccgtgaaggccaagagcaccaggggcaggtgccccgacctgaacctgtgcggcggcccaagcagcggcgcccctcctcccagcggcggcagcccagccggctccccaacctctaccgaggagggcacctctgagtccgccacccccgagagcggccctggcacctccaccgagcccagcgagggcagcgcacccggcagccctgccggcagccccacctccacagaggagggaaccagcaccgagcccagcgaaggcagcgccccaggcaccagcaccgagcctagtgagcaggagattaaacggatcaacaagatcagaagaagacttgtgaaagacagcaacaccaagaaggccggcaagacaggccccatgaaaaccctgctggttagagtgatgacacccgatctgagagagcggctggaaaacctgagaaagaagcctgaaaatatcccccagcccatcagcaatacatctagagccaacctgaataagctgctgaccgattacaccgaaatgaagaaggcgatcctgcatgtgtactgggaagagttccagaaggaccctgtgggcctgatgagccgggtggcccagcctgccagcaagaagatcgatcagaacaagctgaaacctgagatggacgagaagggcaacctgaccaccgccggctttgcctgctctcagtgtggccagcccctgttcgtgtacaagctggagcaggtgtctgagaagggcaaggcttacaccaactacttcggacggtgcaatgtggccgagcacgaaaagctgatcctgctggcccagctgaagcccgagaaggatagcgacgaagccgtgacatatagcctgggaaagtttgggcagagggccctggatttctacagcattcatgtgaccaaggagtccacccaccccgtgaagcccctggcccagatcgccggaaacagatacgcctccggacctgtgggaaaggccctgagcgacgcatgtatgggcacaatcgcctccttcctgtctaagtaccaggacatcatcatcgaacaccagaaggtggtgaagggcaaccagaagagactggagagcctgcgggagctggccggcaaggaaaacctggaataccctagcgtgaccctgccacctcagcctcacaccaaggagggcgttgatgcctacaacgaagtgatcgcccgggtgcgaatgtgggtgaacctgaacctgtggcagaagctgaagctaagcagagatgatgccaagcctctgctgagactgaagggattcccttcctttcctctggtcgagagacaggccaacgaagtggactggtgggacatggtgtgtaacgtgaagaagctgatcaacgagaaaaaggaggatggcaaggtgttttggcagaatctggctggctacaagagacaggaagccctgagaccatacctgagcagcgaggaagatcggaagaagggaaagaaattcgctcggtaccagctgggcgacctgctgctgcacctggaaaagaagcacggcgaggactggggaaaggtgtacgacgaggcctgggagcggattgacaagaaagtggaaggcctgagcaagcacatcaagctggaagaggaacggagaagcgaggacgcccagagcaaggccgccctgaccgactggctgcgggctaaggccagcttcgtgatcgagggcctgaaggaggccgacaaggacgagttctgcagatgcgagctgaagctgcagaagtggtacggggacctgcggggaaagcccttcgccatcgaagccgagaacagcatcctggacatcagcggcttcagcaagcagtacaactgtgccttcatctggcagaaggacggcgtgaagaagctgaacctgtacctgatcatcaactacttcaagggcggcaagctgcggttcaagaagatcaaacctgaagccttcgaagccaacagattctacaccgtgatcaacaaaaagagcggcgagatcgtgcccatggaggtgaacttcaacttcgacgaccccaacctgatcatcctgcctctggcctttggcaagagacagggcagagaattcatctggaacgacctgctgtccctggaaaccggcagcctgaagctggccaacggaagagtgatcgagaagacactgtacaacagaagaacccggcaggatgagcctgccctgttcgtggccctgaccttcgagcggcgggaggtcctggactcctccaatatcaaaccaatgaacctgatcggcgtggcaagaggcgaaaacatccccgccgtgatcgccctgaccgaccccgagggctgcccactgagccggtttaaggatagcctgggaaacccaacccacatcctgagaatcggcgagagctataaggagaagcagcggaccatccaggccaagaaggaggtggagcagcggagagccggcggctacagccggaagtacgccagcaaagccaagaatctggcagacgatatggtgagaaacaccgctagagatctgctgtactacgccgtgacccaggatgccatgctgatcttcgccaacctgagccggggcttcggccggcagggcaagcggaccttcatggccgagagacagtacacacggatggaggactggctgaccgccaagctggcctacgagggcctgagcaagacctacctgtccaagacactggcccagtacacctccaagacatgcagcaactgtgggtttaccatcaccagcgccgactacgacagggtgctggagaagctgaagaagacagcaacaggctggatgaccacaattaacggcaaggagctgaaggtggagggccagattacctactacaacagatacaagagacagaacgtagtcaaggacctgtccgtcgagctggatagactgagcgaagaatctgtgaacaacgacatctcctcctggacaaagggcagaagcggagaagctctgagcctcctgaagaaaagattctcccatagacccgtgcaggagaagttcgtgtgcctgaactgcggcttcgagacacacgcagccgagcaagccgccctgaacatcgccagatcctggctgttcctgcggagccaggagtacaagaaataccagacaaacaagacaaccggcaacaccgataagagagccttcgtcgagacctggcagtccttttaccggaagaagcttaaggaggtgtggaaacctgccgtgcggtctggcggatctggcggaggctcctaggaccggccccctgaccttcggcgacgtggccgtggagttcagcggcgaggagtgggcctggctggacagcgcccagaggagcctgcacaggagcgtgatgctggagaactacaggaacctggccagcctgggcctgtgcatgagcaagcccgagatgatcagcagcctggagcagagcaaggagccctgggccgtgaaggccaagagcaccaggggcaggtgccccgacctgaacctgtgcggatctggctccggcagcggccccaagaaaaagagaaaagtctaagctgccttctgcggggcttgccttctggccatgcccttcttctctcccttgcacctgtacctcttggtctttgaataaagcctgagtaggaaggctagcaaaaaaaaaaaaaaaaaaaaaaaaaaaaaaaaaaaaaaaaaaaaaaaaaaaaaaaaaaaaaaaaaaaaaaaaaaaaaaaa

SEQ ID NO: 16289 - RNA, 9485 nt, synthetic construct
  source 1..9485: mol_type = other RNA
aggaaataagagagaaaagaagagtaagaagaaatataagagccaccatggcccctaagaagaagcgtaaagtgagccggatggaacgcctcgtctacgaggtgcggcagaagtgcagaaacatcgaggacatctgcatctcctgcggatctctgaacgtgaccctggagcacccactgttcatcggcggcatgtgccagaactgtaaaaactgttttctggagtgtgcctatcaatacgacgatgacggctaccagagctactgcaccatctgttgcggcggaagagaggtgctgatgtgtggaaataacaactgctgccggtgcttctgcgtggaatgcgtggacctgctggtgggccccggcgccgcccaggccgctattaaggaagatccttggaactgctacatgtgcggccacaagggcacatacggcctgctgagacggagagaggactggcctagcagactgcagatgttcttcgccaataaccacgaccaggagttcgacccccctaaggtgtaccctcccgtccccgccgagaagagaaagcccatccgggtcctgagcctgttcgatggcatcgccaccggtctgctggtgctgaaggacctgggcatccaggtggataggtacattgcctccgaggtgtgcgaggactccatcaccgtgggaatggtgcgtcatcagggcaagatcatgtacgtgggcgacgtgcggagcgtgacacagaagcatatccaggagtggggccctttcgacctggtgatcggcggcagcccttgcaatgacctgagcatcgtgaacccagcccggaagggcctgtacgagggaaccggcagactgttcttcgagttttacagactgctgcacgacgcccggcctaaggaaggcgacgaccggcccttcttttggctgttcgagaatgtggtggccatgggagtcagcgacaagcgggatattagccggttcctggagagcaaccccgtgatgatcgatgccaaggaagtgagcgccgcccaccgggccagatacttctggggcaatctgcctggcatgaacagacccctggccagcaccgtgaacgacaagctggagctgcaggagtgcctggagcacggccggatcgccaagttcagcaaggtgagaaccatcaccacccgaagcaacagcatcaaacaaggcaaggaccagcactttcctgtgttcatgaacgagaaggaggacatcctgtggtgtaccgagatggagagagtgttcgggttcccagtccactacacagatgtcagcaacatgtctagactggccagacagagactgctgggaagaagctggtccgtccctgtgatcagacacctgttcgcccctctgaaggagtacttcgcctgcgtgagcagcggcaacagcaacgccaacagccggggccccagcttctctagcggcctggtgccactgtccctgagagggagccacatgggccccatggagatctacaaaaccgtgagcgcctggaagcggcagcctgtgcgcgtgctgagcctgtttcggaatatcgataaagtcctgaaaagcctgggattcctggagagcggctctggctccggcggtggcaccctgaagtacgtggaggatgtgacaaacgtggtcagacgggatgtggagaagtggggccccttcgatctggtgtacggcagcacccaacccctgggcagctcttgtgaccggtgccctggctggtacatgtttcagttccaccggatcctgcagtacgccctgccgagacaggagtcccagcggccattcttttggattttcatggacaacttgctgctgaccgaggatgaccaggaaactaccactcggttcctgcagaccgaagccgtgaccctgcaggacgtgagaggccgggactaccagaacgccatgcgggtgtggtccaacatccctggactgaaaagcaagcacgcacctctgacccctaaagaagaggagtacctgcaggcccaggtgcggagcagaagcaagctggacgcccctaaggtggatctgctggtgaagaattgcctcctgcccctgagagagtacttcaagtatttcagccagaatagtctgcccctgggaggcagcggcggcggcgccctggtgacatttgaggacgtcgccgtgcggttcacccaggaggaatgggctctgctggatccttctcagaaaatcctgtaccgggacgtgatgagagagacataccggaatctgacctccgtgggcatcaactgggaatgttgggaccttgaagcctgcttcagaagcctgggaagaaacctgagagtgcaggtggtgaagagaaagtgcgagctgaccaacagcggcccctgcgccgagggcggcccaagcagcggcgcccctcctcccagcggcggcagcccagccggctccccaacctctaccgaggagggcacctctgagtccgccacccccgagagcggccctggcacctccaccgagcccagcgagggcagcgcacccggcagccctgccggcagccccacctccacagaggagggaaccagcaccgagcccagcgaaggcagcgccccaggcaccagcaccgagcctagtgagcaggagattaaacggatcaacaagatcagaagaagacttgtgaaagacagcaacaccaagaaggccggcaagacaggccccatgaaaaccctgctggttagagtgatgacacccgatctgagagagcggctggaaaacctgagaaagaagcctgaaaatatcccccagcccatcagcaatacatctagagccaacctgaataagctgctgaccgattacaccgaaatgaagaaggcgatcctgcatgtgtactgggaagagttccagaaggaccctgtgggcctgatgagccgggtggcccagcctgccagcaagaagatcgatcagaacaagctgaaacctgagatggacgagaagggcaacctgaccaccgccggctttgcctgctctcagtgtggccagcccctgttcgtgtacaagctggagcaggtgtctgagaagggcaaggcttacaccaactacttcggacggtgcaatgtggccgagcacgaaaagctgatcctgctggcccagctgaagcccgagaaggatagcgacgaagccgtgacatatagcctgggaaagtttgggcagagggccctggatttctacagcattcatgtgaccaaggagtccacccaccccgtgaagcccctggcccagatcgccggaaacagatacgcctccggacctgtgggaaaggccctgagcgacgcatgtatgggcacaatcgcctccttcctgtctaagtaccaggacatcatcatcgaacaccagaaggtggtgaagggcaaccagaagagactggagagcctgcgggagctggccggcaaggaaaacctggaataccctagcgtgaccctgccacctcagcctcacaccaaggagggcgttgatgcctacaacgaagtgatcgcccgggtgcgaatgtgggtgaacctgaacctgtggcagaagctgaagctaagcagagatgatgccaagcctctgctgagactgaagggattcccttcctttcctctggtcgagagacaggccaacgaagtggactggtgggacatggtgtgtaacgtgaagaagctgatcaacgagaaaaaggaggatggcaaggtgttttggcagaatctggctggctacaagagacaggaagccctgagaccatacctgagcagcgaggaagatcggaagaagggaaagaaattcgctcggtaccagctgggcgacctgctgctgcacctggaaaagaagcacggcgaggactggggaaaggtgtacgacgaggcctgggagcggattgacaagaaagtggaaggcctgagcaagcacatcaagctggaagaggaacggagaagcgaggacgcccagagcaaggccgccctgaccgactggctgcgggctaaggccagcttcgtgatcgagggcctgaaggaggccgacaaggacgagttctgcagatgcgagctgaagctgcagaagtggtacggggacctgcggggaaagcccttcgccatcgaagccgagaacagcatcctggacatcagcggcttcagcaagcagtacaactgtgccttcatctggcagaaggacggcgtgaagaagctgaacctgtacctgatcatcaactacttcaagggcggcaagctgcggttcaagaagatcaaacctgaagccttcgaagccaacagattctacaccgtgatcaacaaaaagagcggcgagatcgtgcccatggaggtgaacttcaacttcgacgaccccaacctgatcatcctgcctctggcctttggcaagagacagggcagagaattcatctggaacgacctgctgtccctggaaaccggcagcctgaagctggccaacggaagagtgatcgagaagacactgtacaacagaagaacccggcaggatgagcctgccctgttcgtggccctgaccttcgagcggcgggaggtcctggactcctccaatatcaaaccaatgaacctgatcggcgtggcaagaggcgaaaacatccccgccgtgatcgccctgaccgaccccgagggctgcccactgagccggtttaaggatagcctgggaaacccaacccacatcctgagaatcggcgagagctataaggagaagcagcggaccatccaggccaagaaggaggtggagcagcggagagccggcggctacagccggaagtacgccagcaaagccaagaatctggcagacgatatggtgagaaacaccgctagagatctgctgtactacgccgtgacccaggatgccatgctgatcttcgccaacctgagccggggcttcggccggcagggcaagcggaccttcatggccgagagacagtacacacggatggaggactggctgaccgccaagctggcctacgagggcctgagcaagacctacctgtccaagacactggcccagtacacctccaagacatgcagcaactgtgggtttaccatcaccagcgccgactacgacagggtgctggagaagctgaagaagacagcaacaggctggatgaccacaattaacggcaaggagctgaaggtggagggccagattacctactacaacagatacaagagacagaacgtagtcaaggacctgtccgtcgagctggatagactgagcgaagaatctgtgaacaacgacatctcctcctggacaaagggcagaagcggagaagctctgagcctcctgaagaaaagattctcccatagacccgtgcaggagaagttcgtgtgcctgaactgcggcttcgagacacacgcagccgagcaagccgccctgaacatcgccagatcctggctgttcctgcggagccaggagtacaagaaataccagacaaacaagacaaccggcaacaccgataagagagccttcgtcgagacctggcagtccttttaccggaagaagcttaaggaggtgtggaaacctgccgtgcggtctggcggatctggcggaggctccatgggccccctgcagttcaaggacgtggccatcgagttcagcctggaggagtggcactgcctggacaccgcccagaggaacctgtacagggacgtgatgctggagaactacaggaacctggtgttcctgggcatcgtggtgagcaagcccgacctgatcgccaggctggagcagggcaagaagcccctgaccatgaagaggcacgagatggtggccaaccccagcggccccggcgtggtggtgggcggcccaagcagcggcgcccctcctcccagcggcggcagcccagccggctccccaacctctaccgaggagggcacctctgagtccgccacccccgagagcggccctggcacctccaccgagcccagcgagggcagcgcacccggcagccctgccggcagccccacctccacagaggagggaaccagcaccgagcccagcgaaggcagcgccccaggcaccagcaccgagcctagtgagcaggagattaaacggatcaacaagatcagaagaagacttgtgaaagacagcaacaccaagaaggccggcaagacaggccccatgaaaaccctgctggttagagtgatgacacccgatctgagagagcggctggaaaacctgagaaagaagcctgaaaatatcccccagcccatcagcaatacatctagagccaacctgaataagctgctgaccgattacaccgaaatgaagaaggcgatcctgcatgtgtactgggaagagttccagaaggaccctgtgggcctgatgagccgggtggcccagcctgccagcaagaagatcgatcagaacaagctgaaacctgagatggacgagaagggcaacctgaccaccgccggctttgcctgctctcagtgtggccagcccctgttcgtgtacaagctggagcaggtgtctgagaagggcaaggcttacaccaactacttcggacggtgcaatgtggccgagcacgaaaagctgatcctgctggcccagctgaagcccgagaaggatagcgacgaagccgtgacatatagcctgggaaagtttgggcagagggccctggatttctacagcattcatgtgaccaaggagtccacccaccccgtgaagcccctggcccagatcgccggaaacagatacgcctccggacctgtgggaaaggccctgagcgacgcatgtatgggcacaatcgcctccttcctgtctaagtaccaggacatcatcatcgaacaccagaaggtggtgaagggcaaccagaagagactggagagcctgcgggagctggccggcaaggaaaacctggaataccctagcgtgaccctgccacctcagcctcacaccaaggagggcgttgatgcctacaacgaagtgatcgcccgggtgcgaatgtgggtgaacctgaacctgtggcagaagctgaagctaagcagagatgatgccaagcctctgctgagactgaagggattcccttcctttcctctggtcgagagacaggccaacgaagtggactggtgggacatggtgtgtaacgtgaagaagctgatcaacgagaaaaaggaggatggcaaggtgttttggcagaatctggctggctacaagagacaggaagccctgagaccatacctgagcagcgaggaagatcggaagaagggaaagaaattcgctcggtaccagctgggcgacctgctgctgcacctggaaaagaagcacggcgaggactggggaaaggtgtacgacgaggcctgggagcggattgacaagaaagtggaaggcctgagcaagcacatcaagctggaagaggaacggagaagcgaggacgcccagagcaaggccgccctgaccgactggctgcgggctaaggccagcttcgtgatcgagggcctgaaggaggccgacaaggacgagttctgcagatgcgagctgaagctgcagaagtggtacggggacctgcggggaaagcccttcgccatcgaagccgagaacagcatcctggacatcagcggcttcagcaagcagtacaactgtgccttcatctggcagaaggacggcgtgaagaagctgaacctgtacctgatcatcaactacttcaagggcggcaagctgcggttcaagaagatcaaacctgaagccttcgaagccaacagattctacaccgtgatcaacaaaaagagcggcgagatcgtgcccatggaggtgaacttcaacttcgacgaccccaacctgatcatcctgcctctggcctttggcaagagacagggcagagaattcatctggaacgacctgctgtccctggaaaccggcagcctgaagctggccaacggaagagtgatcgagaagacactgtacaacagaagaacccggcaggatgagcctgccctgttcgtggccctgaccttcgagcggcgggaggtcctggactcctccaatatcaaaccaatgaacctgatcggcgtggcaagaggcgaaaacatccccgccgtgatcgccctgaccgaccccgagggctgcccactgagccggtttaaggatagcctgggaaacccaacccacatcctgagaatcggcgagagctataaggagaagcagcggaccatccaggccaagaaggaggtggagcagcggagagccggcggctacagccggaagtacgccagcaaagccaagaatctggcagacgatatggtgagaaacaccgctagagatctgctgtactacgccgtgacccaggatgccatgctgatcttcgccaacctgagccggggcttcggccggcagggcaagcggaccttcatggccgagagacagtacacacggatggaggactggctgaccgccaagctggcctacgagggcctgagcaagacctacctgtccaagacactggcccagtacacctccaagacatgcagcaactgtgggtttaccatcaccagcgccgactacgacagggtgctggagaagctgaagaagacagcaacaggctggatgaccacaattaacggcaaggagctgaaggtggagggccagattacctactacaacagatacaagagacagaacgtagtcaaggacctgtccgtcgagctggatagactgagcgaagaatctgtgaacaacgacatctcctcctggacaaagggcagaagcggagaagctctgagcctcctgaagaaaagattctcccatagacccgtgcaggagaagttcgtgtgcctgaactgcggcttcgagacacacgcagccgagcaagccgccctgaacatcgccagatcctggctgttcctgcggagccaggagtacaagaaataccagacaaacaagacaaccggcaacaccgataagagagccttcgtcgagacctggcagtccttttaccggaagaagcttaaggaggtgtggaaacctgccgtgcggtctggcggatctggcggaggctcctatgggccccctgcagttcaaggacgtggccatcgagttcagcctggaggagtggcactgcctggacaccgcccagaggaacctgtacagggacgtgatgctggagaactacaggaacctggtgttcctgggcatcgtggtgagcaagcccgacctgatcgccaggctggagcagggcaagaagcccctgaccatgaagaggcacgagatggtggccaaccccagcggccccggcgtggtggtgggatctggctccggcagcggccccaagaaaaagagaaaagtctaagctgccttctgcggggcttgccttctggccatgcccttcttctctcccttgcacctgtacctcttggtctttgaataaagcctgagtaggaaggctagcaaaaaaaaaaaaaaaaaaaaaaaaaaaaaaaaaaaaaaaaaaaaaaaaaaaaaaaaaaaaaaaaaaaaaaaaaaaaaaaa

SEQ ID NO: 16290 - RNA, 9485 nt, synthetic construct
  source 1..9485: mol_type = other RNA
aggaaataagagagaaaagaagagtaagaagaaatataagagccaccatggcccctaagaagaagcgtaaagtgagccggatggaacgcctcgtctacgaggtgcggcagaagtgcagaaacatcgaggacatctgcatctcctgcggatctctgaacgtgaccctggagcacccactgttcatcggcggcatgtgccagaactgtaaaaactgttttctggagtgtgcctatcaatacgacgatgacggctaccagagctactgcaccatctgttgcggcggaagagaggtgctgatgtgtggaaataacaactgctgccggtgcttctgcgtggaatgcgtggacctgctggtgggccccggcgccgcccaggccgctattaaggaagatccttggaactgctacatgtgcggccacaagggcacatacggcctgctgagacggagagaggactggcctagcagactgcagatgttcttcgccaataaccacgaccaggagttcgacccccctaaggtgtaccctcccgtccccgccgagaagagaaagcccatccgggtcctgagcctgttcgatggcatcgccaccggtctgctggtgctgaaggacctgggcatccaggtggataggtacattgcctccgaggtgtgcgaggactccatcaccgtgggaatggtgcgtcatcagggcaagatcatgtacgtgggcgacgtgcggagcgtgacacagaagcatatccaggagtggggccctttcgacctggtgatcggcggcagcccttgcaatgacctgagcatcgtgaacccagcccggaagggcctgtacgagggaaccggcagactgttcttcgagttttacagactgctgcacgacgcccggcctaaggaaggcgacgaccggcccttcttttggctgttcgagaatgtggtggccatgggagtcagcgacaagcgggatattagccggttcctggagagcaaccccgtgatgatcgatgccaaggaagtgagcgccgcccaccgggccagatacttctggggcaatctgcctggcatgaacagacccctggccagcaccgtgaacgacaagctggagctgcaggagtgcctggagcacggccggatcgccaagttcagcaaggtgagaaccatcaccacccgaagcaacagcatcaaacaaggcaaggaccagcactttcctgtgttcatgaacgagaaggaggacatcctgtggtgtaccgagatggagagagtgttcgggttcccagtccactacacagatgtcagcaacatgtctagactggccagacagagactgctgggaagaagctggtccgtccctgtgatcagacacctgttcgcccctctgaaggagtacttcgcctgcgtgagcagcggcaacagcaacgccaacagccggggccccagcttctctagcggcctggtgccactgtccctgagagggagccacatgggccccatggagatctacaaaaccgtgagcgcctggaagcggcagcctgtgcgcgtgctgagcctgtttcggaatatcgataaagtcctgaaaagcctgggattcctggagagcggctctggctccggcggtggcaccctgaagtacgtggaggatgtgacaaacgtggtcagacgggatgtggagaagtggggccccttcgatctggtgtacggcagcacccaacccctgggcagctcttgtgaccggtgccctggctggtacatgtttcagttccaccggatcctgcagtacgccctgccgagacaggagtcccagcggccattcttttggattttcatggacaacttgctgctgaccgaggatgaccaggaaactaccactcggttcctgcagaccgaagccgtgaccctgcaggacgtgagaggccgggactaccagaacgccatgcgggtgtggtccaacatccctggactgaaaagcaagcacgcacctctgacccctaaagaagaggagtacctgcaggcccaggtgcggagcagaagcaagctggacgcccctaaggtggatctgctggtgaagaattgcctcctgcccctgagagagtacttcaagtatttcagccagaatagtctgcccctgggaggcagcggcggcggcgccctggtgacatttgaggacgtcgccgtgcggttcacccaggaggaatgggctctgctggatccttctcagaaaatcctgtaccgggacgtgatgagagagacataccggaatctgacctccgtgggcatcaactgggaatgttgggaccttgaagcctgcttcagaagcctgggaagaaacctgagagtgcaggtggtgaagagaaagtgcgagctgaccaacagcggcccctgcgccgagggcggcccaagcagcggcgcccctcctcccagcggcggcagcccagccggctccccaacctctaccgaggagggcacctctgagtccgccacccccgagagcggccctggcacctccaccgagcccagcgagggcagcgcacccggcagccctgccggcagccccacctccacagaggagggaaccagcaccgagcccagcgaaggcagcgccccaggcaccagcaccgagcctagtgagcaggagattaaacggatcaacaagatcagaagaagacttgtgaaagacagcaacaccaagaaggccggcaagacaggccccatgaaaaccctgctggttagagtgatgacacccgatctgagagagcggctggaaaacctgagaaagaagcctgaaaatatcccccagcccatcagcaatacatctagagccaacctgaataagctgctgaccgattacaccgaaatgaagaaggcgatcctgcatgtgtactgggaagagttccagaaggaccctgtgggcctgatgagccgggtggcccagcctgccagcaagaagatcgatcagaacaagctgaaacctgagatggacgagaagggcaacctgaccaccgccggctttgcctgctctcagtgtggccagcccctgttcgtgtacaagctggagcaggtgtctgagaagggcaaggcttacaccaactacttcggacggtgcaatgtggccgagcacgaaaagctgatcctgctggcccagctgaagcccgagaaggatagcgacgaagccgtgacatatagcctgggaaagtttgggcagagggccctggatttctacagcattcatgtgaccaaggagtccacccaccccgtgaagcccctggcccagatcgccggaaacagatacgcctccggacctgtgggaaaggccctgagcgacgcatgtatgggcacaatcgcctccttcctgtctaagtaccaggacatcatcatcgaacaccagaaggtggtgaagggcaaccagaagagactggagagcctgcgggagctggccggcaaggaaaacctggaataccctagcgtgaccctgccacctcagcctcacaccaaggagggcgttgatgcctacaacgaagtgatcgcccgggtgcgaatgtgggtgaacctgaacctgtggcagaagctgaagctaagcagagatgatgccaagcctctgctgagactgaagggattcccttcctttcctctggtcgagagacaggccaacgaagtggactggtgggacatggtgtgtaacgtgaagaagctgatcaacgagaaaaaggaggatggcaaggtgttttggcagaatctggctggctacaagagacaggaagccctgagaccatacctgagcagcgaggaagatcggaagaagggaaagaaattcgctcggtaccagctgggcgacctgctgctgcacctggaaaagaagcacggcgaggactggggaaaggtgtacgacgaggcctgggagcggattgacaagaaagtggaaggcctgagcaagcacatcaagctggaagaggaacggagaagcgaggacgcccagagcaaggccgccctgaccgactggctgcgggctaaggccagcttcgtgatcgagggcctgaaggaggccgacaaggacgagttctgcagatgcgagctgaagctgcagaagtggtacggggacctgcggggaaagcccttcgccatcgaagccgagaacagcatcctggacatcagcggcttcagcaagcagtacaactgtgccttcatctggcagaaggacggcgtgaagaagctgaacctgtacctgatcatcaactacttcaagggcggcaagctgcggttcaagaagatcaaacctgaagccttcgaagccaacagattctacaccgtgatcaacaaaaagagcggcgagatcgtgcccatggaggtgaacttcaacttcgacgaccccaacctgatcatcctgcctctggcctttggcaagagacagggcagagaattcatctggaacgacctgctgtccctggaaaccggcagcctgaagctggccaacggaagagtgatcgagaagacactgtacaacagaagaacccggcaggatgagcctgccctgttcgtggccctgaccttcgagcggcgggaggtcctggactcctccaatatcaaaccaatgaacctgatcggcgtggcaagaggcgaaaacatccccgccgtgatcgccctgaccgaccccgagggctgcccactgagccggtttaaggatagcctgggaaacccaacccacatcctgagaatcggcgagagctataaggagaagcagcggaccatccaggccaagaaggaggtggagcagcggagagccggcggctacagccggaagtacgccagcaaagccaagaatctggcagacgatatggtgagaaacaccgctagagatctgctgtactacgccgtgacccaggatgccatgctgatcttcgccaacctgagccggggcttcggccggcagggcaagcggaccttcatggccgagagacagtacacacggatggaggactggctgaccgccaagctggcctacgagggcctgagcaagacctacctgtccaagacactggcccagtacacctccaagacatgcagcaactgtgggtttaccatcaccagcgccgactacgacagggtgctggagaagctgaagaagacagcaacaggctggatgaccacaattaacggcaaggagctgaaggtggagggccagattacctactacaacagatacaagagacagaacgtagtcaaggacctgtccgtcgagctggatagactgagcgaagaatctgtgaacaacgacatctcctcctggacaaagggcagaagcggagaagctctgagcctcctgaagaaaagattctcccatagacccgtgcaggagaagttcgtgtgcctgaactgcggcttcgagacacacgcagccgagcaagccgccctgaacatcgccagatcctggctgttcctgcggagccaggagtacaagaaataccagacaaacaagacaaccggcaacaccgataagagagccttcgtcgagacctggcagtccttttaccggaagaagcttaaggaggtgtggaaacctgccgtgcggtctggcggatctggcggaggctccgcccacatgagcctgagcttcagggacgtggccatcgacctgagccaggaggagtgggagtgcctggaccccgtgcagagggccctgtacagggacgtgatgctggagaactacagcaacctggtgagcctgggctgcagcagccccaagcccgacgtgatcaccctgctggagcaggagagggagccctggaccgtgatgagggagggcaccaggagctggtacaccgacctggagagcaagggcggcccaagcagcggcgcccctcctcccagcggcggcagcccagccggctccccaacctctaccgaggagggcacctctgagtccgccacccccgagagcggccctggcacctccaccgagcccagcgagggcagcgcacccggcagccctgccggcagccccacctccacagaggagggaaccagcaccgagcccagcgaaggcagcgccccaggcaccagcaccgagcctagtgagcaggagattaaacggatcaacaagatcagaagaagacttgtgaaagacagcaacaccaagaaggccggcaagacaggccccatgaaaaccctgctggttagagtgatgacacccgatctgagagagcggctggaaaacctgagaaagaagcctgaaaatatcccccagcccatcagcaatacatctagagccaacctgaataagctgctgaccgattacaccgaaatgaagaaggcgatcctgcatgtgtactgggaagagttccagaaggaccctgtgggcctgatgagccgggtggcccagcctgccagcaagaagatcgatcagaacaagctgaaacctgagatggacgagaagggcaacctgaccaccgccggctttgcctgctctcagtgtggccagcccctgttcgtgtacaagctggagcaggtgtctgagaagggcaaggcttacaccaactacttcggacggtgcaatgtggccgagcacgaaaagctgatcctgctggcccagctgaagcccgagaaggatagcgacgaagccgtgacatatagcctgggaaagtttgggcagagggccctggatttctacagcattcatgtgaccaaggagtccacccaccccgtgaagcccctggcccagatcgccggaaacagatacgcctccggacctgtgggaaaggccctgagcgacgcatgtatgggcacaatcgcctccttcctgtctaagtaccaggacatcatcatcgaacaccagaaggtggtgaagggcaaccagaagagactggagagcctgcgggagctggccggcaaggaaaacctggaataccctagcgtgaccctgccacctcagcctcacaccaaggagggcgttgatgcctacaacgaagtgatcgcccgggtgcgaatgtgggtgaacctgaacctgtggcagaagctgaagctaagcagagatgatgccaagcctctgctgagactgaagggattcccttcctttcctctggtcgagagacaggccaacgaagtggactggtgggacatggtgtgtaacgtgaagaagctgatcaacgagaaaaaggaggatggcaaggtgttttggcagaatctggctggctacaagagacaggaagccctgagaccatacctgagcagcgaggaagatcggaagaagggaaagaaattcgctcggtaccagctgggcgacctgctgctgcacctggaaaagaagcacggcgaggactggggaaaggtgtacgacgaggcctgggagcggattgacaagaaagtggaaggcctgagcaagcacatcaagctggaagaggaacggagaagcgaggacgcccagagcaaggccgccctgaccgactggctgcgggctaaggccagcttcgtgatcgagggcctgaaggaggccgacaaggacgagttctgcagatgcgagctgaagctgcagaagtggtacggggacctgcggggaaagcccttcgccatcgaagccgagaacagcatcctggacatcagcggcttcagcaagcagtacaactgtgccttcatctggcagaaggacggcgtgaagaagctgaacctgtacctgatcatcaactacttcaagggcggcaagctgcggttcaagaagatcaaacctgaagccttcgaagccaacagattctacaccgtgatcaacaaaaagagcggcgagatcgtgcccatggaggtgaacttcaacttcgacgaccccaacctgatcatcctgcctctggcctttggcaagagacagggcagagaattcatctggaacgacctgctgtccctggaaaccggcagcctgaagctggccaacggaagagtgatcgagaagacactgtacaacagaagaacccggcaggatgagcctgccctgttcgtggccctgaccttcgagcggcgggaggtcctggactcctccaatatcaaaccaatgaacctgatcggcgtggcaagaggcgaaaacatccccgccgtgatcgccctgaccgaccccgagggctgcccactgagccggtttaaggatagcctgggaaacccaacccacatcctgagaatcggcgagagctataaggagaagcagcggaccatccaggccaagaaggaggtggagcagcggagagccggcggctacagccggaagtacgccagcaaagccaagaatctggcagacgatatggtgagaaacaccgctagagatctgctgtactacgccgtgacccaggatgccatgctgatcttcgccaacctgagccggggcttcggccggcagggcaagcggaccttcatggccgagagacagtacacacggatggaggactggctgaccgccaagctggcctacgagggcctgagcaagacctacctgtccaagacactggcccagtacacctccaagacatgcagcaactgtgggtttaccatcaccagcgccgactacgacagggtgctggagaagctgaagaagacagcaacaggctggatgaccacaattaacggcaaggagctgaaggtggagggccagattacctactacaacagatacaagagacagaacgtagtcaaggacctgtccgtcgagctggatagactgagcgaagaatctgtgaacaacgacatctcctcctggacaaagggcagaagcggagaagctctgagcctcctgaagaaaagattctcccatagacccgtgcaggagaagttcgtgtgcctgaactgcggcttcgagacacacgcagccgagcaagccgccctgaacatcgccagatcctggctgttcctgcggagccaggagtacaagaaataccagacaaacaagacaaccggcaacaccgataagagagccttcgtcgagacctggcagtccttttaccggaagaagcttaaggaggtgtggaaacctgccgtgcggtctggcggatctggcggaggctcctgcccacatgagcctgagcttcagggacgtggccatcgacctgagccaggaggagtgggagtgcctggaccccgtgcagagggccctgtacagggacgtgatgctggagaactacagcaacctggtgagcctgggctgcagcagccccaagcccgacgtgatcaccctgctggagcaggagagggagccctggaccgtgatgagggagggcaccaggagctggtacaccgacctggagagcaagggatctggctccggcagcggccccaagaaaaagagaaaagtctaagctgccttctgcggggcttgccttctggccatgcccttcttctctcccttgcacctgtacctcttggtctttgaataaagcctgagtaggaaggctagcaaaaaaaaaaaaaaaaaaaaaaaaaaaaaaaaaaaaaaaaaaaaaaaaaaaaaaaaaaaaaaaaaaaaaaaaaaaaaaaa

SEQ ID NO: 16291 - RNA, 9485 nt, synthetic construct
  source 1..9485: mol_type = other RNA
aggaaataagagagaaaagaagagtaagaagaaatataagagccaccatggcccctaagaagaagcgtaaagtgagccggatggaacgcctcgtctacgaggtgcggcagaagtgcagaaacatcgaggacatctgcatctcctgcggatctctgaacgtgaccctggagcacccactgttcatcggcggcatgtgccagaactgtaaaaactgttttctggagtgtgcctatcaatacgacgatgacggctaccagagctactgcaccatctgttgcggcggaagagaggtgctgatgtgtggaaataacaactgctgccggtgcttctgcgtggaatgcgtggacctgctggtgggccccggcgccgcccaggccgctattaaggaagatccttggaactgctacatgtgcggccacaagggcacatacggcctgctgagacggagagaggactggcctagcagactgcagatgttcttcgccaataaccacgaccaggagttcgacccccctaaggtgtaccctcccgtccccgccgagaagagaaagcccatccgggtcctgagcctgttcgatggcatcgccaccggtctgctggtgctgaaggacctgggcatccaggtggataggtacattgcctccgaggtgtgcgaggactccatcaccgtgggaatggtgcgtcatcagggcaagatcatgtacgtgggcgacgtgcggagcgtgacacagaagcatatccaggagtggggccctttcgacctggtgatcggcggcagcccttgcaatgacctgagcatcgtgaacccagcccggaagggcctgtacgagggaaccggcagactgttcttcgagttttacagactgctgcacgacgcccggcctaaggaaggcgacgaccggcccttcttttggctgttcgagaatgtggtggccatgggagtcagcgacaagcgggatattagccggttcctggagagcaaccccgtgatgatcgatgccaaggaagtgagcgccgcccaccgggccagatacttctggggcaatctgcctggcatgaacagacccctggccagcaccgtgaacgacaagctggagctgcaggagtgcctggagcacggccggatcgccaagttcagcaaggtgagaaccatcaccacccgaagcaacagcatcaaacaaggcaaggaccagcactttcctgtgttcatgaacgagaaggaggacatcctgtggtgtaccgagatggagagagtgttcgggttcccagtccactacacagatgtcagcaacatgtctagactggccagacagagactgctgggaagaagctggtccgtccctgtgatcagacacctgttcgcccctctgaaggagtacttcgcctgcgtgagcagcggcaacagcaacgccaacagccggggccccagcttctctagcggcctggtgccactgtccctgagagggagccacatgggccccatggagatctacaaaaccgtgagcgcctggaagcggcagcctgtgcgcgtgctgagcctgtttcggaatatcgataaagtcctgaaaagcctgggattcctggagagcggctctggctccggcggtggcaccctgaagtacgtggaggatgtgacaaacgtggtcagacgggatgtggagaagtggggccccttcgatctggtgtacggcagcacccaacccctgggcagctcttgtgaccggtgccctggctggtacatgtttcagttccaccggatcctgcagtacgccctgccgagacaggagtcccagcggccattcttttggattttcatggacaacttgctgctgaccgaggatgaccaggaaactaccactcggttcctgcagaccgaagccgtgaccctgcaggacgtgagaggccgggactaccagaacgccatgcgggtgtggtccaacatccctggactgaaaagcaagcacgcacctctgacccctaaagaagaggagtacctgcaggcccaggtgcggagcagaagcaagctggacgcccctaaggtggatctgctggtgaagaattgcctcctgcccctgagagagtacttcaagtatttcagccagaatagtctgcccctgggaggcagcggcggcggcgccctggtgacatttgaggacgtcgccgtgcggttcacccaggaggaatgggctctgctggatccttctcagaaaatcctgtaccgggacgtgatgagagagacataccggaatctgacctccgtgggcatcaactgggaatgttgggaccttgaagcctgcttcagaagcctgggaagaaacctgagagtgcaggtggtgaagagaaagtgcgagctgaccaacagcggcccctgcgccgagggcggcccaagcagcggcgcccctcctcccagcggcggcagcccagccggctccccaacctctaccgaggagggcacctctgagtccgccacccccgagagcggccctggcacctccaccgagcccagcgagggcagcgcacccggcagccctgccggcagccccacctccacagaggagggaaccagcaccgagcccagcgaaggcagcgccccaggcaccagcaccgagcctagtgagcaggagattaaacggatcaacaagatcagaagaagacttgtgaaagacagcaacaccaagaaggccggcaagacaggccccatgaaaaccctgctggttagagtgatgacacccgatctgagagagcggctggaaaacctgagaaagaagcctgaaaatatcccccagcccatcagcaatacatctagagccaacctgaataagctgctgaccgattacaccgaaatgaagaaggcgatcctgcatgtgtactgggaagagttccagaaggaccctgtgggcctgatgagccgggtggcccagcctgccagcaagaagatcgatcagaacaagctgaaacctgagatggacgagaagggcaacctgaccaccgccggctttgcctgctctcagtgtggccagcccctgttcgtgtacaagctggagcaggtgtctgagaagggcaaggcttacaccaactacttcggacggtgcaatgtggccgagcacgaaaagctgatcctgctggcccagctgaagcccgagaaggatagcgacgaagccgtgacatatagcctgggaaagtttgggcagagggccctggatttctacagcattcatgtgaccaaggagtccacccaccccgtgaagcccctggcccagatcgccggaaacagatacgcctccggacctgtgggaaaggccctgagcgacgcatgtatgggcacaatcgcctccttcctgtctaagtaccaggacatcatcatcgaacaccagaaggtggtgaagggcaaccagaagagactggagagcctgcgggagctggccggcaaggaaaacctggaataccctagcgtgaccctgccacctcagcctcacaccaaggagggcgttgatgcctacaacgaagtgatcgcccgggtgcgaatgtgggtgaacctgaacctgtggcagaagctgaagctaagcagagatgatgccaagcctctgctgagactgaagggattcccttcctttcctctggtcgagagacaggccaacgaagtggactggtgggacatggtgtgtaacgtgaagaagctgatcaacgagaaaaaggaggatggcaaggtgttttggcagaatctggctggctacaagagacaggaagccctgagaccatacctgagcagcgaggaagatcggaagaagggaaagaaattcgctcggtaccagctgggcgacctgctgctgcacctggaaaagaagcacggcgaggactggggaaaggtgtacgacgaggcctgggagcggattgacaagaaagtggaaggcctgagcaagcacatcaagctggaagaggaacggagaagcgaggacgcccagagcaaggccgccctgaccgactggctgcgggctaaggccagcttcgtgatcgagggcctgaaggaggccgacaaggacgagttctgcagatgcgagctgaagctgcagaagtggtacggggacctgcggggaaagcccttcgccatcgaagccgagaacagcatcctggacatcagcggcttcagcaagcagtacaactgtgccttcatctggcagaaggacggcgtgaagaagctgaacctgtacctgatcatcaactacttcaagggcggcaagctgcggttcaagaagatcaaacctgaagccttcgaagccaacagattctacaccgtgatcaacaaaaagagcggcgagatcgtgcccatggaggtgaacttcaacttcgacgaccccaacctgatcatcctgcctctggcctttggcaagagacagggcagagaattcatctggaacgacctgctgtccctggaaaccggcagcctgaagctggccaacggaagagtgatcgagaagacactgtacaacagaagaacccggcaggatgagcctgccctgttcgtggccctgaccttcgagcggcgggaggtcctggactcctccaatatcaaaccaatgaacctgatcggcgtggcaagaggcgaaaacatccccgccgtgatcgccctgaccgaccccgagggctgcccactgagccggtttaaggatagcctgggaaacccaacccacatcctgagaatcggcgagagctataaggagaagcagcggaccatccaggccaagaaggaggtggagcagcggagagccggcggctacagccggaagtacgccagcaaagccaagaatctggcagacgatatggtgagaaacaccgctagagatctgctgtactacgccgtgacccaggatgccatgctgatcttcgccaacctgagccggggcttcggccggcagggcaagcggaccttcatggccgagagacagtacacacggatggaggactggctgaccgccaagctggcctacgagggcctgagcaagacctacctgtccaagacactggcccagtacacctccaagacatgcagcaactgtgggtttaccatcaccagcgccgactacgacagggtgctggagaagctgaagaagacagcaacaggctggatgaccacaattaacggcaaggagctgaaggtggagggccagattacctactacaacagatacaagagacagaacgtagtcaaggacctgtccgtcgagctggatagactgagcgaagaatctgtgaacaacgacatctcctcctggacaaagggcagaagcggagaagctctgagcctcctgaagaaaagattctcccatagacccgtgcaggagaagttcgtgtgcctgaactgcggcttcgagacacacgcagccgagcaagccgccctgaacatcgccagatcctggctgttcctgcggagccaggagtacaagaaataccagacaaacaagacaaccggcaacaccgataagagagccttcgtcgagacctggcagtccttttaccggaagaagcttaaggaggtgtggaaacctgccgtgcggtctggcggatctggcggaggctcccaccaggaggtggtgaccttcgaggacgtggccgtgtacttcacccagaccgagtgggccggcctgagccccgcccagagggccctgtacaggagcgtgatgctggagatctacggcaacctgaccagcctgggctaccccgtgcccaagcccgccctggtgagcctgctggagaggggcgacctgccctggggcctggagaccagggacgacccccccgcccagggcaccaaggacatctgcggcggcccaagcagcggcgcccctcctcccagcggcggcagcccagccggctccccaacctctaccgaggagggcacctctgagtccgccacccccgagagcggccctggcacctccaccgagcccagcgagggcagcgcacccggcagccctgccggcagccccacctccacagaggagggaaccagcaccgagcccagcgaaggcagcgccccaggcaccagcaccgagcctagtgagcaggagattaaacggatcaacaagatcagaagaagacttgtgaaagacagcaacaccaagaaggccggcaagacaggccccatgaaaaccctgctggttagagtgatgacacccgatctgagagagcggctggaaaacctgagaaagaagcctgaaaatatcccccagcccatcagcaatacatctagagccaacctgaataagctgctgaccgattacaccgaaatgaagaaggcgatcctgcatgtgtactgggaagagttccagaaggaccctgtgggcctgatgagccgggtggcccagcctgccagcaagaagatcgatcagaacaagctgaaacctgagatggacgagaagggcaacctgaccaccgccggctttgcctgctctcagtgtggccagcccctgttcgtgtacaagctggagcaggtgtctgagaagggcaaggcttacaccaactacttcggacggtgcaatgtggccgagcacgaaaagctgatcctgctggcccagctgaagcccgagaaggatagcgacgaagccgtgacatatagcctgggaaagtttgggcagagggccctggatttctacagcattcatgtgaccaaggagtccacccaccccgtgaagcccctggcccagatcgccggaaacagatacgcctccggacctgtgggaaaggccctgagcgacgcatgtatgggcacaatcgcctccttcctgtctaagtaccaggacatcatcatcgaacaccagaaggtggtgaagggcaaccagaagagactggagagcctgcgggagctggccggcaaggaaaacctggaataccctagcgtgaccctgccacctcagcctcacaccaaggagggcgttgatgcctacaacgaagtgatcgcccgggtgcgaatgtgggtgaacctgaacctgtggcagaagctgaagctaagcagagatgatgccaagcctctgctgagactgaagggattcccttcctttcctctggtcgagagacaggccaacgaagtggactggtgggacatggtgtgtaacgtgaagaagctgatcaacgagaaaaaggaggatggcaaggtgttttggcagaatctggctggctacaagagacaggaagccctgagaccatacctgagcagcgaggaagatcggaagaagggaaagaaattcgctcggtaccagctgggcgacctgctgctgcacctggaaaagaagcacggcgaggactggggaaaggtgtacgacgaggcctgggagcggattgacaagaaagtggaaggcctgagcaagcacatcaagctggaagaggaacggagaagcgaggacgcccagagcaaggccgccctgaccgactggctgcgggctaaggccagcttcgtgatcgagggcctgaaggaggccgacaaggacgagttctgcagatgcgagctgaagctgcagaagtggtacggggacctgcggggaaagcccttcgccatcgaagccgagaacagcatcctggacatcagcggcttcagcaagcagtacaactgtgccttcatctggcagaaggacggcgtgaagaagctgaacctgtacctgatcatcaactacttcaagggcggcaagctgcggttcaagaagatcaaacctgaagccttcgaagccaacagattctacaccgtgatcaacaaaaagagcggcgagatcgtgcccatggaggtgaacttcaacttcgacgaccccaacctgatcatcctgcctctggcctttggcaagagacagggcagagaattcatctggaacgacctgctgtccctggaaaccggcagcctgaagctggccaacggaagagtgatcgagaagacactgtacaacagaagaacccggcaggatgagcctgccctgttcgtggccctgaccttcgagcggcgggaggtcctggactcctccaatatcaaaccaatgaacctgatcggcgtggcaagaggcgaaaacatccccgccgtgatcgccctgaccgaccccgagggctgcccactgagccggtttaaggatagcctgggaaacccaacccacatcctgagaatcggcgagagctataaggagaagcagcggaccatccaggccaagaaggaggtggagcagcggagagccggcggctacagccggaagtacgccagcaaagccaagaatctggcagacgatatggtgagaaacaccgctagagatctgctgtactacgccgtgacccaggatgccatgctgatcttcgccaacctgagccggggcttcggccggcagggcaagcggaccttcatggccgagagacagtacacacggatggaggactggctgaccgccaagctggcctacgagggcctgagcaagacctacctgtccaagacactggcccagtacacctccaagacatgcagcaactgtgggtttaccatcaccagcgccgactacgacagggtgctggagaagctgaagaagacagcaacaggctggatgaccacaattaacggcaaggagctgaaggtggagggccagattacctactacaacagatacaagagacagaacgtagtcaaggacctgtccgtcgagctggatagactgagcgaagaatctgtgaacaacgacatctcctcctggacaaagggcagaagcggagaagctctgagcctcctgaagaaaagattctcccatagacccgtgcaggagaagttcgtgtgcctgaactgcggcttcgagacacacgcagccgagcaagccgccctgaacatcgccagatcctggctgttcctgcggagccaggagtacaagaaataccagacaaacaagacaaccggcaacaccgataagagagccttcgtcgagacctggcagtccttttaccggaagaagcttaaggaggtgtggaaacctgccgtgcggtctggcggatctggcggaggctcctcaccaggaggtggtgaccttcgaggacgtggccgtgtacttcacccagaccgagtgggccggcctgagccccgcccagagggccctgtacaggagcgtgatgctggagatctacggcaacctgaccagcctgggctaccccgtgcccaagcccgccctggtgagcctgctggagaggggcgacctgccctggggcctggagaccagggacgacccccccgcccagggcaccaaggacatctgcggatctggctccggcagcggccccaagaaaaagagaaaagtctaagctgccttctgcggggcttgccttctggccatgcccttcttctctcccttgcacctgtacctcttggtctttgaataaagcctgagtaggaaggctagcaaaaaaaaaaaaaaaaaaaaaaaaaaaaaaaaaaaaaaaaaaaaaaaaaaaaaaaaaaaaaaaaaaaaaaaaaaaaaaaa

SEQ ID NO: 16292 - RNA, 9485 nt, synthetic construct
  source 1..9485: mol_type = other RNA
aggaaataagagagaaaagaagagtaagaagaaatataagagccaccatggcccctaagaagaagcgtaaagtgagccggatggaacgcctcgtctacgaggtgcggcagaagtgcagaaacatcgaggacatctgcatctcctgcggatctctgaacgtgaccctggagcacccactgttcatcggcggcatgtgccagaactgtaaaaactgttttctggagtgtgcctatcaatacgacgatgacggctaccagagctactgcaccatctgttgcggcggaagagaggtgctgatgtgtggaaataacaactgctgccggtgcttctgcgtggaatgcgtggacctgctggtgggccccggcgccgcccaggccgctattaaggaagatccttggaactgctacatgtgcggccacaagggcacatacggcctgctgagacggagagaggactggcctagcagactgcagatgttcttcgccaataaccacgaccaggagttcgacccccctaaggtgtaccctcccgtccccgccgagaagagaaagcccatccgggtcctgagcctgttcgatggcatcgccaccggtctgctggtgctgaaggacctgggcatccaggtggataggtacattgcctccgaggtgtgcgaggactccatcaccgtgggaatggtgcgtcatcagggcaagatcatgtacgtgggcgacgtgcggagcgtgacacagaagcatatccaggagtggggccctttcgacctggtgatcggcggcagcccttgcaatgacctgagcatcgtgaacccagcccggaagggcctgtacgagggaaccggcagactgttcttcgagttttacagactgctgcacgacgcccggcctaaggaaggcgacgaccggcccttcttttggctgttcgagaatgtggtggccatgggagtcagcgacaagcgggatattagccggttcctggagagcaaccccgtgatgatcgatgccaaggaagtgagcgccgcccaccgggccagatacttctggggcaatctgcctggcatgaacagacccctggccagcaccgtgaacgacaagctggagctgcaggagtgcctggagcacggccggatcgccaagttcagcaaggtgagaaccatcaccacccgaagcaacagcatcaaacaaggcaaggaccagcactttcctgtgttcatgaacgagaaggaggacatcctgtggtgtaccgagatggagagagtgttcgggttcccagtccactacacagatgtcagcaacatgtctagactggccagacagagactgctgggaagaagctggtccgtccctgtgatcagacacctgttcgcccctctgaaggagtacttcgcctgcgtgagcagcggcaacagcaacgccaacagccggggccccagcttctctagcggcctggtgccactgtccctgagagggagccacatgggccccatggagatctacaaaaccgtgagcgcctggaagcggcagcctgtgcgcgtgctgagcctgtttcggaatatcgataaagtcctgaaaagcctgggattcctggagagcggctctggctccggcggtggcaccctgaagtacgtggaggatgtgacaaacgtggtcagacgggatgtggagaagtggggccccttcgatctggtgtacggcagcacccaacccctgggcagctcttgtgaccggtgccctggctggtacatgtttcagttccaccggatcctgcagtacgccctgccgagacaggagtcccagcggccattcttttggattttcatggacaacttgctgctgaccgaggatgaccaggaaactaccactcggttcctgcagaccgaagccgtgaccctgcaggacgtgagaggccgggactaccagaacgccatgcgggtgtggtccaacatccctggactgaaaagcaagcacgcacctctgacccctaaagaagaggagtacctgcaggcccaggtgcggagcagaagcaagctggacgcccctaaggtggatctgctggtgaagaattgcctcctgcccctgagagagtacttcaagtatttcagccagaatagtctgcccctgggaggcagcggcggcggcgccctggtgacatttgaggacgtcgccgtgcggttcacccaggaggaatgggctctgctggatccttctcagaaaatcctgtaccgggacgtgatgagagagacataccggaatctgacctccgtgggcatcaactgggaatgttgggaccttgaagcctgcttcagaagcctgggaagaaacctgagagtgcaggtggtgaagagaaagtgcgagctgaccaacagcggcccctgcgccgagggcggcccaagcagcggcgcccctcctcccagcggcggcagcccagccggctccccaacctctaccgaggagggcacctctgagtccgccacccccgagagcggccctggcacctccaccgagcccagcgagggcagcgcacccggcagccctgccggcagccccacctccacagaggagggaaccagcaccgagcccagcgaaggcagcgccccaggcaccagcaccgagcctagtgagcaggagattaaacggatcaacaagatcagaagaagacttgtgaaagacagcaacaccaagaaggccggcaagacaggccccatgaaaaccctgctggttagagtgatgacacccgatctgagagagcggctggaaaacctgagaaagaagcctgaaaatatcccccagcccatcagcaatacatctagagccaacctgaataagctgctgaccgattacaccgaaatgaagaaggcgatcctgcatgtgtactgggaagagttccagaaggaccctgtgggcctgatgagccgggtggcccagcctgccagcaagaagatcgatcagaacaagctgaaacctgagatggacgagaagggcaacctgaccaccgccggctttgcctgctctcagtgtggccagcccctgttcgtgtacaagctggagcaggtgtctgagaagggcaaggcttacaccaactacttcggacggtgcaatgtggccgagcacgaaaagctgatcctgctggcccagctgaagcccgagaaggatagcgacgaagccgtgacatatagcctgggaaagtttgggcagagggccctggatttctacagcattcatgtgaccaaggagtccacccaccccgtgaagcccctggcccagatcgccggaaacagatacgcctccggacctgtgggaaaggccctgagcgacgcatgtatgggcacaatcgcctccttcctgtctaagtaccaggacatcatcatcgaacaccagaaggtggtgaagggcaaccagaagagactggagagcctgcgggagctggccggcaaggaaaacctggaataccctagcgtgaccctgccacctcagcctcacaccaaggagggcgttgatgcctacaacgaagtgatcgcccgggtgcgaatgtgggtgaacctgaacctgtggcagaagctgaagctaagcagagatgatgccaagcctctgctgagactgaagggattcccttcctttcctctggtcgagagacaggccaacgaagtggactggtgggacatggtgtgtaacgtgaagaagctgatcaacgagaaaaaggaggatggcaaggtgttttggcagaatctggctggctacaagagacaggaagccctgagaccatacctgagcagcgaggaagatcggaagaagggaaagaaattcgctcggtaccagctgggcgacctgctgctgcacctggaaaagaagcacggcgaggactggggaaaggtgtacgacgaggcctgggagcggattgacaagaaagtggaaggcctgagcaagcacatcaagctggaagaggaacggagaagcgaggacgcccagagcaaggccgccctgaccgactggctgcgggctaaggccagcttcgtgatcgagggcctgaaggaggccgacaaggacgagttctgcagatgcgagctgaagctgcagaagtggtacggggacctgcggggaaagcccttcgccatcgaagccgagaacagcatcctggacatcagcggcttcagcaagcagtacaactgtgccttcatctggcagaaggacggcgtgaagaagctgaacctgtacctgatcatcaactacttcaagggcggcaagctgcggttcaagaagatcaaacctgaagccttcgaagccaacagattctacaccgtgatcaacaaaaagagcggcgagatcgtgcccatggaggtgaacttcaacttcgacgaccccaacctgatcatcctgcctctggcctttggcaagagacagggcagagaattcatctggaacgacctgctgtccctggaaaccggcagcctgaagctggccaacggaagagtgatcgagaagacactgtacaacagaagaacccggcaggatgagcctgccctgttcgtggccctgaccttcgagcggcgggaggtcctggactcctccaatatcaaaccaatgaacctgatcggcgtggcaagaggcgaaaacatccccgccgtgatcgccctgaccgaccccgagggctgcccactgagccggtttaaggatagcctgggaaacccaacccacatcctgagaatcggcgagagctataaggagaagcagcggaccatccaggccaagaaggaggtggagcagcggagagccggcggctacagccggaagtacgccagcaaagccaagaatctggcagacgatatggtgagaaacaccgctagagatctgctgtactacgccgtgacccaggatgccatgctgatcttcgccaacctgagccggggcttcggccggcagggcaagcggaccttcatggccgagagacagtacacacggatggaggactggctgaccgccaagctggcctacgagggcctgagcaagacctacctgtccaagacactggcccagtacacctccaagacatgcagcaactgtgggtttaccatcaccagcgccgactacgacagggtgctggagaagctgaagaagacagcaacaggctggatgaccacaattaacggcaaggagctgaaggtggagggccagattacctactacaacagatacaagagacagaacgtagtcaaggacctgtccgtcgagctggatagactgagcgaagaatctgtgaacaacgacatctcctcctggacaaagggcagaagcggagaagctctgagcctcctgaagaaaagattctcccatagacccgtgcaggagaagttcgtgtgcctgaactgcggcttcgagacacacgcagccgagcaagccgccctgaacatcgccagatcctggctgttcctgcggagccaggagtacaagaaataccagacaaacaagacaaccggcaacaccgataagagagccttcgtcgagacctggcagtccttttaccggaagaagcttaaggaggtgtggaaacctgccgtgcggtctggcggatctggcggaggctccgagcccggcgccgtgagcttcggcgacgtggccgtgtacttcagcagggaggagtggggctgcctgaggcccgcccagagggccctgtacagggacgtgatgagggagacctacagccacctgggcgccctgggcgtgggcggcagcaagcccgccctgatcagctggatggaggaggaggccgagctgtgggtgcccgccgcccaggaccccgaggtggccaagtgccccaccgaggccgacggcggcccaagcagcggcgcccctcctcccagcggcggcagcccagccggctccccaacctctaccgaggagggcacctctgagtccgccacccccgagagcggccctggcacctccaccgagcccagcgagggcagcgcacccggcagccctgccggcagccccacctccacagaggagggaaccagcaccgagcccagcgaaggcagcgccccaggcaccagcaccgagcctagtgagcaggagattaaacggatcaacaagatcagaagaagacttgtgaaagacagcaacaccaagaaggccggcaagacaggccccatgaaaaccctgctggttagagtgatgacacccgatctgagagagcggctggaaaacctgagaaagaagcctgaaaatatcccccagcccatcagcaatacatctagagccaacctgaataagctgctgaccgattacaccgaaatgaagaaggcgatcctgcatgtgtactgggaagagttccagaaggaccctgtgggcctgatgagccgggtggcccagcctgccagcaagaagatcgatcagaacaagctgaaacctgagatggacgagaagggcaacctgaccaccgccggctttgcctgctctcagtgtggccagcccctgttcgtgtacaagctggagcaggtgtctgagaagggcaaggcttacaccaactacttcggacggtgcaatgtggccgagcacgaaaagctgatcctgctggcccagctgaagcccgagaaggatagcgacgaagccgtgacatatagcctgggaaagtttgggcagagggccctggatttctacagcattcatgtgaccaaggagtccacccaccccgtgaagcccctggcccagatcgccggaaacagatacgcctccggacctgtgggaaaggccctgagcgacgcatgtatgggcacaatcgcctccttcctgtctaagtaccaggacatcatcatcgaacaccagaaggtggtgaagggcaaccagaagagactggagagcctgcgggagctggccggcaaggaaaacctggaataccctagcgtgaccctgccacctcagcctcacaccaaggagggcgttgatgcctacaacgaagtgatcgcccgggtgcgaatgtgggtgaacctgaacctgtggcagaagctgaagctaagcagagatgatgccaagcctctgctgagactgaagggattcccttcctttcctctggtcgagagacaggccaacgaagtggactggtgggacatggtgtgtaacgtgaagaagctgatcaacgagaaaaaggaggatggcaaggtgttttggcagaatctggctggctacaagagacaggaagccctgagaccatacctgagcagcgaggaagatcggaagaagggaaagaaattcgctcggtaccagctgggcgacctgctgctgcacctggaaaagaagcacggcgaggactggggaaaggtgtacgacgaggcctgggagcggattgacaagaaagtggaaggcctgagcaagcacatcaagctggaagaggaacggagaagcgaggacgcccagagcaaggccgccctgaccgactggctgcgggctaaggccagcttcgtgatcgagggcctgaaggaggccgacaaggacgagttctgcagatgcgagctgaagctgcagaagtggtacggggacctgcggggaaagcccttcgccatcgaagccgagaacagcatcctggacatcagcggcttcagcaagcagtacaactgtgccttcatctggcagaaggacggcgtgaagaagctgaacctgtacctgatcatcaactacttcaagggcggcaagctgcggttcaagaagatcaaacctgaagccttcgaagccaacagattctacaccgtgatcaacaaaaagagcggcgagatcgtgcccatggaggtgaacttcaacttcgacgaccccaacctgatcatcctgcctctggcctttggcaagagacagggcagagaattcatctggaacgacctgctgtccctggaaaccggcagcctgaagctggccaacggaagagtgatcgagaagacactgtacaacagaagaacccggcaggatgagcctgccctgttcgtggccctgaccttcgagcggcgggaggtcctggactcctccaatatcaaaccaatgaacctgatcggcgtggcaagaggcgaaaacatccccgccgtgatcgccctgaccgaccccgagggctgcccactgagccggtttaaggatagcctgggaaacccaacccacatcctgagaatcggcgagagctataaggagaagcagcggaccatccaggccaagaaggaggtggagcagcggagagccggcggctacagccggaagtacgccagcaaagccaagaatctggcagacgatatggtgagaaacaccgctagagatctgctgtactacgccgtgacccaggatgccatgctgatcttcgccaacctgagccggggcttcggccggcagggcaagcggaccttcatggccgagagacagtacacacggatggaggactggctgaccgccaagctggcctacgagggcctgagcaagacctacctgtccaagacactggcccagtacacctccaagacatgcagcaactgtgggtttaccatcaccagcgccgactacgacagggtgctggagaagctgaagaagacagcaacaggctggatgaccacaattaacggcaaggagctgaaggtggagggccagattacctactacaacagatacaagagacagaacgtagtcaaggacctgtccgtcgagctggatagactgagcgaagaatctgtgaacaacgacatctcctcctggacaaagggcagaagcggagaagctctgagcctcctgaagaaaagattctcccatagacccgtgcaggagaagttcgtgtgcctgaactgcggcttcgagacacacgcagccgagcaagccgccctgaacatcgccagatcctggctgttcctgcggagccaggagtacaagaaataccagacaaacaagacaaccggcaacaccgataagagagccttcgtcgagacctggcagtccttttaccggaagaagcttaaggaggtgtggaaacctgccgtgcggtctggcggatctggcggaggctcctgagcccggcgccgtgagcttcggcgacgtggccgtgtacttcagcagggaggagtggggctgcctgaggcccgcccagagggccctgtacagggacgtgatgagggagacctacagccacctgggcgccctgggcgtgggcggcagcaagcccgccctgatcagctggatggaggaggaggccgagctgtgggtgcccgccgcccaggaccccgaggtggccaagtgccccaccgaggccgacggatctggctccggcagcggccccaagaaaaagagaaaagtctaagctgccttctgcggggcttgccttctggccatgcccttcttctctcccttgcacctgtacctcttggtctttgaataaagcctgagtaggaaggctagcaaaaaaaaaaaaaaaaaaaaaaaaaaaaaaaaaaaaaaaaaaaaaaaaaaaaaaaaaaaaaaaaaaaaaaaaaaaaaaaa

SEQ ID NO: 16293 - RNA, 9485 nt, synthetic construct
  source 1..9485: mol_type = other RNA
aggaaataagagagaaaagaagagtaagaagaaatataagagccaccatggcccctaagaagaagcgtaaagtgagccggatggaacgcctcgtctacgaggtgcggcagaagtgcagaaacatcgaggacatctgcatctcctgcggatctctgaacgtgaccctggagcacccactgttcatcggcggcatgtgccagaactgtaaaaactgttttctggagtgtgcctatcaatacgacgatgacggctaccagagctactgcaccatctgttgcggcggaagagaggtgctgatgtgtggaaataacaactgctgccggtgcttctgcgtggaatgcgtggacctgctggtgggccccggcgccgcccaggccgctattaaggaagatccttggaactgctacatgtgcggccacaagggcacatacggcctgctgagacggagagaggactggcctagcagactgcagatgttcttcgccaataaccacgaccaggagttcgacccccctaaggtgtaccctcccgtccccgccgagaagagaaagcccatccgggtcctgagcctgttcgatggcatcgccaccggtctgctggtgctgaaggacctgggcatccaggtggataggtacattgcctccgaggtgtgcgaggactccatcaccgtgggaatggtgcgtcatcagggcaagatcatgtacgtgggcgacgtgcggagcgtgacacagaagcatatccaggagtggggccctttcgacctggtgatcggcggcagcccttgcaatgacctgagcatcgtgaacccagcccggaagggcctgtacgagggaaccggcagactgttcttcgagttttacagactgctgcacgacgcccggcctaaggaaggcgacgaccggcccttcttttggctgttcgagaatgtggtggccatgggagtcagcgacaagcgggatattagccggttcctggagagcaaccccgtgatgatcgatgccaaggaagtgagcgccgcccaccgggccagatacttctggggcaatctgcctggcatgaacagacccctggccagcaccgtgaacgacaagctggagctgcaggagtgcctggagcacggccggatcgccaagttcagcaaggtgagaaccatcaccacccgaagcaacagcatcaaacaaggcaaggaccagcactttcctgtgttcatgaacgagaaggaggacatcctgtggtgtaccgagatggagagagtgttcgggttcccagtccactacacagatgtcagcaacatgtctagactggccagacagagactgctgggaagaagctggtccgtccctgtgatcagacacctgttcgcccctctgaaggagtacttcgcctgcgtgagcagcggcaacagcaacgccaacagccggggccccagcttctctagcggcctggtgccactgtccctgagagggagccacatgggccccatggagatctacaaaaccgtgagcgcctggaagcggcagcctgtgcgcgtgctgagcctgtttcggaatatcgataaagtcctgaaaagcctgggattcctggagagcggctctggctccggcggtggcaccctgaagtacgtggaggatgtgacaaacgtggtcagacgggatgtggagaagtggggccccttcgatctggtgtacggcagcacccaacccctgggcagctcttgtgaccggtgccctggctggtacatgtttcagttccaccggatcctgcagtacgccctgccgagacaggagtcccagcggccattcttttggattttcatggacaacttgctgctgaccgaggatgaccaggaaactaccactcggttcctgcagaccgaagccgtgaccctgcaggacgtgagaggccgggactaccagaacgccatgcgggtgtggtccaacatccctggactgaaaagcaagcacgcacctctgacccctaaagaagaggagtacctgcaggcccaggtgcggagcagaagcaagctggacgcccctaaggtggatctgctggtgaagaattgcctcctgcccctgagagagtacttcaagtatttcagccagaatagtctgcccctgggaggcagcggcggcggcgccctggtgacatttgaggacgtcgccgtgcggttcacccaggaggaatgggctctgctggatccttctcagaaaatcctgtaccgggacgtgatgagagagacataccggaatctgacctccgtgggcatcaactgggaatgttgggaccttgaagcctgcttcagaagcctgggaagaaacctgagagtgcaggtggtgaagagaaagtgcgagctgaccaacagcggcccctgcgccgagggcggcccaagcagcggcgcccctcctcccagcggcggcagcccagccggctccccaacctctaccgaggagggcacctctgagtccgccacccccgagagcggccctggcacctccaccgagcccagcgagggcagcgcacccggcagccctgccggcagccccacctccacagaggagggaaccagcaccgagcccagcgaaggcagcgccccaggcaccagcaccgagcctagtgagcaggagattaaacggatcaacaagatcagaagaagacttgtgaaagacagcaacaccaagaaggccggcaagacaggccccatgaaaaccctgctggttagagtgatgacacccgatctgagagagcggctggaaaacctgagaaagaagcctgaaaatatcccccagcccatcagcaatacatctagagccaacctgaataagctgctgaccgattacaccgaaatgaagaaggcgatcctgcatgtgtactgggaagagttccagaaggaccctgtgggcctgatgagccgggtggcccagcctgccagcaagaagatcgatcagaacaagctgaaacctgagatggacgagaagggcaacctgaccaccgccggctttgcctgctctcagtgtggccagcccctgttcgtgtacaagctggagcaggtgtctgagaagggcaaggcttacaccaactacttcggacggtgcaatgtggccgagcacgaaaagctgatcctgctggcccagctgaagcccgagaaggatagcgacgaagccgtgacatatagcctgggaaagtttgggcagagggccctggatttctacagcattcatgtgaccaaggagtccacccaccccgtgaagcccctggcccagatcgccggaaacagatacgcctccggacctgtgggaaaggccctgagcgacgcatgtatgggcacaatcgcctccttcctgtctaagtaccaggacatcatcatcgaacaccagaaggtggtgaagggcaaccagaagagactggagagcctgcgggagctggccggcaaggaaaacctggaataccctagcgtgaccctgccacctcagcctcacaccaaggagggcgttgatgcctacaacgaagtgatcgcccgggtgcgaatgtgggtgaacctgaacctgtggcagaagctgaagctaagcagagatgatgccaagcctctgctgagactgaagggattcccttcctttcctctggtcgagagacaggccaacgaagtggactggtgggacatggtgtgtaacgtgaagaagctgatcaacgagaaaaaggaggatggcaaggtgttttggcagaatctggctggctacaagagacaggaagccctgagaccatacctgagcagcgaggaagatcggaagaagggaaagaaattcgctcggtaccagctgggcgacctgctgctgcacctggaaaagaagcacggcgaggactggggaaaggtgtacgacgaggcctgggagcggattgacaagaaagtggaaggcctgagcaagcacatcaagctggaagaggaacggagaagcgaggacgcccagagcaaggccgccctgaccgactggctgcgggctaaggccagcttcgtgatcgagggcctgaaggaggccgacaaggacgagttctgcagatgcgagctgaagctgcagaagtggtacggggacctgcggggaaagcccttcgccatcgaagccgagaacagcatcctggacatcagcggcttcagcaagcagtacaactgtgccttcatctggcagaaggacggcgtgaagaagctgaacctgtacctgatcatcaactacttcaagggcggcaagctgcggttcaagaagatcaaacctgaagccttcgaagccaacagattctacaccgtgatcaacaaaaagagcggcgagatcgtgcccatggaggtgaacttcaacttcgacgaccccaacctgatcatcctgcctctggcctttggcaagagacagggcagagaattcatctggaacgacctgctgtccctggaaaccggcagcctgaagctggccaacggaagagtgatcgagaagacactgtacaacagaagaacccggcaggatgagcctgccctgttcgtggccctgaccttcgagcggcgggaggtcctggactcctccaatatcaaaccaatgaacctgatcggcgtggcaagaggcgaaaacatccccgccgtgatcgccctgaccgaccccgagggctgcccactgagccggtttaaggatagcctgggaaacccaacccacatcctgagaatcggcgagagctataaggagaagcagcggaccatccaggccaagaaggaggtggagcagcggagagccggcggctacagccggaagtacgccagcaaagccaagaatctggcagacgatatggtgagaaacaccgctagagatctgctgtactacgccgtgacccaggatgccatgctgatcttcgccaacctgagccggggcttcggccggcagggcaagcggaccttcatggccgagagacagtacacacggatggaggactggctgaccgccaagctggcctacgagggcctgagcaagacctacctgtccaagacactggcccagtacacctccaagacatgcagcaactgtgggtttaccatcaccagcgccgactacgacagggtgctggagaagctgaagaagacagcaacaggctggatgaccacaattaacggcaaggagctgaaggtggagggccagattacctactacaacagatacaagagacagaacgtagtcaaggacctgtccgtcgagctggatagactgagcgaagaatctgtgaacaacgacatctcctcctggacaaagggcagaagcggagaagctctgagcctcctgaagaaaagattctcccatagacccgtgcaggagaagttcgtgtgcctgaactgcggcttcgagacacacgcagccgagcaagccgccctgaacatcgccagatcctggctgttcctgcggagccaggagtacaagaaataccagacaaacaagacaaccggcaacaccgataagagagccttcgtcgagacctggcagtccttttaccggaagaagcttaaggaggtgtggaaacctgccgtgcggtctggcggatctggcggaggctccgcccagggccccgtgaccttcgaggaggtggccgtgtacttcaccagggaggagggcgccctgctggaccccacccagagggccctgtacagggacgtgatgcaggagaactacgagaccgtggtgctgctgggcttccccgtgagcaagcccgacgtgatcagccagctggagcagggcgaggagccctggatccccgacctgcagggcagcgagaaggaggtgctgcccagggccgcctgcggcggcccaagcagcggcgcccctcctcccagcggcggcagcccagccggctccccaacctctaccgaggagggcacctctgagtccgccacccccgagagcggccctggcacctccaccgagcccagcgagggcagcgcacccggcagccctgccggcagccccacctccacagaggagggaaccagcaccgagcccagcgaaggcagcgccccaggcaccagcaccgagcctagtgagcaggagattaaacggatcaacaagatcagaagaagacttgtgaaagacagcaacaccaagaaggccggcaagacaggccccatgaaaaccctgctggttagagtgatgacacccgatctgagagagcggctggaaaacctgagaaagaagcctgaaaatatcccccagcccatcagcaatacatctagagccaacctgaataagctgctgaccgattacaccgaaatgaagaaggcgatcctgcatgtgtactgggaagagttccagaaggaccctgtgggcctgatgagccgggtggcccagcctgccagcaagaagatcgatcagaacaagctgaaacctgagatggacgagaagggcaacctgaccaccgccggctttgcctgctctcagtgtggccagcccctgttcgtgtacaagctggagcaggtgtctgagaagggcaaggcttacaccaactacttcggacggtgcaatgtggccgagcacgaaaagctgatcctgctggcccagctgaagcccgagaaggatagcgacgaagccgtgacatatagcctgggaaagtttgggcagagggccctggatttctacagcattcatgtgaccaaggagtccacccaccccgtgaagcccctggcccagatcgccggaaacagatacgcctccggacctgtgggaaaggccctgagcgacgcatgtatgggcacaatcgcctccttcctgtctaagtaccaggacatcatcatcgaacaccagaaggtggtgaagggcaaccagaagagactggagagcctgcgggagctggccggcaaggaaaacctggaataccctagcgtgaccctgccacctcagcctcacaccaaggagggcgttgatgcctacaacgaagtgatcgcccgggtgcgaatgtgggtgaacctgaacctgtggcagaagctgaagctaagcagagatgatgccaagcctctgctgagactgaagggattcccttcctttcctctggtcgagagacaggccaacgaagtggactggtgggacatggtgtgtaacgtgaagaagctgatcaacgagaaaaaggaggatggcaaggtgttttggcagaatctggctggctacaagagacaggaagccctgagaccatacctgagcagcgaggaagatcggaagaagggaaagaaattcgctcggtaccagctgggcgacctgctgctgcacctggaaaagaagcacggcgaggactggggaaaggtgtacgacgaggcctgggagcggattgacaagaaagtggaaggcctgagcaagcacatcaagctggaagaggaacggagaagcgaggacgcccagagcaaggccgccctgaccgactggctgcgggctaaggccagcttcgtgatcgagggcctgaaggaggccgacaaggacgagttctgcagatgcgagctgaagctgcagaagtggtacggggacctgcggggaaagcccttcgccatcgaagccgagaacagcatcctggacatcagcggcttcagcaagcagtacaactgtgccttcatctggcagaaggacggcgtgaagaagctgaacctgtacctgatcatcaactacttcaagggcggcaagctgcggttcaagaagatcaaacctgaagccttcgaagccaacagattctacaccgtgatcaacaaaaagagcggcgagatcgtgcccatggaggtgaacttcaacttcgacgaccccaacctgatcatcctgcctctggcctttggcaagagacagggcagagaattcatctggaacgacctgctgtccctggaaaccggcagcctgaagctggccaacggaagagtgatcgagaagacactgtacaacagaagaacccggcaggatgagcctgccctgttcgtggccctgaccttcgagcggcgggaggtcctggactcctccaatatcaaaccaatgaacctgatcggcgtggcaagaggcgaaaacatccccgccgtgatcgccctgaccgaccccgagggctgcccactgagccggtttaaggatagcctgggaaacccaacccacatcctgagaatcggcgagagctataaggagaagcagcggaccatccaggccaagaaggaggtggagcagcggagagccggcggctacagccggaagtacgccagcaaagccaagaatctggcagacgatatggtgagaaacaccgctagagatctgctgtactacgccgtgacccaggatgccatgctgatcttcgccaacctgagccggggcttcggccggcagggcaagcggaccttcatggccgagagacagtacacacggatggaggactggctgaccgccaagctggcctacgagggcctgagcaagacctacctgtccaagacactggcccagtacacctccaagacatgcagcaactgtgggtttaccatcaccagcgccgactacgacagggtgctggagaagctgaagaagacagcaacaggctggatgaccacaattaacggcaaggagctgaaggtggagggccagattacctactacaacagatacaagagacagaacgtagtcaaggacctgtccgtcgagctggatagactgagcgaagaatctgtgaacaacgacatctcctcctggacaaagggcagaagcggagaagctctgagcctcctgaagaaaagattctcccatagacccgtgcaggagaagttcgtgtgcctgaactgcggcttcgagacacacgcagccgagcaagccgccctgaacatcgccagatcctggctgttcctgcggagccaggagtacaagaaataccagacaaacaagacaaccggcaacaccgataagagagccttcgtcgagacctggcagtccttttaccggaagaagcttaaggaggtgtggaaacctgccgtgcggtctggcggatctggcggaggctcctgcccagggccccgtgaccttcgaggaggtggccgtgtacttcaccagggaggagggcgccctgctggaccccacccagagggccctgtacagggacgtgatgcaggagaactacgagaccgtggtgctgctgggcttccccgtgagcaagcccgacgtgatcagccagctggagcagggcgaggagccctggatccccgacctgcagggcagcgagaaggaggtgctgcccagggccgcctgcggatctggctccggcagcggccccaagaaaaagagaaaagtctaagctgccttctgcggggcttgccttctggccatgcccttcttctctcccttgcacctgtacctcttggtctttgaataaagcctgagtaggaaggctagcaaaaaaaaaaaaaaaaaaaaaaaaaaaaaaaaaaaaaaaaaaaaaaaaaaaaaaaaaaaaaaaaaaaaaaaaaaaaaaaa

SEQ ID NO: 16294 - RNA, 9485 nt, synthetic construct
  source 1..9485: mol_type = other RNA
aggaaataagagagaaaagaagagtaagaagaaatataagagccaccatggcccctaagaagaagcgtaaagtgagccggatggaacgcctcgtctacgaggtgcggcagaagtgcagaaacatcgaggacatctgcatctcctgcggatctctgaacgtgaccctggagcacccactgttcatcggcggcatgtgccagaactgtaaaaactgttttctggagtgtgcctatcaatacgacgatgacggctaccagagctactgcaccatctgttgcggcggaagagaggtgctgatgtgtggaaataacaactgctgccggtgcttctgcgtggaatgcgtggacctgctggtgggccccggcgccgcccaggccgctattaaggaagatccttggaactgctacatgtgcggccacaagggcacatacggcctgctgagacggagagaggactggcctagcagactgcagatgttcttcgccaataaccacgaccaggagttcgacccccctaaggtgtaccctcccgtccccgccgagaagagaaagcccatccgggtcctgagcctgttcgatggcatcgccaccggtctgctggtgctgaaggacctgggcatccaggtggataggtacattgcctccgaggtgtgcgaggactccatcaccgtgggaatggtgcgtcatcagggcaagatcatgtacgtgggcgacgtgcggagcgtgacacagaagcatatccaggagtggggccctttcgacctggtgatcggcggcagcccttgcaatgacctgagcatcgtgaacccagcccggaagggcctgtacgagggaaccggcagactgttcttcgagttttacagactgctgcacgacgcccggcctaaggaaggcgacgaccggcccttcttttggctgttcgagaatgtggtggccatgggagtcagcgacaagcgggatattagccggttcctggagagcaaccccgtgatgatcgatgccaaggaagtgagcgccgcccaccgggccagatacttctggggcaatctgcctggcatgaacagacccctggccagcaccgtgaacgacaagctggagctgcaggagtgcctggagcacggccggatcgccaagttcagcaaggtgagaaccatcaccacccgaagcaacagcatcaaacaaggcaaggaccagcactttcctgtgttcatgaacgagaaggaggacatcctgtggtgtaccgagatggagagagtgttcgggttcccagtccactacacagatgtcagcaacatgtctagactggccagacagagactgctgggaagaagctggtccgtccctgtgatcagacacctgttcgcccctctgaaggagtacttcgcctgcgtgagcagcggcaacagcaacgccaacagccggggccccagcttctctagcggcctggtgccactgtccctgagagggagccacatgggccccatggagatctacaaaaccgtgagcgcctggaagcggcagcctgtgcgcgtgctgagcctgtttcggaatatcgataaagtcctgaaaagcctgggattcctggagagcggctctggctccggcggtggcaccctgaagtacgtggaggatgtgacaaacgtggtcagacgggatgtggagaagtggggccccttcgatctggtgtacggcagcacccaacccctgggcagctcttgtgaccggtgccctggctggtacatgtttcagttccaccggatcctgcagtacgccctgccgagacaggagtcccagcggccattcttttggattttcatggacaacttgctgctgaccgaggatgaccaggaaactaccactcggttcctgcagaccgaagccgtgaccctgcaggacgtgagaggccgggactaccagaacgccatgcgggtgtggtccaacatccctggactgaaaagcaagcacgcacctctgacccctaaagaagaggagtacctgcaggcccaggtgcggagcagaagcaagctggacgcccctaaggtggatctgctggtgaagaattgcctcctgcccctgagagagtacttcaagtatttcagccagaatagtctgcccctgggaggcagcggcggcggcgccctggtgacatttgaggacgtcgccgtgcggttcacccaggaggaatgggctctgctggatccttctcagaaaatcctgtaccgggacgtgatgagagagacataccggaatctgacctccgtgggcatcaactgggaatgttgggaccttgaagcctgcttcagaagcctgggaagaaacctgagagtgcaggtggtgaagagaaagtgcgagctgaccaacagcggcccctgcgccgagggcggcccaagcagcggcgcccctcctcccagcggcggcagcccagccggctccccaacctctaccgaggagggcacctctgagtccgccacccccgagagcggccctggcacctccaccgagcccagcgagggcagcgcacccggcagccctgccggcagccccacctccacagaggagggaaccagcaccgagcccagcgaaggcagcgccccaggcaccagcaccgagcctagtgagcaggagattaaacggatcaacaagatcagaagaagacttgtgaaagacagcaacaccaagaaggccggcaagacaggccccatgaaaaccctgctggttagagtgatgacacccgatctgagagagcggctggaaaacctgagaaagaagcctgaaaatatcccccagcccatcagcaatacatctagagccaacctgaataagctgctgaccgattacaccgaaatgaagaaggcgatcctgcatgtgtactgggaagagttccagaaggaccctgtgggcctgatgagccgggtggcccagcctgccagcaagaagatcgatcagaacaagctgaaacctgagatggacgagaagggcaacctgaccaccgccggctttgcctgctctcagtgtggccagcccctgttcgtgtacaagctggagcaggtgtctgagaagggcaaggcttacaccaactacttcggacggtgcaatgtggccgagcacgaaaagctgatcctgctggcccagctgaagcccgagaaggatagcgacgaagccgtgacatatagcctgggaaagtttgggcagagggccctggatttctacagcattcatgtgaccaaggagtccacccaccccgtgaagcccctggcccagatcgccggaaacagatacgcctccggacctgtgggaaaggccctgagcgacgcatgtatgggcacaatcgcctccttcctgtctaagtaccaggacatcatcatcgaacaccagaaggtggtgaagggcaaccagaagagactggagagcctgcgggagctggccggcaaggaaaacctggaataccctagcgtgaccctgccacctcagcctcacaccaaggagggcgttgatgcctacaacgaagtgatcgcccgggtgcgaatgtgggtgaacctgaacctgtggcagaagctgaagctaagcagagatgatgccaagcctctgctgagactgaagggattcccttcctttcctctggtcgagagacaggccaacgaagtggactggtgggacatggtgtgtaacgtgaagaagctgatcaacgagaaaaaggaggatggcaaggtgttttggcagaatctggctggctacaagagacaggaagccctgagaccatacctgagcagcgaggaagatcggaagaagggaaagaaattcgctcggtaccagctgggcgacctgctgctgcacctggaaaagaagcacggcgaggactggggaaaggtgtacgacgaggcctgggagcggattgacaagaaagtggaaggcctgagcaagcacatcaagctggaagaggaacggagaagcgaggacgcccagagcaaggccgccctgaccgactggctgcgggctaaggccagcttcgtgatcgagggcctgaaggaggccgacaaggacgagttctgcagatgcgagctgaagctgcagaagtggtacggggacctgcggggaaagcccttcgccatcgaagccgagaacagcatcctggacatcagcggcttcagcaagcagtacaactgtgccttcatctggcagaaggacggcgtgaagaagctgaacctgtacctgatcatcaactacttcaagggcggcaagctgcggttcaagaagatcaaacctgaagccttcgaagccaacagattctacaccgtgatcaacaaaaagagcggcgagatcgtgcccatggaggtgaacttcaacttcgacgaccccaacctgatcatcctgcctctggcctttggcaagagacagggcagagaattcatctggaacgacctgctgtccctggaaaccggcagcctgaagctggccaacggaagagtgatcgagaagacactgtacaacagaagaacccggcaggatgagcctgccctgttcgtggccctgaccttcgagcggcgggaggtcctggactcctccaatatcaaaccaatgaacctgatcggcgtggcaagaggcgaaaacatccccgccgtgatcgccctgaccgaccccgagggctgcccactgagccggtttaaggatagcctgggaaacccaacccacatcctgagaatcggcgagagctataaggagaagcagcggaccatccaggccaagaaggaggtggagcagcggagagccggcggctacagccggaagtacgccagcaaagccaagaatctggcagacgatatggtgagaaacaccgctagagatctgctgtactacgccgtgacccaggatgccatgctgatcttcgccaacctgagccggggcttcggccggcagggcaagcggaccttcatggccgagagacagtacacacggatggaggactggctgaccgccaagctggcctacgagggcctgagcaagacctacctgtccaagacactggcccagtacacctccaagacatgcagcaactgtgggtttaccatcaccagcgccgactacgacagggtgctggagaagctgaagaagacagcaacaggctggatgaccacaattaacggcaaggagctgaaggtggagggccagattacctactacaacagatacaagagacagaacgtagtcaaggacctgtccgtcgagctggatagactgagcgaagaatctgtgaacaacgacatctcctcctggacaaagggcagaagcggagaagctctgagcctcctgaagaaaagattctcccatagacccgtgcaggagaagttcgtgtgcctgaactgcggcttcgagacacacgcagccgagcaagccgccctgaacatcgccagatcctggctgttcctgcggagccaggagtacaagaaataccagacaaacaagacaaccggcaacaccgataagagagccttcgtcgagacctggcagtccttttaccggaagaagcttaaggaggtgtggaaacctgccgtgcggtctggcggatctggcggaggctccatggccgagggcctgaagttcaaggacgtggccatctacttcagccagaacgagtgggagtgcctgcacagcgcccagaaggacctgtacagggacatcatgctggagaactacaacaacctgatcagcctgggcctgagcgagagcaagcccgacgtgatcagcctgctggagcagaggaaggagccctggatggtggagaggaaggagaccaaggagtggttccccgactgggagagcaggggcggcccaagcagcggcgcccctcctcccagcggcggcagcccagccggctccccaacctctaccgaggagggcacctctgagtccgccacccccgagagcggccctggcacctccaccgagcccagcgagggcagcgcacccggcagccctgccggcagccccacctccacagaggagggaaccagcaccgagcccagcgaaggcagcgccccaggcaccagcaccgagcctagtgagcaggagattaaacggatcaacaagatcagaagaagacttgtgaaagacagcaacaccaagaaggccggcaagacaggccccatgaaaaccctgctggttagagtgatgacacccgatctgagagagcggctggaaaacctgagaaagaagcctgaaaatatcccccagcccatcagcaatacatctagagccaacctgaataagctgctgaccgattacaccgaaatgaagaaggcgatcctgcatgtgtactgggaagagttccagaaggaccctgtgggcctgatgagccgggtggcccagcctgccagcaagaagatcgatcagaacaagctgaaacctgagatggacgagaagggcaacctgaccaccgccggctttgcctgctctcagtgtggccagcccctgttcgtgtacaagctggagcaggtgtctgagaagggcaaggcttacaccaactacttcggacggtgcaatgtggccgagcacgaaaagctgatcctgctggcccagctgaagcccgagaaggatagcgacgaagccgtgacatatagcctgggaaagtttgggcagagggccctggatttctacagcattcatgtgaccaaggagtccacccaccccgtgaagcccctggcccagatcgccggaaacagatacgcctccggacctgtgggaaaggccctgagcgacgcatgtatgggcacaatcgcctccttcctgtctaagtaccaggacatcatcatcgaacaccagaaggtggtgaagggcaaccagaagagactggagagcctgcgggagctggccggcaaggaaaacctggaataccctagcgtgaccctgccacctcagcctcacaccaaggagggcgttgatgcctacaacgaagtgatcgcccgggtgcgaatgtgggtgaacctgaacctgtggcagaagctgaagctaagcagagatgatgccaagcctctgctgagactgaagggattcccttcctttcctctggtcgagagacaggccaacgaagtggactggtgggacatggtgtgtaacgtgaagaagctgatcaacgagaaaaaggaggatggcaaggtgttttggcagaatctggctggctacaagagacaggaagccctgagaccatacctgagcagcgaggaagatcggaagaagggaaagaaattcgctcggtaccagctgggcgacctgctgctgcacctggaaaagaagcacggcgaggactggggaaaggtgtacgacgaggcctgggagcggattgacaagaaagtggaaggcctgagcaagcacatcaagctggaagaggaacggagaagcgaggacgcccagagcaaggccgccctgaccgactggctgcgggctaaggccagcttcgtgatcgagggcctgaaggaggccgacaaggacgagttctgcagatgcgagctgaagctgcagaagtggtacggggacctgcggggaaagcccttcgccatcgaagccgagaacagcatcctggacatcagcggcttcagcaagcagtacaactgtgccttcatctggcagaaggacggcgtgaagaagctgaacctgtacctgatcatcaactacttcaagggcggcaagctgcggttcaagaagatcaaacctgaagccttcgaagccaacagattctacaccgtgatcaacaaaaagagcggcgagatcgtgcccatggaggtgaacttcaacttcgacgaccccaacctgatcatcctgcctctggcctttggcaagagacagggcagagaattcatctggaacgacctgctgtccctggaaaccggcagcctgaagctggccaacggaagagtgatcgagaagacactgtacaacagaagaacccggcaggatgagcctgccctgttcgtggccctgaccttcgagcggcgggaggtcctggactcctccaatatcaaaccaatgaacctgatcggcgtggcaagaggcgaaaacatccccgccgtgatcgccctgaccgaccccgagggctgcccactgagccggtttaaggatagcctgggaaacccaacccacatcctgagaatcggcgagagctataaggagaagcagcggaccatccaggccaagaaggaggtggagcagcggagagccggcggctacagccggaagtacgccagcaaagccaagaatctggcagacgatatggtgagaaacaccgctagagatctgctgtactacgccgtgacccaggatgccatgctgatcttcgccaacctgagccggggcttcggccggcagggcaagcggaccttcatggccgagagacagtacacacggatggaggactggctgaccgccaagctggcctacgagggcctgagcaagacctacctgtccaagacactggcccagtacacctccaagacatgcagcaactgtgggtttaccatcaccagcgccgactacgacagggtgctggagaagctgaagaagacagcaacaggctggatgaccacaattaacggcaaggagctgaaggtggagggccagattacctactacaacagatacaagagacagaacgtagtcaaggacctgtccgtcgagctggatagactgagcgaagaatctgtgaacaacgacatctcctcctggacaaagggcagaagcggagaagctctgagcctcctgaagaaaagattctcccatagacccgtgcaggagaagttcgtgtgcctgaactgcggcttcgagacacacgcagccgagcaagccgccctgaacatcgccagatcctggctgttcctgcggagccaggagtacaagaaataccagacaaacaagacaaccggcaacaccgataagagagccttcgtcgagacctggcagtccttttaccggaagaagcttaaggaggtgtggaaacctgccgtgcggtctggcggatctggcggaggctcctatggccgagggcctgaagttcaaggacgtggccatctacttcagccagaacgagtgggagtgcctgcacagcgcccagaaggacctgtacagggacatcatgctggagaactacaacaacctgatcagcctgggcctgagcgagagcaagcccgacgtgatcagcctgctggagcagaggaaggagccctggatggtggagaggaaggagaccaaggagtggttccccgactgggagagcaggggatctggctccggcagcggccccaagaaaaagagaaaagtctaagctgccttctgcggggcttgccttctggccatgcccttcttctctcccttgcacctgtacctcttggtctttgaataaagcctgagtaggaaggctagcaaaaaaaaaaaaaaaaaaaaaaaaaaaaaaaaaaaaaaaaaaaaaaaaaaaaaaaaaaaaaaaaaaaaaaaaaaaaaaaa

SEQ ID NO: 16295 - RNA, 9485 nt, synthetic construct
  source 1..9485: mol_type = other RNA
aggaaataagagagaaaagaagagtaagaagaaatataagagccaccatggcccctaagaagaagcgtaaagtgagccggatggaacgcctcgtctacgaggtgcggcagaagtgcagaaacatcgaggacatctgcatctcctgcggatctctgaacgtgaccctggagcacccactgttcatcggcggcatgtgccagaactgtaaaaactgttttctggagtgtgcctatcaatacgacgatgacggctaccagagctactgcaccatctgttgcggcggaagagaggtgctgatgtgtggaaataacaactgctgccggtgcttctgcgtggaatgcgtggacctgctggtgggccccggcgccgcccaggccgctattaaggaagatccttggaactgctacatgtgcggccacaagggcacatacggcctgctgagacggagagaggactggcctagcagactgcagatgttcttcgccaataaccacgaccaggagttcgacccccctaaggtgtaccctcccgtccccgccgagaagagaaagcccatccgggtcctgagcctgttcgatggcatcgccaccggtctgctggtgctgaaggacctgggcatccaggtggataggtacattgcctccgaggtgtgcgaggactccatcaccgtgggaatggtgcgtcatcagggcaagatcatgtacgtgggcgacgtgcggagcgtgacacagaagcatatccaggagtggggccctttcgacctggtgatcggcggcagcccttgcaatgacctgagcatcgtgaacccagcccggaagggcctgtacgagggaaccggcagactgttcttcgagttttacagactgctgcacgacgcccggcctaaggaaggcgacgaccggcccttcttttggctgttcgagaatgtggtggccatgggagtcagcgacaagcgggatattagccggttcctggagagcaaccccgtgatgatcgatgccaaggaagtgagcgccgcccaccgggccagatacttctggggcaatctgcctggcatgaacagacccctggccagcaccgtgaacgacaagctggagctgcaggagtgcctggagcacggccggatcgccaagttcagcaaggtgagaaccatcaccacccgaagcaacagcatcaaacaaggcaaggaccagcactttcctgtgttcatgaacgagaaggaggacatcctgtggtgtaccgagatggagagagtgttcgggttcccagtccactacacagatgtcagcaacatgtctagactggccagacagagactgctgggaagaagctggtccgtccctgtgatcagacacctgttcgcccctctgaaggagtacttcgcctgcgtgagcagcggcaacagcaacgccaacagccggggccccagcttctctagcggcctggtgccactgtccctgagagggagccacatgggccccatggagatctacaaaaccgtgagcgcctggaagcggcagcctgtgcgcgtgctgagcctgtttcggaatatcgataaagtcctgaaaagcctgggattcctggagagcggctctggctccggcggtggcaccctgaagtacgtggaggatgtgacaaacgtggtcagacgggatgtggagaagtggggccccttcgatctggtgtacggcagcacccaacccctgggcagctcttgtgaccggtgccctggctggtacatgtttcagttccaccggatcctgcagtacgccctgccgagacaggagtcccagcggccattcttttggattttcatggacaacttgctgctgaccgaggatgaccaggaaactaccactcggttcctgcagaccgaagccgtgaccctgcaggacgtgagaggccgggactaccagaacgccatgcgggtgtggtccaacatccctggactgaaaagcaagcacgcacctctgacccctaaagaagaggagtacctgcaggcccaggtgcggagcagaagcaagctggacgcccctaaggtggatctgctggtgaagaattgcctcctgcccctgagagagtacttcaagtatttcagccagaatagtctgcccctgggaggcagcggcggcggcgccctggtgacatttgaggacgtcgccgtgcggttcacccaggaggaatgggctctgctggatccttctcagaaaatcctgtaccgggacgtgatgagagagacataccggaatctgacctccgtgggcatcaactgggaatgttgggaccttgaagcctgcttcagaagcctgggaagaaacctgagagtgcaggtggtgaagagaaagtgcgagctgaccaacagcggcccctgcgccgagggcggcccaagcagcggcgcccctcctcccagcggcggcagcccagccggctccccaacctctaccgaggagggcacctctgagtccgccacccccgagagcggccctggcacctccaccgagcccagcgagggcagcgcacccggcagccctgccggcagccccacctccacagaggagggaaccagcaccgagcccagcgaaggcagcgccccaggcaccagcaccgagcctagtgagcaggagattaaacggatcaacaagatcagaagaagacttgtgaaagacagcaacaccaagaaggccggcaagacaggccccatgaaaaccctgctggttagagtgatgacacccgatctgagagagcggctggaaaacctgagaaagaagcctgaaaatatcccccagcccatcagcaatacatctagagccaacctgaataagctgctgaccgattacaccgaaatgaagaaggcgatcctgcatgtgtactgggaagagttccagaaggaccctgtgggcctgatgagccgggtggcccagcctgccagcaagaagatcgatcagaacaagctgaaacctgagatggacgagaagggcaacctgaccaccgccggctttgcctgctctcagtgtggccagcccctgttcgtgtacaagctggagcaggtgtctgagaagggcaaggcttacaccaactacttcggacggtgcaatgtggccgagcacgaaaagctgatcctgctggcccagctgaagcccgagaaggatagcgacgaagccgtgacatatagcctgggaaagtttgggcagagggccctggatttctacagcattcatgtgaccaaggagtccacccaccccgtgaagcccctggcccagatcgccggaaacagatacgcctccggacctgtgggaaaggccctgagcgacgcatgtatgggcacaatcgcctccttcctgtctaagtaccaggacatcatcatcgaacaccagaaggtggtgaagggcaaccagaagagactggagagcctgcgggagctggccggcaaggaaaacctggaataccctagcgtgaccctgccacctcagcctcacaccaaggagggcgttgatgcctacaacgaagtgatcgcccgggtgcgaatgtgggtgaacctgaacctgtggcagaagctgaagctaagcagagatgatgccaagcctctgctgagactgaagggattcccttcctttcctctggtcgagagacaggccaacgaagtggactggtgggacatggtgtgtaacgtgaagaagctgatcaacgagaaaaaggaggatggcaaggtgttttggcagaatctggctggctacaagagacaggaagccctgagaccatacctgagcagcgaggaagatcggaagaagggaaagaaattcgctcggtaccagctgggcgacctgctgctgcacctggaaaagaagcacggcgaggactggggaaaggtgtacgacgaggcctgggagcggattgacaagaaagtggaaggcctgagcaagcacatcaagctggaagaggaacggagaagcgaggacgcccagagcaaggccgccctgaccgactggctgcgggctaaggccagcttcgtgatcgagggcctgaaggaggccgacaaggacgagttctgcagatgcgagctgaagctgcagaagtggtacggggacctgcggggaaagcccttcgccatcgaagccgagaacagcatcctggacatcagcggcttcagcaagcagtacaactgtgccttcatctggcagaaggacggcgtgaagaagctgaacctgtacctgatcatcaactacttcaagggcggcaagctgcggttcaagaagatcaaacctgaagccttcgaagccaacagattctacaccgtgatcaacaaaaagagcggcgagatcgtgcccatggaggtgaacttcaacttcgacgaccccaacctgatcatcctgcctctggcctttggcaagagacagggcagagaattcatctggaacgacctgctgtccctggaaaccggcagcctgaagctggccaacggaagagtgatcgagaagacactgtacaacagaagaacccggcaggatgagcctgccctgttcgtggccctgaccttcgagcggcgggaggtcctggactcctccaatatcaaaccaatgaacctgatcggcgtggcaagaggcgaaaacatccccgccgtgatcgccctgaccgaccccgagggctgcccactgagccggtttaaggatagcctgggaaacccaacccacatcctgagaatcggcgagagctataaggagaagcagcggaccatccaggccaagaaggaggtggagcagcggagagccggcggctacagccggaagtacgccagcaaagccaagaatctggcagacgatatggtgagaaacaccgctagagatctgctgtactacgccgtgacccaggatgccatgctgatcttcgccaacctgagccggggcttcggccggcagggcaagcggaccttcatggccgagagacagtacacacggatggaggactggctgaccgccaagctggcctacgagggcctgagcaagacctacctgtccaagacactggcccagtacacctccaagacatgcagcaactgtgggtttaccatcaccagcgccgactacgacagggtgctggagaagctgaagaagacagcaacaggctggatgaccacaattaacggcaaggagctgaaggtggagggccagattacctactacaacagatacaagagacagaacgtagtcaaggacctgtccgtcgagctggatagactgagcgaagaatctgtgaacaacgacatctcctcctggacaaagggcagaagcggagaagctctgagcctcctgaagaaaagattctcccatagacccgtgcaggagaagttcgtgtgcctgaactgcggcttcgagacacacgcagccgagcaagccgccctgaacatcgccagatcctggctgttcctgcggagccaggagtacaagaaataccagacaaacaagacaaccggcaacaccgataagagagccttcgtcgagacctggcagtccttttaccggaagaagcttaaggaggtgtggaaacctgccgtgcggtctggcggatctggcggaggctccaagcccggcaccgtgagcttcgccgacgtggccgtgtacttcagcagggaggagtggggctgcctgaggcccgcccagagggccctgtacagggacgtgatgagggagacctacggccacctgggcgccctgggcgtgggcggcagcaagcccgccctgatcagctgggtggaggaggccgccgagctgtgggaccccgccgccagggaccccgaggtgaccaagtgccccaccgagaccgacggcggcccaagcagcggcgcccctcctcccagcggcggcagcccagccggctccccaacctctaccgaggagggcacctctgagtccgccacccccgagagcggccctggcacctccaccgagcccagcgagggcagcgcacccggcagccctgccggcagccccacctccacagaggagggaaccagcaccgagcccagcgaaggcagcgccccaggcaccagcaccgagcctagtgagcaggagattaaacggatcaacaagatcagaagaagacttgtgaaagacagcaacaccaagaaggccggcaagacaggccccatgaaaaccctgctggttagagtgatgacacccgatctgagagagcggctggaaaacctgagaaagaagcctgaaaatatcccccagcccatcagcaatacatctagagccaacctgaataagctgctgaccgattacaccgaaatgaagaaggcgatcctgcatgtgtactgggaagagttccagaaggaccctgtgggcctgatgagccgggtggcccagcctgccagcaagaagatcgatcagaacaagctgaaacctgagatggacgagaagggcaacctgaccaccgccggctttgcctgctctcagtgtggccagcccctgttcgtgtacaagctggagcaggtgtctgagaagggcaaggcttacaccaactacttcggacggtgcaatgtggccgagcacgaaaagctgatcctgctggcccagctgaagcccgagaaggatagcgacgaagccgtgacatatagcctgggaaagtttgggcagagggccctggatttctacagcattcatgtgaccaaggagtccacccaccccgtgaagcccctggcccagatcgccggaaacagatacgcctccggacctgtgggaaaggccctgagcgacgcatgtatgggcacaatcgcctccttcctgtctaagtaccaggacatcatcatcgaacaccagaaggtggtgaagggcaaccagaagagactggagagcctgcgggagctggccggcaaggaaaacctggaataccctagcgtgaccctgccacctcagcctcacaccaaggagggcgttgatgcctacaacgaagtgatcgcccgggtgcgaatgtgggtgaacctgaacctgtggcagaagctgaagctaagcagagatgatgccaagcctctgctgagactgaagggattcccttcctttcctctggtcgagagacaggccaacgaagtggactggtgggacatggtgtgtaacgtgaagaagctgatcaacgagaaaaaggaggatggcaaggtgttttggcagaatctggctggctacaagagacaggaagccctgagaccatacctgagcagcgaggaagatcggaagaagggaaagaaattcgctcggtaccagctgggcgacctgctgctgcacctggaaaagaagcacggcgaggactggggaaaggtgtacgacgaggcctgggagcggattgacaagaaagtggaaggcctgagcaagcacatcaagctggaagaggaacggagaagcgaggacgcccagagcaaggccgccctgaccgactggctgcgggctaaggccagcttcgtgatcgagggcctgaaggaggccgacaaggacgagttctgcagatgcgagctgaagctgcagaagtggtacggggacctgcggggaaagcccttcgccatcgaagccgagaacagcatcctggacatcagcggcttcagcaagcagtacaactgtgccttcatctggcagaaggacggcgtgaagaagctgaacctgtacctgatcatcaactacttcaagggcggcaagctgcggttcaagaagatcaaacctgaagccttcgaagccaacagattctacaccgtgatcaacaaaaagagcggcgagatcgtgcccatggaggtgaacttcaacttcgacgaccccaacctgatcatcctgcctctggcctttggcaagagacagggcagagaattcatctggaacgacctgctgtccctggaaaccggcagcctgaagctggccaacggaagagtgatcgagaagacactgtacaacagaagaacccggcaggatgagcctgccctgttcgtggccctgaccttcgagcggcgggaggtcctggactcctccaatatcaaaccaatgaacctgatcggcgtggcaagaggcgaaaacatccccgccgtgatcgccctgaccgaccccgagggctgcccactgagccggtttaaggatagcctgggaaacccaacccacatcctgagaatcggcgagagctataaggagaagcagcggaccatccaggccaagaaggaggtggagcagcggagagccggcggctacagccggaagtacgccagcaaagccaagaatctggcagacgatatggtgagaaacaccgctagagatctgctgtactacgccgtgacccaggatgccatgctgatcttcgccaacctgagccggggcttcggccggcagggcaagcggaccttcatggccgagagacagtacacacggatggaggactggctgaccgccaagctggcctacgagggcctgagcaagacctacctgtccaagacactggcccagtacacctccaagacatgcagcaactgtgggtttaccatcaccagcgccgactacgacagggtgctggagaagctgaagaagacagcaacaggctggatgaccacaattaacggcaaggagctgaaggtggagggccagattacctactacaacagatacaagagacagaacgtagtcaaggacctgtccgtcgagctggatagactgagcgaagaatctgtgaacaacgacatctcctcctggacaaagggcagaagcggagaagctctgagcctcctgaagaaaagattctcccatagacccgtgcaggagaagttcgtgtgcctgaactgcggcttcgagacacacgcagccgagcaagccgccctgaacatcgccagatcctggctgttcctgcggagccaggagtacaagaaataccagacaaacaagacaaccggcaacaccgataagagagccttcgtcgagacctggcagtccttttaccggaagaagcttaaggaggtgtggaaacctgccgtgcggtctggcggatctggcggaggctcctaagcccggcaccgtgagcttcgccgacgtggccgtgtacttcagcagggaggagtggggctgcctgaggcccgcccagagggccctgtacagggacgtgatgagggagacctacggccacctgggcgccctgggcgtgggcggcagcaagcccgccctgatcagctgggtggaggaggccgccgagctgtgggaccccgccgccagggaccccgaggtgaccaagtgccccaccgagaccgacggatctggctccggcagcggccccaagaaaaagagaaaagtctaagctgccttctgcggggcttgccttctggccatgcccttcttctctcccttgcacctgtacctcttggtctttgaataaagcctgagtaggaaggctagcaaaaaaaaaaaaaaaaaaaaaaaaaaaaaaaaaaaaaaaaaaaaaaaaaaaaaaaaaaaaaaaaaaaaaaaaaaaaaaaa

SEQ ID NO: 16296 - RNA, 9485 nt, synthetic construct
  source 1..9485: mol_type = other RNA
aggaaataagagagaaaagaagagtaagaagaaatataagagccaccatggcccctaagaagaagcgtaaagtgagccggatggaacgcctcgtctacgaggtgcggcagaagtgcagaaacatcgaggacatctgcatctcctgcggatctctgaacgtgaccctggagcacccactgttcatcggcggcatgtgccagaactgtaaaaactgttttctggagtgtgcctatcaatacgacgatgacggctaccagagctactgcaccatctgttgcggcggaagagaggtgctgatgtgtggaaataacaactgctgccggtgcttctgcgtggaatgcgtggacctgctggtgggccccggcgccgcccaggccgctattaaggaagatccttggaactgctacatgtgcggccacaagggcacatacggcctgctgagacggagagaggactggcctagcagactgcagatgttcttcgccaataaccacgaccaggagttcgacccccctaaggtgtaccctcccgtccccgccgagaagagaaagcccatccgggtcctgagcctgttcgatggcatcgccaccggtctgctggtgctgaaggacctgggcatccaggtggataggtacattgcctccgaggtgtgcgaggactccatcaccgtgggaatggtgcgtcatcagggcaagatcatgtacgtgggcgacgtgcggagcgtgacacagaagcatatccaggagtggggccctttcgacctggtgatcggcggcagcccttgcaatgacctgagcatcgtgaacccagcccggaagggcctgtacgagggaaccggcagactgttcttcgagttttacagactgctgcacgacgcccggcctaaggaaggcgacgaccggcccttcttttggctgttcgagaatgtggtggccatgggagtcagcgacaagcgggatattagccggttcctggagagcaaccccgtgatgatcgatgccaaggaagtgagcgccgcccaccgggccagatacttctggggcaatctgcctggcatgaacagacccctggccagcaccgtgaacgacaagctggagctgcaggagtgcctggagcacggccggatcgccaagttcagcaaggtgagaaccatcaccacccgaagcaacagcatcaaacaaggcaaggaccagcactttcctgtgttcatgaacgagaaggaggacatcctgtggtgtaccgagatggagagagtgttcgggttcccagtccactacacagatgtcagcaacatgtctagactggccagacagagactgctgggaagaagctggtccgtccctgtgatcagacacctgttcgcccctctgaaggagtacttcgcctgcgtgagcagcggcaacagcaacgccaacagccggggccccagcttctctagcggcctggtgccactgtccctgagagggagccacatgggccccatggagatctacaaaaccgtgagcgcctggaagcggcagcctgtgcgcgtgctgagcctgtttcggaatatcgataaagtcctgaaaagcctgggattcctggagagcggctctggctccggcggtggcaccctgaagtacgtggaggatgtgacaaacgtggtcagacgggatgtggagaagtggggccccttcgatctggtgtacggcagcacccaacccctgggcagctcttgtgaccggtgccctggctggtacatgtttcagttccaccggatcctgcagtacgccctgccgagacaggagtcccagcggccattcttttggattttcatggacaacttgctgctgaccgaggatgaccaggaaactaccactcggttcctgcagaccgaagccgtgaccctgcaggacgtgagaggccgggactaccagaacgccatgcgggtgtggtccaacatccctggactgaaaagcaagcacgcacctctgacccctaaagaagaggagtacctgcaggcccaggtgcggagcagaagcaagctggacgcccctaaggtggatctgctggtgaagaattgcctcctgcccctgagagagtacttcaagtatttcagccagaatagtctgcccctgggaggcagcggcggcggcgccctggtgacatttgaggacgtcgccgtgcggttcacccaggaggaatgggctctgctggatccttctcagaaaatcctgtaccgggacgtgatgagagagacataccggaatctgacctccgtgggcatcaactgggaatgttgggaccttgaagcctgcttcagaagcctgggaagaaacctgagagtgcaggtggtgaagagaaagtgcgagctgaccaacagcggcccctgcgccgagggcggcccaagcagcggcgcccctcctcccagcggcggcagcccagccggctccccaacctctaccgaggagggcacctctgagtccgccacccccgagagcggccctggcacctccaccgagcccagcgagggcagcgcacccggcagccctgccggcagccccacctccacagaggagggaaccagcaccgagcccagcgaaggcagcgccccaggcaccagcaccgagcctagtgagcaggagattaaacggatcaacaagatcagaagaagacttgtgaaagacagcaacaccaagaaggccggcaagacaggccccatgaaaaccctgctggttagagtgatgacacccgatctgagagagcggctggaaaacctgagaaagaagcctgaaaatatcccccagcccatcagcaatacatctagagccaacctgaataagctgctgaccgattacaccgaaatgaagaaggcgatcctgcatgtgtactgggaagagttccagaaggaccctgtgggcctgatgagccgggtggcccagcctgccagcaagaagatcgatcagaacaagctgaaacctgagatggacgagaagggcaacctgaccaccgccggctttgcctgctctcagtgtggccagcccctgttcgtgtacaagctggagcaggtgtctgagaagggcaaggcttacaccaactacttcggacggtgcaatgtggccgagcacgaaaagctgatcctgctggcccagctgaagcccgagaaggatagcgacgaagccgtgacatatagcctgggaaagtttgggcagagggccctggatttctacagcattcatgtgaccaaggagtccacccaccccgtgaagcccctggcccagatcgccggaaacagatacgcctccggacctgtgggaaaggccctgagcgacgcatgtatgggcacaatcgcctccttcctgtctaagtaccaggacatcatcatcgaacaccagaaggtggtgaagggcaaccagaagagactggagagcctgcgggagctggccggcaaggaaaacctggaataccctagcgtgaccctgccacctcagcctcacaccaaggagggcgttgatgcctacaacgaagtgatcgcccgggtgcgaatgtgggtgaacctgaacctgtggcagaagctgaagctaagcagagatgatgccaagcctctgctgagactgaagggattcccttcctttcctctggtcgagagacaggccaacgaagtggactggtgggacatggtgtgtaacgtgaagaagctgatcaacgagaaaaaggaggatggcaaggtgttttggcagaatctggctggctacaagagacaggaagccctgagaccatacctgagcagcgaggaagatcggaagaagggaaagaaattcgctcggtaccagctgggcgacctgctgctgcacctggaaaagaagcacggcgaggactggggaaaggtgtacgacgaggcctgggagcggattgacaagaaagtggaaggcctgagcaagcacatcaagctggaagaggaacggagaagcgaggacgcccagagcaaggccgccctgaccgactggctgcgggctaaggccagcttcgtgatcgagggcctgaaggaggccgacaaggacgagttctgcagatgcgagctgaagctgcagaagtggtacggggacctgcggggaaagcccttcgccatcgaagccgagaacagcatcctggacatcagcggcttcagcaagcagtacaactgtgccttcatctggcagaaggacggcgtgaagaagctgaacctgtacctgatcatcaactacttcaagggcggcaagctgcggttcaagaagatcaaacctgaagccttcgaagccaacagattctacaccgtgatcaacaaaaagagcggcgagatcgtgcccatggaggtgaacttcaacttcgacgaccccaacctgatcatcctgcctctggcctttggcaagagacagggcagagaattcatctggaacgacctgctgtccctggaaaccggcagcctgaagctggccaacggaagagtgatcgagaagacactgtacaacagaagaacccggcaggatgagcctgccctgttcgtggccctgaccttcgagcggcgggaggtcctggactcctccaatatcaaaccaatgaacctgatcggcgtggcaagaggcgaaaacatccccgccgtgatcgccctgaccgaccccgagggctgcccactgagccggtttaaggatagcctgggaaacccaacccacatcctgagaatcggcgagagctataaggagaagcagcggaccatccaggccaagaaggaggtggagcagcggagagccggcggctacagccggaagtacgccagcaaagccaagaatctggcagacgatatggtgagaaacaccgctagagatctgctgtactacgccgtgacccaggatgccatgctgatcttcgccaacctgagccggggcttcggccggcagggcaagcggaccttcatggccgagagacagtacacacggatggaggactggctgaccgccaagctggcctacgagggcctgagcaagacctacctgtccaagacactggcccagtacacctccaagacatgcagcaactgtgggtttaccatcaccagcgccgactacgacagggtgctggagaagctgaagaagacagcaacaggctggatgaccacaattaacggcaaggagctgaaggtggagggccagattacctactacaacagatacaagagacagaacgtagtcaaggacctgtccgtcgagctggatagactgagcgaagaatctgtgaacaacgacatctcctcctggacaaagggcagaagcggagaagctctgagcctcctgaagaaaagattctcccatagacccgtgcaggagaagttcgtgtgcctgaactgcggcttcgagacacacgcagccgagcaagccgccctgaacatcgccagatcctggctgttcctgcggagccaggagtacaagaaataccagacaaacaagacaaccggcaacaccgataagagagccttcgtcgagacctggcagtccttttaccggaagaagcttaaggaggtgtggaaacctgccgtgcggtctggcggatctggcggaggctccttccaggagctggtggtgttcagggacgtggccgtggagttctgcaaggacgagtgggagtgcctgggccccgaccagaggagcctgtacagggacgtgatgctggagacctacagcaacttcgtgagcctgggcctggccgtgagcaagcccagcgtgatcagcctgctggagcagggcaaggagccctggatggtggagcaggccggctggtaccccgacctgctgagcgtgaacgagaccggcggcccaagcagcggcgcccctcctcccagcggcggcagcccagccggctccccaacctctaccgaggagggcacctctgagtccgccacccccgagagcggccctggcacctccaccgagcccagcgagggcagcgcacccggcagccctgccggcagccccacctccacagaggagggaaccagcaccgagcccagcgaaggcagcgccccaggcaccagcaccgagcctagtgagcaggagattaaacggatcaacaagatcagaagaagacttgtgaaagacagcaacaccaagaaggccggcaagacaggccccatgaaaaccctgctggttagagtgatgacacccgatctgagagagcggctggaaaacctgagaaagaagcctgaaaatatcccccagcccatcagcaatacatctagagccaacctgaataagctgctgaccgattacaccgaaatgaagaaggcgatcctgcatgtgtactgggaagagttccagaaggaccctgtgggcctgatgagccgggtggcccagcctgccagcaagaagatcgatcagaacaagctgaaacctgagatggacgagaagggcaacctgaccaccgccggctttgcctgctctcagtgtggccagcccctgttcgtgtacaagctggagcaggtgtctgagaagggcaaggcttacaccaactacttcggacggtgcaatgtggccgagcacgaaaagctgatcctgctggcccagctgaagcccgagaaggatagcgacgaagccgtgacatatagcctgggaaagtttgggcagagggccctggatttctacagcattcatgtgaccaaggagtccacccaccccgtgaagcccctggcccagatcgccggaaacagatacgcctccggacctgtgggaaaggccctgagcgacgcatgtatgggcacaatcgcctccttcctgtctaagtaccaggacatcatcatcgaacaccagaaggtggtgaagggcaaccagaagagactggagagcctgcgggagctggccggcaaggaaaacctggaataccctagcgtgaccctgccacctcagcctcacaccaaggagggcgttgatgcctacaacgaagtgatcgcccgggtgcgaatgtgggtgaacctgaacctgtggcagaagctgaagctaagcagagatgatgccaagcctctgctgagactgaagggattcccttcctttcctctggtcgagagacaggccaacgaagtggactggtgggacatggtgtgtaacgtgaagaagctgatcaacgagaaaaaggaggatggcaaggtgttttggcagaatctggctggctacaagagacaggaagccctgagaccatacctgagcagcgaggaagatcggaagaagggaaagaaattcgctcggtaccagctgggcgacctgctgctgcacctggaaaagaagcacggcgaggactggggaaaggtgtacgacgaggcctgggagcggattgacaagaaagtggaaggcctgagcaagcacatcaagctggaagaggaacggagaagcgaggacgcccagagcaaggccgccctgaccgactggctgcgggctaaggccagcttcgtgatcgagggcctgaaggaggccgacaaggacgagttctgcagatgcgagctgaagctgcagaagtggtacggggacctgcggggaaagcccttcgccatcgaagccgagaacagcatcctggacatcagcggcttcagcaagcagtacaactgtgccttcatctggcagaaggacggcgtgaagaagctgaacctgtacctgatcatcaactacttcaagggcggcaagctgcggttcaagaagatcaaacctgaagccttcgaagccaacagattctacaccgtgatcaacaaaaagagcggcgagatcgtgcccatggaggtgaacttcaacttcgacgaccccaacctgatcatcctgcctctggcctttggcaagagacagggcagagaattcatctggaacgacctgctgtccctggaaaccggcagcctgaagctggccaacggaagagtgatcgagaagacactgtacaacagaagaacccggcaggatgagcctgccctgttcgtggccctgaccttcgagcggcgggaggtcctggactcctccaatatcaaaccaatgaacctgatcggcgtggcaagaggcgaaaacatccccgccgtgatcgccctgaccgaccccgagggctgcccactgagccggtttaaggatagcctgggaaacccaacccacatcctgagaatcggcgagagctataaggagaagcagcggaccatccaggccaagaaggaggtggagcagcggagagccggcggctacagccggaagtacgccagcaaagccaagaatctggcagacgatatggtgagaaacaccgctagagatctgctgtactacgccgtgacccaggatgccatgctgatcttcgccaacctgagccggggcttcggccggcagggcaagcggaccttcatggccgagagacagtacacacggatggaggactggctgaccgccaagctggcctacgagggcctgagcaagacctacctgtccaagacactggcccagtacacctccaagacatgcagcaactgtgggtttaccatcaccagcgccgactacgacagggtgctggagaagctgaagaagacagcaacaggctggatgaccacaattaacggcaaggagctgaaggtggagggccagattacctactacaacagatacaagagacagaacgtagtcaaggacctgtccgtcgagctggatagactgagcgaagaatctgtgaacaacgacatctcctcctggacaaagggcagaagcggagaagctctgagcctcctgaagaaaagattctcccatagacccgtgcaggagaagttcgtgtgcctgaactgcggcttcgagacacacgcagccgagcaagccgccctgaacatcgccagatcctggctgttcctgcggagccaggagtacaagaaataccagacaaacaagacaaccggcaacaccgataagagagccttcgtcgagacctggcagtccttttaccggaagaagcttaaggaggtgtggaaacctgccgtgcggtctggcggatctggcggaggctcctttccaggagctggtggtgttcagggacgtggccgtggagttctgcaaggacgagtgggagtgcctgggccccgaccagaggagcctgtacagggacgtgatgctggagacctacagcaacttcgtgagcctgggcctggccgtgagcaagcccagcgtgatcagcctgctggagcagggcaaggagccctggatggtggagcaggccggctggtaccccgacctgctgagcgtgaacgagaccggatctggctccggcagcggccccaagaaaaagagaaaagtctaagctgccttctgcggggcttgccttctggccatgcccttcttctctcccttgcacctgtacctcttggtctttgaataaagcctgagtaggaaggctagcaaaaaaaaaaaaaaaaaaaaaaaaaaaaaaaaaaaaaaaaaaaaaaaaaaaaaaaaaaaaaaaaaaaaaaaaaaaaaaaa

SEQ ID NO: 16297 - RNA, 9485 nt, synthetic construct
  source 1..9485: mol_type = other RNA
aggaaataagagagaaaagaagagtaagaagaaatataagagccaccatggcccctaagaagaagcgtaaagtgagccggatggaacgcctcgtctacgaggtgcggcagaagtgcagaaacatcgaggacatctgcatctcctgcggatctctgaacgtgaccctggagcacccactgttcatcggcggcatgtgccagaactgtaaaaactgttttctggagtgtgcctatcaatacgacgatgacggctaccagagctactgcaccatctgttgcggcggaagagaggtgctgatgtgtggaaataacaactgctgccggtgcttctgcgtggaatgcgtggacctgctggtgggccccggcgccgcccaggccgctattaaggaagatccttggaactgctacatgtgcggccacaagggcacatacggcctgctgagacggagagaggactggcctagcagactgcagatgttcttcgccaataaccacgaccaggagttcgacccccctaaggtgtaccctcccgtccccgccgagaagagaaagcccatccgggtcctgagcctgttcgatggcatcgccaccggtctgctggtgctgaaggacctgggcatccaggtggataggtacattgcctccgaggtgtgcgaggactccatcaccgtgggaatggtgcgtcatcagggcaagatcatgtacgtgggcgacgtgcggagcgtgacacagaagcatatccaggagtggggccctttcgacctggtgatcggcggcagcccttgcaatgacctgagcatcgtgaacccagcccggaagggcctgtacgagggaaccggcagactgttcttcgagttttacagactgctgcacgacgcccggcctaaggaaggcgacgaccggcccttcttttggctgttcgagaatgtggtggccatgggagtcagcgacaagcgggatattagccggttcctggagagcaaccccgtgatgatcgatgccaaggaagtgagcgccgcccaccgggccagatacttctggggcaatctgcctggcatgaacagacccctggccagcaccgtgaacgacaagctggagctgcaggagtgcctggagcacggccggatcgccaagttcagcaaggtgagaaccatcaccacccgaagcaacagcatcaaacaaggcaaggaccagcactttcctgtgttcatgaacgagaaggaggacatcctgtggtgtaccgagatggagagagtgttcgggttcccagtccactacacagatgtcagcaacatgtctagactggccagacagagactgctgggaagaagctggtccgtccctgtgatcagacacctgttcgcccctctgaaggagtacttcgcctgcgtgagcagcggcaacagcaacgccaacagccggggccccagcttctctagcggcctggtgccactgtccctgagagggagccacatgggccccatggagatctacaaaaccgtgagcgcctggaagcggcagcctgtgcgcgtgctgagcctgtttcggaatatcgataaagtcctgaaaagcctgggattcctggagagcggctctggctccggcggtggcaccctgaagtacgtggaggatgtgacaaacgtggtcagacgggatgtggagaagtggggccccttcgatctggtgtacggcagcacccaacccctgggcagctcttgtgaccggtgccctggctggtacatgtttcagttccaccggatcctgcagtacgccctgccgagacaggagtcccagcggccattcttttggattttcatggacaacttgctgctgaccgaggatgaccaggaaactaccactcggttcctgcagaccgaagccgtgaccctgcaggacgtgagaggccgggactaccagaacgccatgcgggtgtggtccaacatccctggactgaaaagcaagcacgcacctctgacccctaaagaagaggagtacctgcaggcccaggtgcggagcagaagcaagctggacgcccctaaggtggatctgctggtgaagaattgcctcctgcccctgagagagtacttcaagtatttcagccagaatagtctgcccctgggaggcagcggcggcggcgccctggtgacatttgaggacgtcgccgtgcggttcacccaggaggaatgggctctgctggatccttctcagaaaatcctgtaccgggacgtgatgagagagacataccggaatctgacctccgtgggcatcaactgggaatgttgggaccttgaagcctgcttcagaagcctgggaagaaacctgagagtgcaggtggtgaagagaaagtgcgagctgaccaacagcggcccctgcgccgagggcggcccaagcagcggcgcccctcctcccagcggcggcagcccagccggctccccaacctctaccgaggagggcacctctgagtccgccacccccgagagcggccctggcacctccaccgagcccagcgagggcagcgcacccggcagccctgccggcagccccacctccacagaggagggaaccagcaccgagcccagcgaaggcagcgccccaggcaccagcaccgagcctagtgagcaggagattaaacggatcaacaagatcagaagaagacttgtgaaagacagcaacaccaagaaggccggcaagacaggccccatgaaaaccctgctggttagagtgatgacacccgatctgagagagcggctggaaaacctgagaaagaagcctgaaaatatcccccagcccatcagcaatacatctagagccaacctgaataagctgctgaccgattacaccgaaatgaagaaggcgatcctgcatgtgtactgggaagagttccagaaggaccctgtgggcctgatgagccgggtggcccagcctgccagcaagaagatcgatcagaacaagctgaaacctgagatggacgagaagggcaacctgaccaccgccggctttgcctgctctcagtgtggccagcccctgttcgtgtacaagctggagcaggtgtctgagaagggcaaggcttacaccaactacttcggacggtgcaatgtggccgagcacgaaaagctgatcctgctggcccagctgaagcccgagaaggatagcgacgaagccgtgacatatagcctgggaaagtttgggcagagggccctggatttctacagcattcatgtgaccaaggagtccacccaccccgtgaagcccctggcccagatcgccggaaacagatacgcctccggacctgtgggaaaggccctgagcgacgcatgtatgggcacaatcgcctccttcctgtctaagtaccaggacatcatcatcgaacaccagaaggtggtgaagggcaaccagaagagactggagagcctgcgggagctggccggcaaggaaaacctggaataccctagcgtgaccctgccacctcagcctcacaccaaggagggcgttgatgcctacaacgaagtgatcgcccgggtgcgaatgtgggtgaacctgaacctgtggcagaagctgaagctaagcagagatgatgccaagcctctgctgagactgaagggattcccttcctttcctctggtcgagagacaggccaacgaagtggactggtgggacatggtgtgtaacgtgaagaagctgatcaacgagaaaaaggaggatggcaaggtgttttggcagaatctggctggctacaagagacaggaagccctgagaccatacctgagcagcgaggaagatcggaagaagggaaagaaattcgctcggtaccagctgggcgacctgctgctgcacctggaaaagaagcacggcgaggactggggaaaggtgtacgacgaggcctgggagcggattgacaagaaagtggaaggcctgagcaagcacatcaagctggaagaggaacggagaagcgaggacgcccagagcaaggccgccctgaccgactggctgcgggctaaggccagcttcgtgatcgagggcctgaaggaggccgacaaggacgagttctgcagatgcgagctgaagctgcagaagtggtacggggacctgcggggaaagcccttcgccatcgaagccgagaacagcatcctggacatcagcggcttcagcaagcagtacaactgtgccttcatctggcagaaggacggcgtgaagaagctgaacctgtacctgatcatcaactacttcaagggcggcaagctgcggttcaagaagatcaaacctgaagccttcgaagccaacagattctacaccgtgatcaacaaaaagagcggcgagatcgtgcccatggaggtgaacttcaacttcgacgaccccaacctgatcatcctgcctctggcctttggcaagagacagggcagagaattcatctggaacgacctgctgtccctggaaaccggcagcctgaagctggccaacggaagagtgatcgagaagacactgtacaacagaagaacccggcaggatgagcctgccctgttcgtggccctgaccttcgagcggcgggaggtcctggactcctccaatatcaaaccaatgaacctgatcggcgtggcaagaggcgaaaacatccccgccgtgatcgccctgaccgaccccgagggctgcccactgagccggtttaaggatagcctgggaaacccaacccacatcctgagaatcggcgagagctataaggagaagcagcggaccatccaggccaagaaggaggtggagcagcggagagccggcggctacagccggaagtacgccagcaaagccaagaatctggcagacgatatggtgagaaacaccgctagagatctgctgtactacgccgtgacccaggatgccatgctgatcttcgccaacctgagccggggcttcggccggcagggcaagcggaccttcatggccgagagacagtacacacggatggaggactggctgaccgccaagctggcctacgagggcctgagcaagacctacctgtccaagacactggcccagtacacctccaagacatgcagcaactgtgggtttaccatcaccagcgccgactacgacagggtgctggagaagctgaagaagacagcaacaggctggatgaccacaattaacggcaaggagctgaaggtggagggccagattacctactacaacagatacaagagacagaacgtagtcaaggacctgtccgtcgagctggatagactgagcgaagaatctgtgaacaacgacatctcctcctggacaaagggcagaagcggagaagctctgagcctcctgaagaaaagattctcccatagacccgtgcaggagaagttcgtgtgcctgaactgcggcttcgagacacacgcagccgagcaagccgccctgaacatcgccagatcctggctgttcctgcggagccaggagtacaagaaataccagacaaacaagacaaccggcaacaccgataagagagccttcgtcgagacctggcagtccttttaccggaagaagcttaaggaggtgtggaaacctgccgtgcggtctggcggatctggcggaggctccttccaggagcccgtgaccttcgaggacgtggtggtgtacttcacccagaacgagtggaccagcctgcagcccagccagagggccctgtacagggaggtgatgctggagaactacgccaccgtgaccagcctgagcgccttccccttcagcaagcccgacctgatcttcaggctggagcagggcgaggccgcctggggcagcgacccctggaccctggccggcgaggaggcccccaggggcctgggcggcccaagcagcggcgcccctcctcccagcggcggcagcccagccggctccccaacctctaccgaggagggcacctctgagtccgccacccccgagagcggccctggcacctccaccgagcccagcgagggcagcgcacccggcagccctgccggcagccccacctccacagaggagggaaccagcaccgagcccagcgaaggcagcgccccaggcaccagcaccgagcctagtgagcaggagattaaacggatcaacaagatcagaagaagacttgtgaaagacagcaacaccaagaaggccggcaagacaggccccatgaaaaccctgctggttagagtgatgacacccgatctgagagagcggctggaaaacctgagaaagaagcctgaaaatatcccccagcccatcagcaatacatctagagccaacctgaataagctgctgaccgattacaccgaaatgaagaaggcgatcctgcatgtgtactgggaagagttccagaaggaccctgtgggcctgatgagccgggtggcccagcctgccagcaagaagatcgatcagaacaagctgaaacctgagatggacgagaagggcaacctgaccaccgccggctttgcctgctctcagtgtggccagcccctgttcgtgtacaagctggagcaggtgtctgagaagggcaaggcttacaccaactacttcggacggtgcaatgtggccgagcacgaaaagctgatcctgctggcccagctgaagcccgagaaggatagcgacgaagccgtgacatatagcctgggaaagtttgggcagagggccctggatttctacagcattcatgtgaccaaggagtccacccaccccgtgaagcccctggcccagatcgccggaaacagatacgcctccggacctgtgggaaaggccctgagcgacgcatgtatgggcacaatcgcctccttcctgtctaagtaccaggacatcatcatcgaacaccagaaggtggtgaagggcaaccagaagagactggagagcctgcgggagctggccggcaaggaaaacctggaataccctagcgtgaccctgccacctcagcctcacaccaaggagggcgttgatgcctacaacgaagtgatcgcccgggtgcgaatgtgggtgaacctgaacctgtggcagaagctgaagctaagcagagatgatgccaagcctctgctgagactgaagggattcccttcctttcctctggtcgagagacaggccaacgaagtggactggtgggacatggtgtgtaacgtgaagaagctgatcaacgagaaaaaggaggatggcaaggtgttttggcagaatctggctggctacaagagacaggaagccctgagaccatacctgagcagcgaggaagatcggaagaagggaaagaaattcgctcggtaccagctgggcgacctgctgctgcacctggaaaagaagcacggcgaggactggggaaaggtgtacgacgaggcctgggagcggattgacaagaaagtggaaggcctgagcaagcacatcaagctggaagaggaacggagaagcgaggacgcccagagcaaggccgccctgaccgactggctgcgggctaaggccagcttcgtgatcgagggcctgaaggaggccgacaaggacgagttctgcagatgcgagctgaagctgcagaagtggtacggggacctgcggggaaagcccttcgccatcgaagccgagaacagcatcctggacatcagcggcttcagcaagcagtacaactgtgccttcatctggcagaaggacggcgtgaagaagctgaacctgtacctgatcatcaactacttcaagggcggcaagctgcggttcaagaagatcaaacctgaagccttcgaagccaacagattctacaccgtgatcaacaaaaagagcggcgagatcgtgcccatggaggtgaacttcaacttcgacgaccccaacctgatcatcctgcctctggcctttggcaagagacagggcagagaattcatctggaacgacctgctgtccctggaaaccggcagcctgaagctggccaacggaagagtgatcgagaagacactgtacaacagaagaacccggcaggatgagcctgccctgttcgtggccctgaccttcgagcggcgggaggtcctggactcctccaatatcaaaccaatgaacctgatcggcgtggcaagaggcgaaaacatccccgccgtgatcgccctgaccgaccccgagggctgcccactgagccggtttaaggatagcctgggaaacccaacccacatcctgagaatcggcgagagctataaggagaagcagcggaccatccaggccaagaaggaggtggagcagcggagagccggcggctacagccggaagtacgccagcaaagccaagaatctggcagacgatatggtgagaaacaccgctagagatctgctgtactacgccgtgacccaggatgccatgctgatcttcgccaacctgagccggggcttcggccggcagggcaagcggaccttcatggccgagagacagtacacacggatggaggactggctgaccgccaagctggcctacgagggcctgagcaagacctacctgtccaagacactggcccagtacacctccaagacatgcagcaactgtgggtttaccatcaccagcgccgactacgacagggtgctggagaagctgaagaagacagcaacaggctggatgaccacaattaacggcaaggagctgaaggtggagggccagattacctactacaacagatacaagagacagaacgtagtcaaggacctgtccgtcgagctggatagactgagcgaagaatctgtgaacaacgacatctcctcctggacaaagggcagaagcggagaagctctgagcctcctgaagaaaagattctcccatagacccgtgcaggagaagttcgtgtgcctgaactgcggcttcgagacacacgcagccgagcaagccgccctgaacatcgccagatcctggctgttcctgcggagccaggagtacaagaaataccagacaaacaagacaaccggcaacaccgataagagagccttcgtcgagacctggcagtccttttaccggaagaagcttaaggaggtgtggaaacctgccgtgcggtctggcggatctggcggaggctcctttccaggagcccgtgaccttcgaggacgtggtggtgtacttcacccagaacgagtggaccagcctgcagcccagccagagggccctgtacagggaggtgatgctggagaactacgccaccgtgaccagcctgagcgccttccccttcagcaagcccgacctgatcttcaggctggagcagggcgaggccgcctggggcagcgacccctggaccctggccggcgaggaggcccccaggggcctgggatctggctccggcagcggccccaagaaaaagagaaaagtctaagctgccttctgcggggcttgccttctggccatgcccttcttctctcccttgcacctgtacctcttggtctttgaataaagcctgagtaggaaggctagcaaaaaaaaaaaaaaaaaaaaaaaaaaaaaaaaaaaaaaaaaaaaaaaaaaaaaaaaaaaaaaaaaaaaaaaaaaaaaaaa

SEQ ID NO: 16298 - RNA, 9485 nt, synthetic construct
  source 1..9485: mol_type = other RNA
aggaaataagagagaaaagaagagtaagaagaaatataagagccaccatggcccctaagaagaagcgtaaagtgagccggatggaacgcctcgtctacgaggtgcggcagaagtgcagaaacatcgaggacatctgcatctcctgcggatctctgaacgtgaccctggagcacccactgttcatcggcggcatgtgccagaactgtaaaaactgttttctggagtgtgcctatcaatacgacgatgacggctaccagagctactgcaccatctgttgcggcggaagagaggtgctgatgtgtggaaataacaactgctgccggtgcttctgcgtggaatgcgtggacctgctggtgggccccggcgccgcccaggccgctattaaggaagatccttggaactgctacatgtgcggccacaagggcacatacggcctgctgagacggagagaggactggcctagcagactgcagatgttcttcgccaataaccacgaccaggagttcgacccccctaaggtgtaccctcccgtccccgccgagaagagaaagcccatccgggtcctgagcctgttcgatggcatcgccaccggtctgctggtgctgaaggacctgggcatccaggtggataggtacattgcctccgaggtgtgcgaggactccatcaccgtgggaatggtgcgtcatcagggcaagatcatgtacgtgggcgacgtgcggagcgtgacacagaagcatatccaggagtggggccctttcgacctggtgatcggcggcagcccttgcaatgacctgagcatcgtgaacccagcccggaagggcctgtacgagggaaccggcagactgttcttcgagttttacagactgctgcacgacgcccggcctaaggaaggcgacgaccggcccttcttttggctgttcgagaatgtggtggccatgggagtcagcgacaagcgggatattagccggttcctggagagcaaccccgtgatgatcgatgccaaggaagtgagcgccgcccaccgggccagatacttctggggcaatctgcctggcatgaacagacccctggccagcaccgtgaacgacaagctggagctgcaggagtgcctggagcacggccggatcgccaagttcagcaaggtgagaaccatcaccacccgaagcaacagcatcaaacaaggcaaggaccagcactttcctgtgttcatgaacgagaaggaggacatcctgtggtgtaccgagatggagagagtgttcgggttcccagtccactacacagatgtcagcaacatgtctagactggccagacagagactgctgggaagaagctggtccgtccctgtgatcagacacctgttcgcccctctgaaggagtacttcgcctgcgtgagcagcggcaacagcaacgccaacagccggggccccagcttctctagcggcctggtgccactgtccctgagagggagccacatgggccccatggagatctacaaaaccgtgagcgcctggaagcggcagcctgtgcgcgtgctgagcctgtttcggaatatcgataaagtcctgaaaagcctgggattcctggagagcggctctggctccggcggtggcaccctgaagtacgtggaggatgtgacaaacgtggtcagacgggatgtggagaagtggggccccttcgatctggtgtacggcagcacccaacccctgggcagctcttgtgaccggtgccctggctggtacatgtttcagttccaccggatcctgcagtacgccctgccgagacaggagtcccagcggccattcttttggattttcatggacaacttgctgctgaccgaggatgaccaggaaactaccactcggttcctgcagaccgaagccgtgaccctgcaggacgtgagaggccgggactaccagaacgccatgcgggtgtggtccaacatccctggactgaaaagcaagcacgcacctctgacccctaaagaagaggagtacctgcaggcccaggtgcggagcagaagcaagctggacgcccctaaggtggatctgctggtgaagaattgcctcctgcccctgagagagtacttcaagtatttcagccagaatagtctgcccctgggaggcagcggcggcggcgccctggtgacatttgaggacgtcgccgtgcggttcacccaggaggaatgggctctgctggatccttctcagaaaatcctgtaccgggacgtgatgagagagacataccggaatctgacctccgtgggcatcaactgggaatgttgggaccttgaagcctgcttcagaagcctgggaagaaacctgagagtgcaggtggtgaagagaaagtgcgagctgaccaacagcggcccctgcgccgagggcggcccaagcagcggcgcccctcctcccagcggcggcagcccagccggctccccaacctctaccgaggagggcacctctgagtccgccacccccgagagcggccctggcacctccaccgagcccagcgagggcagcgcacccggcagccctgccggcagccccacctccacagaggagggaaccagcaccgagcccagcgaaggcagcgccccaggcaccagcaccgagcctagtgagcaggagattaaacggatcaacaagatcagaagaagacttgtgaaagacagcaacaccaagaaggccggcaagacaggccccatgaaaaccctgctggttagagtgatgacacccgatctgagagagcggctggaaaacctgagaaagaagcctgaaaatatcccccagcccatcagcaatacatctagagccaacctgaataagctgctgaccgattacaccgaaatgaagaaggcgatcctgcatgtgtactgggaagagttccagaaggaccctgtgggcctgatgagccgggtggcccagcctgccagcaagaagatcgatcagaacaagctgaaacctgagatggacgagaagggcaacctgaccaccgccggctttgcctgctctcagtgtggccagcccctgttcgtgtacaagctggagcaggtgtctgagaagggcaaggcttacaccaactacttcggacggtgcaatgtggccgagcacgaaaagctgatcctgctggcccagctgaagcccgagaaggatagcgacgaagccgtgacatatagcctgggaaagtttgggcagagggccctggatttctacagcattcatgtgaccaaggagtccacccaccccgtgaagcccctggcccagatcgccggaaacagatacgcctccggacctgtgggaaaggccctgagcgacgcatgtatgggcacaatcgcctccttcctgtctaagtaccaggacatcatcatcgaacaccagaaggtggtgaagggcaaccagaagagactggagagcctgcgggagctggccggcaaggaaaacctggaataccctagcgtgaccctgccacctcagcctcacaccaaggagggcgttgatgcctacaacgaagtgatcgcccgggtgcgaatgtgggtgaacctgaacctgtggcagaagctgaagctaagcagagatgatgccaagcctctgctgagactgaagggattcccttcctttcctctggtcgagagacaggccaacgaagtggactggtgggacatggtgtgtaacgtgaagaagctgatcaacgagaaaaaggaggatggcaaggtgttttggcagaatctggctggctacaagagacaggaagccctgagaccatacctgagcagcgaggaagatcggaagaagggaaagaaattcgctcggtaccagctgggcgacctgctgctgcacctggaaaagaagcacggcgaggactggggaaaggtgtacgacgaggcctgggagcggattgacaagaaagtggaaggcctgagcaagcacatcaagctggaagaggaacggagaagcgaggacgcccagagcaaggccgccctgaccgactggctgcgggctaaggccagcttcgtgatcgagggcctgaaggaggccgacaaggacgagttctgcagatgcgagctgaagctgcagaagtggtacggggacctgcggggaaagcccttcgccatcgaagccgagaacagcatcctggacatcagcggcttcagcaagcagtacaactgtgccttcatctggcagaaggacggcgtgaagaagctgaacctgtacctgatcatcaactacttcaagggcggcaagctgcggttcaagaagatcaaacctgaagccttcgaagccaacagattctacaccgtgatcaacaaaaagagcggcgagatcgtgcccatggaggtgaacttcaacttcgacgaccccaacctgatcatcctgcctctggcctttggcaagagacagggcagagaattcatctggaacgacctgctgtccctggaaaccggcagcctgaagctggccaacggaagagtgatcgagaagacactgtacaacagaagaacccggcaggatgagcctgccctgttcgtggccctgaccttcgagcggcgggaggtcctggactcctccaatatcaaaccaatgaacctgatcggcgtggcaagaggcgaaaacatccccgccgtgatcgccctgaccgaccccgagggctgcccactgagccggtttaaggatagcctgggaaacccaacccacatcctgagaatcggcgagagctataaggagaagcagcggaccatccaggccaagaaggaggtggagcagcggagagccggcggctacagccggaagtacgccagcaaagccaagaatctggcagacgatatggtgagaaacaccgctagagatctgctgtactacgccgtgacccaggatgccatgctgatcttcgccaacctgagccggggcttcggccggcagggcaagcggaccttcatggccgagagacagtacacacggatggaggactggctgaccgccaagctggcctacgagggcctgagcaagacctacctgtccaagacactggcccagtacacctccaagacatgcagcaactgtgggtttaccatcaccagcgccgactacgacagggtgctggagaagctgaagaagacagcaacaggctggatgaccacaattaacggcaaggagctgaaggtggagggccagattacctactacaacagatacaagagacagaacgtagtcaaggacctgtccgtcgagctggatagactgagcgaagaatctgtgaacaacgacatctcctcctggacaaagggcagaagcggagaagctctgagcctcctgaagaaaagattctcccatagacccgtgcaggagaagttcgtgtgcctgaactgcggcttcgagacacacgcagccgagcaagccgccctgaacatcgccagatcctggctgttcctgcggagccaggagtacaagaaataccagacaaacaagacaaccggcaacaccgataagagagccttcgtcgagacctggcagtccttttaccggaagaagcttaaggaggtgtggaaacctgccgtgcggtctggcggatctggcggaggctccatggccgccatccccctgaaggcccagtgccaggagaccgtgaccttcgaggacgtggccgtgcacttcaccaagaccgagtggaccggcctgagccccgcccagagggccctgtacaggagcgtgatgctggagaactacggcaacctgaccgccatgggctacctggtgcccaagcccgccctgatcagcctgctggagggcggcgacatggcctggggcctggaggcccaggacgaccccggcggcccaagcagcggcgcccctcctcccagcggcggcagcccagccggctccccaacctctaccgaggagggcacctctgagtccgccacccccgagagcggccctggcacctccaccgagcccagcgagggcagcgcacccggcagccctgccggcagccccacctccacagaggagggaaccagcaccgagcccagcgaaggcagcgccccaggcaccagcaccgagcctagtgagcaggagattaaacggatcaacaagatcagaagaagacttgtgaaagacagcaacaccaagaaggccggcaagacaggccccatgaaaaccctgctggttagagtgatgacacccgatctgagagagcggctggaaaacctgagaaagaagcctgaaaatatcccccagcccatcagcaatacatctagagccaacctgaataagctgctgaccgattacaccgaaatgaagaaggcgatcctgcatgtgtactgggaagagttccagaaggaccctgtgggcctgatgagccgggtggcccagcctgccagcaagaagatcgatcagaacaagctgaaacctgagatggacgagaagggcaacctgaccaccgccggctttgcctgctctcagtgtggccagcccctgttcgtgtacaagctggagcaggtgtctgagaagggcaaggcttacaccaactacttcggacggtgcaatgtggccgagcacgaaaagctgatcctgctggcccagctgaagcccgagaaggatagcgacgaagccgtgacatatagcctgggaaagtttgggcagagggccctggatttctacagcattcatgtgaccaaggagtccacccaccccgtgaagcccctggcccagatcgccggaaacagatacgcctccggacctgtgggaaaggccctgagcgacgcatgtatgggcacaatcgcctccttcctgtctaagtaccaggacatcatcatcgaacaccagaaggtggtgaagggcaaccagaagagactggagagcctgcgggagctggccggcaaggaaaacctggaataccctagcgtgaccctgccacctcagcctcacaccaaggagggcgttgatgcctacaacgaagtgatcgcccgggtgcgaatgtgggtgaacctgaacctgtggcagaagctgaagctaagcagagatgatgccaagcctctgctgagactgaagggattcccttcctttcctctggtcgagagacaggccaacgaagtggactggtgggacatggtgtgtaacgtgaagaagctgatcaacgagaaaaaggaggatggcaaggtgttttggcagaatctggctggctacaagagacaggaagccctgagaccatacctgagcagcgaggaagatcggaagaagggaaagaaattcgctcggtaccagctgggcgacctgctgctgcacctggaaaagaagcacggcgaggactggggaaaggtgtacgacgaggcctgggagcggattgacaagaaagtggaaggcctgagcaagcacatcaagctggaagaggaacggagaagcgaggacgcccagagcaaggccgccctgaccgactggctgcgggctaaggccagcttcgtgatcgagggcctgaaggaggccgacaaggacgagttctgcagatgcgagctgaagctgcagaagtggtacggggacctgcggggaaagcccttcgccatcgaagccgagaacagcatcctggacatcagcggcttcagcaagcagtacaactgtgccttcatctggcagaaggacggcgtgaagaagctgaacctgtacctgatcatcaactacttcaagggcggcaagctgcggttcaagaagatcaaacctgaagccttcgaagccaacagattctacaccgtgatcaacaaaaagagcggcgagatcgtgcccatggaggtgaacttcaacttcgacgaccccaacctgatcatcctgcctctggcctttggcaagagacagggcagagaattcatctggaacgacctgctgtccctggaaaccggcagcctgaagctggccaacggaagagtgatcgagaagacactgtacaacagaagaacccggcaggatgagcctgccctgttcgtggccctgaccttcgagcggcgggaggtcctggactcctccaatatcaaaccaatgaacctgatcggcgtggcaagaggcgaaaacatccccgccgtgatcgccctgaccgaccccgagggctgcccactgagccggtttaaggatagcctgggaaacccaacccacatcctgagaatcggcgagagctataaggagaagcagcggaccatccaggccaagaaggaggtggagcagcggagagccggcggctacagccggaagtacgccagcaaagccaagaatctggcagacgatatggtgagaaacaccgctagagatctgctgtactacgccgtgacccaggatgccatgctgatcttcgccaacctgagccggggcttcggccggcagggcaagcggaccttcatggccgagagacagtacacacggatggaggactggctgaccgccaagctggcctacgagggcctgagcaagacctacctgtccaagacactggcccagtacacctccaagacatgcagcaactgtgggtttaccatcaccagcgccgactacgacagggtgctggagaagctgaagaagacagcaacaggctggatgaccacaattaacggcaaggagctgaaggtggagggccagattacctactacaacagatacaagagacagaacgtagtcaaggacctgtccgtcgagctggatagactgagcgaagaatctgtgaacaacgacatctcctcctggacaaagggcagaagcggagaagctctgagcctcctgaagaaaagattctcccatagacccgtgcaggagaagttcgtgtgcctgaactgcggcttcgagacacacgcagccgagcaagccgccctgaacatcgccagatcctggctgttcctgcggagccaggagtacaagaaataccagacaaacaagacaaccggcaacaccgataagagagccttcgtcgagacctggcagtccttttaccggaagaagcttaaggaggtgtggaaacctgccgtgcggtctggcggatctggcggaggctcctatggccgccatccccctgaaggcccagtgccaggagaccgtgaccttcgaggacgtggccgtgcacttcaccaagaccgagtggaccggcctgagccccgcccagagggccctgtacaggagcgtgatgctggagaactacggcaacctgaccgccatgggctacctggtgcccaagcccgccctgatcagcctgctggagggcggcgacatggcctggggcctggaggcccaggacgaccccggatctggctccggcagcggccccaagaaaaagagaaaagtctaagctgccttctgcggggcttgccttctggccatgcccttcttctctcccttgcacctgtacctcttggtctttgaataaagcctgagtaggaaggctagcaaaaaaaaaaaaaaaaaaaaaaaaaaaaaaaaaaaaaaaaaaaaaaaaaaaaaaaaaaaaaaaaaaaaaaaaaaaaaaaa

SEQ ID NO: 16299 - RNA, 9485 nt, synthetic construct
  source 1..9485: mol_type = other RNA
aggaaataagagagaaaagaagagtaagaagaaatataagagccaccatggcccctaagaagaagcgtaaagtgagccggatggaacgcctcgtctacgaggtgcggcagaagtgcagaaacatcgaggacatctgcatctcctgcggatctctgaacgtgaccctggagcacccactgttcatcggcggcatgtgccagaactgtaaaaactgttttctggagtgtgcctatcaatacgacgatgacggctaccagagctactgcaccatctgttgcggcggaagagaggtgctgatgtgtggaaataacaactgctgccggtgcttctgcgtggaatgcgtggacctgctggtgggccccggcgccgcccaggccgctattaaggaagatccttggaactgctacatgtgcggccacaagggcacatacggcctgctgagacggagagaggactggcctagcagactgcagatgttcttcgccaataaccacgaccaggagttcgacccccctaaggtgtaccctcccgtccccgccgagaagagaaagcccatccgggtcctgagcctgttcgatggcatcgccaccggtctgctggtgctgaaggacctgggcatccaggtggataggtacattgcctccgaggtgtgcgaggactccatcaccgtgggaatggtgcgtcatcagggcaagatcatgtacgtgggcgacgtgcggagcgtgacacagaagcatatccaggagtggggccctttcgacctggtgatcggcggcagcccttgcaatgacctgagcatcgtgaacccagcccggaagggcctgtacgagggaaccggcagactgttcttcgagttttacagactgctgcacgacgcccggcctaaggaaggcgacgaccggcccttcttttggctgttcgagaatgtggtggccatgggagtcagcgacaagcgggatattagccggttcctggagagcaaccccgtgatgatcgatgccaaggaagtgagcgccgcccaccgggccagatacttctggggcaatctgcctggcatgaacagacccctggccagcaccgtgaacgacaagctggagctgcaggagtgcctggagcacggccggatcgccaagttcagcaaggtgagaaccatcaccacccgaagcaacagcatcaaacaaggcaaggaccagcactttcctgtgttcatgaacgagaaggaggacatcctgtggtgtaccgagatggagagagtgttcgggttcccagtccactacacagatgtcagcaacatgtctagactggccagacagagactgctgggaagaagctggtccgtccctgtgatcagacacctgttcgcccctctgaaggagtacttcgcctgcgtgagcagcggcaacagcaacgccaacagccggggccccagcttctctagcggcctggtgccactgtccctgagagggagccacatgggccccatggagatctacaaaaccgtgagcgcctggaagcggcagcctgtgcgcgtgctgagcctgtttcggaatatcgataaagtcctgaaaagcctgggattcctggagagcggctctggctccggcggtggcaccctgaagtacgtggaggatgtgacaaacgtggtcagacgggatgtggagaagtggggccccttcgatctggtgtacggcagcacccaacccctgggcagctcttgtgaccggtgccctggctggtacatgtttcagttccaccggatcctgcagtacgccctgccgagacaggagtcccagcggccattcttttggattttcatggacaacttgctgctgaccgaggatgaccaggaaactaccactcggttcctgcagaccgaagccgtgaccctgcaggacgtgagaggccgggactaccagaacgccatgcgggtgtggtccaacatccctggactgaaaagcaagcacgcacctctgacccctaaagaagaggagtacctgcaggcccaggtgcggagcagaagcaagctggacgcccctaaggtggatctgctggtgaagaattgcctcctgcccctgagagagtacttcaagtatttcagccagaatagtctgcccctgggaggcagcggcggcggcgccctggtgacatttgaggacgtcgccgtgcggttcacccaggaggaatgggctctgctggatccttctcagaaaatcctgtaccgggacgtgatgagagagacataccggaatctgacctccgtgggcatcaactgggaatgttgggaccttgaagcctgcttcagaagcctgggaagaaacctgagagtgcaggtggtgaagagaaagtgcgagctgaccaacagcggcccctgcgccgagggcggcccaagcagcggcgcccctcctcccagcggcggcagcccagccggctccccaacctctaccgaggagggcacctctgagtccgccacccccgagagcggccctggcacctccaccgagcccagcgagggcagcgcacccggcagccctgccggcagccccacctccacagaggagggaaccagcaccgagcccagcgaaggcagcgccccaggcaccagcaccgagcctagtgagcaggagattaaacggatcaacaagatcagaagaagacttgtgaaagacagcaacaccaagaaggccggcaagacaggccccatgaaaaccctgctggttagagtgatgacacccgatctgagagagcggctggaaaacctgagaaagaagcctgaaaatatcccccagcccatcagcaatacatctagagccaacctgaataagctgctgaccgattacaccgaaatgaagaaggcgatcctgcatgtgtactgggaagagttccagaaggaccctgtgggcctgatgagccgggtggcccagcctgccagcaagaagatcgatcagaacaagctgaaacctgagatggacgagaagggcaacctgaccaccgccggctttgcctgctctcagtgtggccagcccctgttcgtgtacaagctggagcaggtgtctgagaagggcaaggcttacaccaactacttcggacggtgcaatgtggccgagcacgaaaagctgatcctgctggcccagctgaagcccgagaaggatagcgacgaagccgtgacatatagcctgggaaagtttgggcagagggccctggatttctacagcattcatgtgaccaaggagtccacccaccccgtgaagcccctggcccagatcgccggaaacagatacgcctccggacctgtgggaaaggccctgagcgacgcatgtatgggcacaatcgcctccttcctgtctaagtaccaggacatcatcatcgaacaccagaaggtggtgaagggcaaccagaagagactggagagcctgcgggagctggccggcaaggaaaacctggaataccctagcgtgaccctgccacctcagcctcacaccaaggagggcgttgatgcctacaacgaagtgatcgcccgggtgcgaatgtgggtgaacctgaacctgtggcagaagctgaagctaagcagagatgatgccaagcctctgctgagactgaagggattcccttcctttcctctggtcgagagacaggccaacgaagtggactggtgggacatggtgtgtaacgtgaagaagctgatcaacgagaaaaaggaggatggcaaggtgttttggcagaatctggctggctacaagagacaggaagccctgagaccatacctgagcagcgaggaagatcggaagaagggaaagaaattcgctcggtaccagctgggcgacctgctgctgcacctggaaaagaagcacggcgaggactggggaaaggtgtacgacgaggcctgggagcggattgacaagaaagtggaaggcctgagcaagcacatcaagctggaagaggaacggagaagcgaggacgcccagagcaaggccgccctgaccgactggctgcgggctaaggccagcttcgtgatcgagggcctgaaggaggccgacaaggacgagttctgcagatgcgagctgaagctgcagaagtggtacggggacctgcggggaaagcccttcgccatcgaagccgagaacagcatcctggacatcagcggcttcagcaagcagtacaactgtgccttcatctggcagaaggacggcgtgaagaagctgaacctgtacctgatcatcaactacttcaagggcggcaagctgcggttcaagaagatcaaacctgaagccttcgaagccaacagattctacaccgtgatcaacaaaaagagcggcgagatcgtgcccatggaggtgaacttcaacttcgacgaccccaacctgatcatcctgcctctggcctttggcaagagacagggcagagaattcatctggaacgacctgctgtccctggaaaccggcagcctgaagctggccaacggaagagtgatcgagaagacactgtacaacagaagaacccggcaggatgagcctgccctgttcgtggccctgaccttcgagcggcgggaggtcctggactcctccaatatcaaaccaatgaacctgatcggcgtggcaagaggcgaaaacatccccgccgtgatcgccctgaccgaccccgagggctgcccactgagccggtttaaggatagcctgggaaacccaacccacatcctgagaatcggcgagagctataaggagaagcagcggaccatccaggccaagaaggaggtggagcagcggagagccggcggctacagccggaagtacgccagcaaagccaagaatctggcagacgatatggtgagaaacaccgctagagatctgctgtactacgccgtgacccaggatgccatgctgatcttcgccaacctgagccggggcttcggccggcagggcaagcggaccttcatggccgagagacagtacacacggatggaggactggctgaccgccaagctggcctacgagggcctgagcaagacctacctgtccaagacactggcccagtacacctccaagacatgcagcaactgtgggtttaccatcaccagcgccgactacgacagggtgctggagaagctgaagaagacagcaacaggctggatgaccacaattaacggcaaggagctgaaggtggagggccagattacctactacaacagatacaagagacagaacgtagtcaaggacctgtccgtcgagctggatagactgagcgaagaatctgtgaacaacgacatctcctcctggacaaagggcagaagcggagaagctctgagcctcctgaagaaaagattctcccatagacccgtgcaggagaagttcgtgtgcctgaactgcggcttcgagacacacgcagccgagcaagccgccctgaacatcgccagatcctggctgttcctgcggagccaggagtacaagaaataccagacaaacaagacaaccggcaacaccgataagagagccttcgtcgagacctggcagtccttttaccggaagaagcttaaggaggtgtggaaacctgccgtgcggtctggcggatctggcggaggctccgtgcagggcagcgtgagcttcgaggacgtggccgtgggcttcagccaggaggagtggcagatcctgggccccagccagaaggccctgtactgggacgtgatgctggagaactactgcaacctggtgagcgtgggctaccaggcccccacccccaacagcctgttccagctggagcagggcggccccccctggaccgtggagggcgccgccctgagcagcacctgcagcggctaccaggccaccggcggcccaagcagcggcgcccctcctcccagcggcggcagcccagccggctccccaacctctaccgaggagggcacctctgagtccgccacccccgagagcggccctggcacctccaccgagcccagcgagggcagcgcacccggcagccctgccggcagccccacctccacagaggagggaaccagcaccgagcccagcgaaggcagcgccccaggcaccagcaccgagcctagtgagcaggagattaaacggatcaacaagatcagaagaagacttgtgaaagacagcaacaccaagaaggccggcaagacaggccccatgaaaaccctgctggttagagtgatgacacccgatctgagagagcggctggaaaacctgagaaagaagcctgaaaatatcccccagcccatcagcaatacatctagagccaacctgaataagctgctgaccgattacaccgaaatgaagaaggcgatcctgcatgtgtactgggaagagttccagaaggaccctgtgggcctgatgagccgggtggcccagcctgccagcaagaagatcgatcagaacaagctgaaacctgagatggacgagaagggcaacctgaccaccgccggctttgcctgctctcagtgtggccagcccctgttcgtgtacaagctggagcaggtgtctgagaagggcaaggcttacaccaactacttcggacggtgcaatgtggccgagcacgaaaagctgatcctgctggcccagctgaagcccgagaaggatagcgacgaagccgtgacatatagcctgggaaagtttgggcagagggccctggatttctacagcattcatgtgaccaaggagtccacccaccccgtgaagcccctggcccagatcgccggaaacagatacgcctccggacctgtgggaaaggccctgagcgacgcatgtatgggcacaatcgcctccttcctgtctaagtaccaggacatcatcatcgaacaccagaaggtggtgaagggcaaccagaagagactggagagcctgcgggagctggccggcaaggaaaacctggaataccctagcgtgaccctgccacctcagcctcacaccaaggagggcgttgatgcctacaacgaagtgatcgcccgggtgcgaatgtgggtgaacctgaacctgtggcagaagctgaagctaagcagagatgatgccaagcctctgctgagactgaagggattcccttcctttcctctggtcgagagacaggccaacgaagtggactggtgggacatggtgtgtaacgtgaagaagctgatcaacgagaaaaaggaggatggcaaggtgttttggcagaatctggctggctacaagagacaggaagccctgagaccatacctgagcagcgaggaagatcggaagaagggaaagaaattcgctcggtaccagctgggcgacctgctgctgcacctggaaaagaagcacggcgaggactggggaaaggtgtacgacgaggcctgggagcggattgacaagaaagtggaaggcctgagcaagcacatcaagctggaagaggaacggagaagcgaggacgcccagagcaaggccgccctgaccgactggctgcgggctaaggccagcttcgtgatcgagggcctgaaggaggccgacaaggacgagttctgcagatgcgagctgaagctgcagaagtggtacggggacctgcggggaaagcccttcgccatcgaagccgagaacagcatcctggacatcagcggcttcagcaagcagtacaactgtgccttcatctggcagaaggacggcgtgaagaagctgaacctgtacctgatcatcaactacttcaagggcggcaagctgcggttcaagaagatcaaacctgaagccttcgaagccaacagattctacaccgtgatcaacaaaaagagcggcgagatcgtgcccatggaggtgaacttcaacttcgacgaccccaacctgatcatcctgcctctggcctttggcaagagacagggcagagaattcatctggaacgacctgctgtccctggaaaccggcagcctgaagctggccaacggaagagtgatcgagaagacactgtacaacagaagaacccggcaggatgagcctgccctgttcgtggccctgaccttcgagcggcgggaggtcctggactcctccaatatcaaaccaatgaacctgatcggcgtggcaagaggcgaaaacatccccgccgtgatcgccctgaccgaccccgagggctgcccactgagccggtttaaggatagcctgggaaacccaacccacatcctgagaatcggcgagagctataaggagaagcagcggaccatccaggccaagaaggaggtggagcagcggagagccggcggctacagccggaagtacgccagcaaagccaagaatctggcagacgatatggtgagaaacaccgctagagatctgctgtactacgccgtgacccaggatgccatgctgatcttcgccaacctgagccggggcttcggccggcagggcaagcggaccttcatggccgagagacagtacacacggatggaggactggctgaccgccaagctggcctacgagggcctgagcaagacctacctgtccaagacactggcccagtacacctccaagacatgcagcaactgtgggtttaccatcaccagcgccgactacgacagggtgctggagaagctgaagaagacagcaacaggctggatgaccacaattaacggcaaggagctgaaggtggagggccagattacctactacaacagatacaagagacagaacgtagtcaaggacctgtccgtcgagctggatagactgagcgaagaatctgtgaacaacgacatctcctcctggacaaagggcagaagcggagaagctctgagcctcctgaagaaaagattctcccatagacccgtgcaggagaagttcgtgtgcctgaactgcggcttcgagacacacgcagccgagcaagccgccctgaacatcgccagatcctggctgttcctgcggagccaggagtacaagaaataccagacaaacaagacaaccggcaacaccgataagagagccttcgtcgagacctggcagtccttttaccggaagaagcttaaggaggtgtggaaacctgccgtgcggtctggcggatctggcggaggctcctgtgcagggcagcgtgagcttcgaggacgtggccgtgggcttcagccaggaggagtggcagatcctgggccccagccagaaggccctgtactgggacgtgatgctggagaactactgcaacctggtgagcgtgggctaccaggcccccacccccaacagcctgttccagctggagcagggcggccccccctggaccgtggagggcgccgccctgagcagcacctgcagcggctaccaggccaccggatctggctccggcagcggccccaagaaaaagagaaaagtctaagctgccttctgcggggcttgccttctggccatgcccttcttctctcccttgcacctgtacctcttggtctttgaataaagcctgagtaggaaggctagcaaaaaaaaaaaaaaaaaaaaaaaaaaaaaaaaaaaaaaaaaaaaaaaaaaaaaaaaaaaaaaaaaaaaaaaaaaaaaaaa

SEQ ID NO: 16300 - RNA, 9485 nt, synthetic construct
  source 1..9485: mol_type = other RNA
aggaaataagagagaaaagaagagtaagaagaaatataagagccaccatggcccctaagaagaagcgtaaagtgagccggatggaacgcctcgtctacgaggtgcggcagaagtgcagaaacatcgaggacatctgcatctcctgcggatctctgaacgtgaccctggagcacccactgttcatcggcggcatgtgccagaactgtaaaaactgttttctggagtgtgcctatcaatacgacgatgacggctaccagagctactgcaccatctgttgcggcggaagagaggtgctgatgtgtggaaataacaactgctgccggtgcttctgcgtggaatgcgtggacctgctggtgggccccggcgccgcccaggccgctattaaggaagatccttggaactgctacatgtgcggccacaagggcacatacggcctgctgagacggagagaggactggcctagcagactgcagatgttcttcgccaataaccacgaccaggagttcgacccccctaaggtgtaccctcccgtccccgccgagaagagaaagcccatccgggtcctgagcctgttcgatggcatcgccaccggtctgctggtgctgaaggacctgggcatccaggtggataggtacattgcctccgaggtgtgcgaggactccatcaccgtgggaatggtgcgtcatcagggcaagatcatgtacgtgggcgacgtgcggagcgtgacacagaagcatatccaggagtggggccctttcgacctggtgatcggcggcagcccttgcaatgacctgagcatcgtgaacccagcccggaagggcctgtacgagggaaccggcagactgttcttcgagttttacagactgctgcacgacgcccggcctaaggaaggcgacgaccggcccttcttttggctgttcgagaatgtggtggccatgggagtcagcgacaagcgggatattagccggttcctggagagcaaccccgtgatgatcgatgccaaggaagtgagcgccgcccaccgggccagatacttctggggcaatctgcctggcatgaacagacccctggccagcaccgtgaacgacaagctggagctgcaggagtgcctggagcacggccggatcgccaagttcagcaaggtgagaaccatcaccacccgaagcaacagcatcaaacaaggcaaggaccagcactttcctgtgttcatgaacgagaaggaggacatcctgtggtgtaccgagatggagagagtgttcgggttcccagtccactacacagatgtcagcaacatgtctagactggccagacagagactgctgggaagaagctggtccgtccctgtgatcagacacctgttcgcccctctgaaggagtacttcgcctgcgtgagcagcggcaacagcaacgccaacagccggggccccagcttctctagcggcctggtgccactgtccctgagagggagccacatgggccccatggagatctacaaaaccgtgagcgcctggaagcggcagcctgtgcgcgtgctgagcctgtttcggaatatcgataaagtcctgaaaagcctgggattcctggagagcggctctggctccggcggtggcaccctgaagtacgtggaggatgtgacaaacgtggtcagacgggatgtggagaagtggggccccttcgatctggtgtacggcagcacccaacccctgggcagctcttgtgaccggtgccctggctggtacatgtttcagttccaccggatcctgcagtacgccctgccgagacaggagtcccagcggccattcttttggattttcatggacaacttgctgctgaccgaggatgaccaggaaactaccactcggttcctgcagaccgaagccgtgaccctgcaggacgtgagaggccgggactaccagaacgccatgcgggtgtggtccaacatccctggactgaaaagcaagcacgcacctctgacccctaaagaagaggagtacctgcaggcccaggtgcggagcagaagcaagctggacgcccctaaggtggatctgctggtgaagaattgcctcctgcccctgagagagtacttcaagtatttcagccagaatagtctgcccctgggaggcagcggcggcggcgccctggtgacatttgaggacgtcgccgtgcggttcacccaggaggaatgggctctgctggatccttctcagaaaatcctgtaccgggacgtgatgagagagacataccggaatctgacctccgtgggcatcaactgggaatgttgggaccttgaagcctgcttcagaagcctgggaagaaacctgagagtgcaggtggtgaagagaaagtgcgagctgaccaacagcggcccctgcgccgagggcggcccaagcagcggcgcccctcctcccagcggcggcagcccagccggctccccaacctctaccgaggagggcacctctgagtccgccacccccgagagcggccctggcacctccaccgagcccagcgagggcagcgcacccggcagccctgccggcagccccacctccacagaggagggaaccagcaccgagcccagcgaaggcagcgccccaggcaccagcaccgagcctagtgagcaggagattaaacggatcaacaagatcagaagaagacttgtgaaagacagcaacaccaagaaggccggcaagacaggccccatgaaaaccctgctggttagagtgatgacacccgatctgagagagcggctggaaaacctgagaaagaagcctgaaaatatcccccagcccatcagcaatacatctagagccaacctgaataagctgctgaccgattacaccgaaatgaagaaggcgatcctgcatgtgtactgggaagagttccagaaggaccctgtgggcctgatgagccgggtggcccagcctgccagcaagaagatcgatcagaacaagctgaaacctgagatggacgagaagggcaacctgaccaccgccggctttgcctgctctcagtgtggccagcccctgttcgtgtacaagctggagcaggtgtctgagaagggcaaggcttacaccaactacttcggacggtgcaatgtggccgagcacgaaaagctgatcctgctggcccagctgaagcccgagaaggatagcgacgaagccgtgacatatagcctgggaaagtttgggcagagggccctggatttctacagcattcatgtgaccaaggagtccacccaccccgtgaagcccctggcccagatcgccggaaacagatacgcctccggacctgtgggaaaggccctgagcgacgcatgtatgggcacaatcgcctccttcctgtctaagtaccaggacatcatcatcgaacaccagaaggtggtgaagggcaaccagaagagactggagagcctgcgggagctggccggcaaggaaaacctggaataccctagcgtgaccctgccacctcagcctcacaccaaggagggcgttgatgcctacaacgaagtgatcgcccgggtgcgaatgtgggtgaacctgaacctgtggcagaagctgaagctaagcagagatgatgccaagcctctgctgagactgaagggattcccttcctttcctctggtcgagagacaggccaacgaagtggactggtgggacatggtgtgtaacgtgaagaagctgatcaacgagaaaaaggaggatggcaaggtgttttggcagaatctggctggctacaagagacaggaagccctgagaccatacctgagcagcgaggaagatcggaagaagggaaagaaattcgctcggtaccagctgggcgacctgctgctgcacctggaaaagaagcacggcgaggactggggaaaggtgtacgacgaggcctgggagcggattgacaagaaagtggaaggcctgagcaagcacatcaagctggaagaggaacggagaagcgaggacgcccagagcaaggccgccctgaccgactggctgcgggctaaggccagcttcgtgatcgagggcctgaaggaggccgacaaggacgagttctgcagatgcgagctgaagctgcagaagtggtacggggacctgcggggaaagcccttcgccatcgaagccgagaacagcatcctggacatcagcggcttcagcaagcagtacaactgtgccttcatctggcagaaggacggcgtgaagaagctgaacctgtacctgatcatcaactacttcaagggcggcaagctgcggttcaagaagatcaaacctgaagccttcgaagccaacagattctacaccgtgatcaacaaaaagagcggcgagatcgtgcccatggaggtgaacttcaacttcgacgaccccaacctgatcatcctgcctctggcctttggcaagagacagggcagagaattcatctggaacgacctgctgtccctggaaaccggcagcctgaagctggccaacggaagagtgatcgagaagacactgtacaacagaagaacccggcaggatgagcctgccctgttcgtggccctgaccttcgagcggcgggaggtcctggactcctccaatatcaaaccaatgaacctgatcggcgtggcaagaggcgaaaacatccccgccgtgatcgccctgaccgaccccgagggctgcccactgagccggtttaaggatagcctgggaaacccaacccacatcctgagaatcggcgagagctataaggagaagcagcggaccatccaggccaagaaggaggtggagcagcggagagccggcggctacagccggaagtacgccagcaaagccaagaatctggcagacgatatggtgagaaacaccgctagagatctgctgtactacgccgtgacccaggatgccatgctgatcttcgccaacctgagccggggcttcggccggcagggcaagcggaccttcatggccgagagacagtacacacggatggaggactggctgaccgccaagctggcctacgagggcctgagcaagacctacctgtccaagacactggcccagtacacctccaagacatgcagcaactgtgggtttaccatcaccagcgccgactacgacagggtgctggagaagctgaagaagacagcaacaggctggatgaccacaattaacggcaaggagctgaaggtggagggccagattacctactacaacagatacaagagacagaacgtagtcaaggacctgtccgtcgagctggatagactgagcgaagaatctgtgaacaacgacatctcctcctggacaaagggcagaagcggagaagctctgagcctcctgaagaaaagattctcccatagacccgtgcaggagaagttcgtgtgcctgaactgcggcttcgagacacacgcagccgagcaagccgccctgaacatcgccagatcctggctgttcctgcggagccaggagtacaagaaataccagacaaacaagacaaccggcaacaccgataagagagccttcgtcgagacctggcagtccttttaccggaagaagcttaaggaggtgtggaaacctgccgtgcggtctggcggatctggcggaggctccagctacggcagcctgagcttcgaggacgtgaccgtgggcttcagccaggaggagtggcagcacctggaccccgcccagaggaccctgtacagggacgtgatgctggagaactacagccacctggtggccgtgggctgctgcgtgcccaagcccgacgtgatcttcaggctggagcagggccagcagccctggatcgtggaggaggagagcctggaccagagctgccccgaggtgtgcaaggtgggcggcccaagcagcggcgcccctcctcccagcggcggcagcccagccggctccccaacctctaccgaggagggcacctctgagtccgccacccccgagagcggccctggcacctccaccgagcccagcgagggcagcgcacccggcagccctgccggcagccccacctccacagaggagggaaccagcaccgagcccagcgaaggcagcgccccaggcaccagcaccgagcctagtgagcaggagattaaacggatcaacaagatcagaagaagacttgtgaaagacagcaacaccaagaaggccggcaagacaggccccatgaaaaccctgctggttagagtgatgacacccgatctgagagagcggctggaaaacctgagaaagaagcctgaaaatatcccccagcccatcagcaatacatctagagccaacctgaataagctgctgaccgattacaccgaaatgaagaaggcgatcctgcatgtgtactgggaagagttccagaaggaccctgtgggcctgatgagccgggtggcccagcctgccagcaagaagatcgatcagaacaagctgaaacctgagatggacgagaagggcaacctgaccaccgccggctttgcctgctctcagtgtggccagcccctgttcgtgtacaagctggagcaggtgtctgagaagggcaaggcttacaccaactacttcggacggtgcaatgtggccgagcacgaaaagctgatcctgctggcccagctgaagcccgagaaggatagcgacgaagccgtgacatatagcctgggaaagtttgggcagagggccctggatttctacagcattcatgtgaccaaggagtccacccaccccgtgaagcccctggcccagatcgccggaaacagatacgcctccggacctgtgggaaaggccctgagcgacgcatgtatgggcacaatcgcctccttcctgtctaagtaccaggacatcatcatcgaacaccagaaggtggtgaagggcaaccagaagagactggagagcctgcgggagctggccggcaaggaaaacctggaataccctagcgtgaccctgccacctcagcctcacaccaaggagggcgttgatgcctacaacgaagtgatcgcccgggtgcgaatgtgggtgaacctgaacctgtggcagaagctgaagctaagcagagatgatgccaagcctctgctgagactgaagggattcccttcctttcctctggtcgagagacaggccaacgaagtggactggtgggacatggtgtgtaacgtgaagaagctgatcaacgagaaaaaggaggatggcaaggtgttttggcagaatctggctggctacaagagacaggaagccctgagaccatacctgagcagcgaggaagatcggaagaagggaaagaaattcgctcggtaccagctgggcgacctgctgctgcacctggaaaagaagcacggcgaggactggggaaaggtgtacgacgaggcctgggagcggattgacaagaaagtggaaggcctgagcaagcacatcaagctggaagaggaacggagaagcgaggacgcccagagcaaggccgccctgaccgactggctgcgggctaaggccagcttcgtgatcgagggcctgaaggaggccgacaaggacgagttctgcagatgcgagctgaagctgcagaagtggtacggggacctgcggggaaagcccttcgccatcgaagccgagaacagcatcctggacatcagcggcttcagcaagcagtacaactgtgccttcatctggcagaaggacggcgtgaagaagctgaacctgtacctgatcatcaactacttcaagggcggcaagctgcggttcaagaagatcaaacctgaagccttcgaagccaacagattctacaccgtgatcaacaaaaagagcggcgagatcgtgcccatggaggtgaacttcaacttcgacgaccccaacctgatcatcctgcctctggcctttggcaagagacagggcagagaattcatctggaacgacctgctgtccctggaaaccggcagcctgaagctggccaacggaagagtgatcgagaagacactgtacaacagaagaacccggcaggatgagcctgccctgttcgtggccctgaccttcgagcggcgggaggtcctggactcctccaatatcaaaccaatgaacctgatcggcgtggcaagaggcgaaaacatccccgccgtgatcgccctgaccgaccccgagggctgcccactgagccggtttaaggatagcctgggaaacccaacccacatcctgagaatcggcgagagctataaggagaagcagcggaccatccaggccaagaaggaggtggagcagcggagagccggcggctacagccggaagtacgccagcaaagccaagaatctggcagacgatatggtgagaaacaccgctagagatctgctgtactacgccgtgacccaggatgccatgctgatcttcgccaacctgagccggggcttcggccggcagggcaagcggaccttcatggccgagagacagtacacacggatggaggactggctgaccgccaagctggcctacgagggcctgagcaagacctacctgtccaagacactggcccagtacacctccaagacatgcagcaactgtgggtttaccatcaccagcgccgactacgacagggtgctggagaagctgaagaagacagcaacaggctggatgaccacaattaacggcaaggagctgaaggtggagggccagattacctactacaacagatacaagagacagaacgtagtcaaggacctgtccgtcgagctggatagactgagcgaagaatctgtgaacaacgacatctcctcctggacaaagggcagaagcggagaagctctgagcctcctgaagaaaagattctcccatagacccgtgcaggagaagttcgtgtgcctgaactgcggcttcgagacacacgcagccgagcaagccgccctgaacatcgccagatcctggctgttcctgcggagccaggagtacaagaaataccagacaaacaagacaaccggcaacaccgataagagagccttcgtcgagacctggcagtccttttaccggaagaagcttaaggaggtgtggaaacctgccgtgcggtctggcggatctggcggaggctcctagctacggcagcctgagcttcgaggacgtgaccgtgggcttcagccaggaggagtggcagcacctggaccccgcccagaggaccctgtacagggacgtgatgctggagaactacagccacctggtggccgtgggctgctgcgtgcccaagcccgacgtgatcttcaggctggagcagggccagcagccctggatcgtggaggaggagagcctggaccagagctgccccgaggtgtgcaaggtgggatctggctccggcagcggccccaagaaaaagagaaaagtctaagctgccttctgcggggcttgccttctggccatgcccttcttctctcccttgcacctgtacctcttggtctttgaataaagcctgagtaggaaggctagcaaaaaaaaaaaaaaaaaaaaaaaaaaaaaaaaaaaaaaaaaaaaaaaaaaaaaaaaaaaaaaaaaaaaaaaaaaaaaaaa
